United States Patent Application Publication US 2011/0183924 A1 - sequence listing, part 87

SEQ ID NO: 293471 - DNA, 1288 bp, Homo sapiens
tagcgaaggggtctcgttatgttgcccaggctagtctcgaactcctgggctcatgcaatctgcccacctctaactcccaaagtaccgagatcacagatgtgagcgaccccgcccagcctagttttagattttaaattaagcgtcctcgggattctcagagcacttggatgtggccatctcgccgccacaattctcagaagcagcagctgggccagcccctgccccgtctccgtccgtctcccactcagcggttccgtgttgtcgagttagctcgttgccccgcgccacctccttgcacacctgatgtggggctgtgggggagcagcagaggtgaggacagcctctgctgcctcagcatcgtggggttctcattgctctgaaccctcagtagctgtcgctggtgtgaggggtcagcgcagcggccatcgggggtgaaacttgtccttcgcctctcagctgtcttctacgggccttgtcttcttgactccctgcctgtctagtcatgtatgagaagacacttcccggcagtgtgtgaacaggcacctgtggtgggaacgctgctgtctctgggctggccatctagagtgttaggatcccctgttgttgtagaggatgctgcacatttgccttcctgctttgagacgctttaatgacggagacctcttagtcccacaccttcctcctcaaagcccacgcatcctgcctactgacctgggtcatcttgaccttgtgccaggtctccataacccctcggacaaacgccgccctgggctttgctcagatgctccccagagaccagcacctcttcaccaaggagcagctgtttgagcggatgtgcatggccctgggaggacgggcctcggaagcactgtccttcaacgaggtcacttctggtgaggagcagcggcgcgggccctggaggtttcagagcgcttttccctgcatgactccttctgttccagtgcatgccatggggtgaatctggtgtagacgtagctttgaatttattaagtattttgtaaaagataagttgtggtcataagagagttggagctaagcaagacttcttagataatttaattggacaaaaacttaacctatatgccaactctagacacatttaattggttaattgttggtaatggctacaggaaacggaataaaattgaagcggcttcattgttctgaagccattactgcactgggatatccagagagctgaaggagggtcccgggggcccctgggctccaggtccatgggtttgcctcgcataggcctgggcttgtg

SEQ ID NO: 293472 - DNA, 898 bp, Homo sapiens
cgaccacgcagccacgacccggccggttattcacccgccaggccctgggaatacaaggccggcttcaaaaaaaccagggcacccgcgacctcctcgcagacgcgcgcccccatacccgggcctcaggcagccacgaggtagacgggctcaggctcgggggtgcggcaagcggcacccgggcgcggcggggcgcagctgtggggaccgcgcaggcgccacgtcagaccccgcccaccccgccgcgcaggcgccgtgtagcgccccgcggatcacgcaggcgcggctttcaggccaacatggccgtgctgctgctgctgctccgtgccctccgccggggtccaggcccgggtcctcggccgctgtggggcccaggcccggcctggagtccagggttccccgccaggcccgggagggggcggccgtacatggccagcaggcctccgggggacctcgccgaggctggaggccgagctctgcagagcttacaattgagactgctaacccctacctttgaagggatcaacggattgttgttgaaacaacatttagttcagaatccagtcagactctggcaacttttaggtggtactttctattttaacacctcaaggttgaagcagaagaataaggagaaggataagtcgaaggggaaggcgcctgaagaggacgaagaatctcactctgttgccccggctggagtgcagtggtgcgatctcagctcaatgcaacctccccctcccgggttcaagcaattctcctgcctcagcctccgaagtagctgggattacaggtgctcaccaccacaccctgctaattttttgttttttgttcgtttgtttgtttttgagacggagtctcgctctgtcgcccaggctggagtgcagtggcacaatctcgg

SEQ ID NO: 293473 - DNA, 574 bp, Homo sapiens
actggaggagagactgacctgcctagggggtttgagggaagactgtggcttggcctgtggtggtcactgttgggagcctgtctggctgcaggactactccccacctgggccctggactgtgggaagtgacccctgcgggcattttgcccagtggccatcctggctgtccttttccccaccatgccctcctcagaggcgtctccctggcttcgctgcctggcgctgcttgccacgcctccttgcaggcctccatgaagagtgagtgagcgcccgctgctccagatcccctctgtgctggccccaggccggccttgagtcagtctcttgctgtctgcagggtgcacctgtccacctcccctcgaggtatcccaatgtctggagaacaggggccgaatgtcttttccatcctctgaaaatagaacttaaaaatatcatgagaaacactgttgagtataaaggcatatactccagaccacttgactctagaattttcccagagaccaactctttatgagaagcactcaggtgaattcttctaaatcaccttcatcagttattaacaccctactgaata

SEQ ID NO: 293474 - DNA, 116 bp, Homo sapiens
tcgaattcaagcttctaacgatgtacggggcatgcagtgttggggatgccttggtttttactgctctgagaattgttgagatactttactaataaactgtgtagttggaaaatcta

SEQ ID NO: 293475 - DNA, 4365 bp, Homo sapiens
cgaccacgcagccacgacccggccggttattcacccgccaggccctgggaatacaaggccggcttcaaaaaaaccagggcacccgcgacctcctcgcagacgcgcgcccccatacccgggcctcaggcagccacgaggtagacgggctcaggctcgggggtgcggcaagcggcacccgggcgcggcggggcgcagctgtggggaccgcgcaggcgccacgtcagaccccgcccaccccgccgcgcaggcgccgtgtagcgccccgcggatcacgcaggcgcggctttcaggccaacatggccgtgctgctgctgctgctccgtgccctccgccggggtccaggcccgggtcctcggccgctgtggggcccaggcccggcctggagtccagggttccccgccaggcccgggagggggcggccgtacatggccagcaggcctccgggggacctcgccgaggctggaggccgagctctgcagagcttacaattgagactgctaacccctacctttgaagggatcaacggattgttgttgaaacaacatttagttcagaatccagtcagactctggcaacttttaggtggtactttctattttaacacctcaaggttgaagcagaagaataaggagaaggataagtcgaaggggaaggcgcctgaagaggacgaagaggagaggagacgccgtgagcgggacgaccagatgtaccgagagcggctgcgcaccttgctggtcatcgcggttgtcatgagcctcctgaatgctctcagcaccagcggaggcagcatttcctggaacgactttgtccacgagatgctggccaagggcgaggtgcagcgcgtccaggtggtgcctgagagcgacgtggtggaagtctacctgcaccctggagccgtggtgtttgggcggcctcggctagccttgatgtaccgaatgcaggttgcaaatattgacaagtttgaagagaagcttcgagcagctgaagatgagctgaatatcgaggccaaggacaggatcccagtttcctacaagcgaacaggattctttggaaatgccctgtactctgtggggatgacggcagtgggcctggccatcctgtggtatgttttccgtctggccgggatgactggaagggaaggtggattcagtgcttttaatcagcttaaaatggctcgtttcaccattgtggatgggaagatggggaaaggagtcagcttcaaagacgtggcaggaatgcacgaagccaaactggaagtccgcgagtttgtggattatctgaagagcccagaacgcttcctccagcttggcgccaaggtcccaaagggcgcactgctgctcggcccccccggctgtgggaagacgctgctggccaaggcggtggccacggaggctcaggtgcccttcctggcgatggccggcccagagttcgtggaggtcattggaggcctcggcgctgcccgtgtgcggagcctctttaaggaagcccgagcccgggccccctgcatcgtctacatcgatgagatcgacgcggtgggcaagaagcgctccaccaccatgtccggcttctccaacacggaggaggagcagacgctcaaccagcttctggtagaaatggatgtgttctacgcagaaatagaagagctgaaactggtgtatccttatcacggcgttctacacagcaactagaagagctgaaactggtgtatccttatcacggtgttgtacgcagaaatagaagagctgaaactggtgtatccttatcacggtgttgtacgcagaaatagaagagctgaaactggtgtatccttatcacggtgttctacgcagaaatagaagagctgaaactggtgtatccttatcacggtgttctacgcagaaatagaagagctgaaactggtgtatccttatcacggtgttctacgcagcaatagaagagctgaaactggtgtatccttatcatggtgttctatgcagcagtagaaggaaactttcttcctgcagcaacaaggaaatgacgcaaagtgagaagagccaggcttagtatcgtatgactccacttgaatgggtaccacagaccatgtcatcgtcctggcgtccacgaaccgagctgacattttggacggtgctctgatgaggccaggccgactggaccggcacgtcttcattgatctccccacgctgcagagaaagggtgttgcgctgtcacccaggctggagtgcagtgctgcgatcaccactcactgcggcctcaaccttcagggctcaagctgaggagctaggactactatgggcgtgcgccgccgtgctggttaatttttaacagagtctcgctgtgttgccaaggctggagtgcagcggcgcgatctcggctcactgcaaccaccatctcccaggagaggcgggagatttttgagcagcacctgaagagcctgaagctgacccagtccagcaccttttactcccagcgtctggcagagctgacaccaggattcagtggggctgacatcgccaacatctgcaatgaggctgcgctgcacgcggcgcgggagggacacacttccgtgcacactctcaacttcgagtacgccgtggagcgcgtcctcgcaggtccccagggcttcagctttgggaaagcagtgggttcctgcagaggagtggggcagctgctgtgccagacactgcaaaacacacctggcttctctccgacagccctgcgggtcgagaggactggcgctgcctgtgtcttactgaaatttattttcgtgtaaccatttacttttatgtggaaatcgaaaagcttttgataatagtagcaaagcaggaaggactgagtgggaaccacaagccagttgaaagaaaatacatgacgtacttgagtgctcaggaccacgagctgattcaagttgtacagaatggacacttacagatgtgtggaaaatctgagacaggaaatgaagcctcaccaggactgccaaaaagagcaagatcctgtccaaggaagaacagaaagtggttgcgtttcatgagtcgggccacgccttggtgggctggatgctggagcacacggaggccgtgatgaaggtctccataacccctcggacaaacgccgccctgggctttgctcagatgctccccagagaccagcacctcttcaccaaggagcagctgtttgagcggatgtgcatggccctgggaggacgggcctcggaagcactgtccttcaacgaggtcacttctggggcacaggacgacctgaggaaggtcacccgcatcgcctactccatggtgaagcagtttgggatggcacctggcatcgggcccatctccttccctgaggcgcaggagggcctcatgggcatcgggcggcgccccttcagccaaggcctgcagcagatgatggaccatgaagcaagactgctggtggccaaggcctacagacacaccgagaaggtgctgcaggacaacctggacaagttgcaggcgctggcaaacgcccttctggaaaaggaagtgataaactatgaggacattgaggctctcattggcccgccgccccatgggccgaagaaaatgatcgcaccgcagaggtggatcgacgcccagagggagaaacaggacttgggcgaggaggagaccgaagagacccagcagcctccacttggaggcgaagagccgacttggcccaagtagttgggaggtgttggctgcacgtgcgggtggtccgggaagtgagggctcactcagccaccctgagttgcttttcagctgaggtttgcacttcctctcgcggccctcagtagtccctgcacagtgacttctgagatctgttgattgatgacccttttcatgattttaagtttctctgcagaaactactgacggagtcctgtgtttgtgagtcgtttcccctatggggaaggttatcagtgcttcccgagtgagcatggaacacttcgagttcccagggttatagacagtcgttcccagtgtggctgaggccacccagaggcagcagagcattcagactccaaacagacccctgttcatgccgacgcttgcacgaccgccccagttcctgtggctccctcggaatgctaaggggatcggacatgaaaggaccctgtgagccgattgtcctatctccagcggccctgtcatccagctcactcatcaatggggccagtcaggcccaggcactgggctccggaggactcaccactgccccctgctgccatgtggactggtgcaagttgaggacttcttgctggtctagtcacgcatgcagtgttggggatgccttggtttttactgctctgagaattgttgagatactttactaataaactgtgtagttggaaaatcta

SEQ ID NO: 293476 - DNA, 5022 bp, Homo sapiens
actggaggagagactgacctgcctagggggtttgagggaagactgtggcttggcctgtggtggtcactgttgggagcctgtctggctgcaggactactccccacctgggccctggactgtgggaagtgacccctgcgggcattttgcccagtggccatcctggctgtccttttccccaccatgccctcctcagaggcgtctccctggcttcgctgcctggcgctgcttgccacgcctccttgcaggcctccatgaagagtgagtgagcgcccgctgctccagatcccctctgtgctggccccaggccggccttgagtcagtctcttgctgtctgcagggtgcacctgtccacctcccctcgaggtatcccaatgtctggagaacaggggccgaatgtcttttccatcctctgagagctaagcataatgccaccgtgtcttcagtagggtgttaataactgaggaaggtaatttagaagaattcacctggtgcttctcataaagagttggtctctgggaaaattctagagtcaagtggtctggagtatatgcctttagactcaacagtgtatctcatgatatttttaagttctattttcagatgttgtgataacctacaactttctgttaaatgttagtcattctgatgagtaaaaagttcagaatggttgttgggtagggagagagaaggcacaagggtcttcagtgggattgggaaggtattatttcttgaggcaggttgtggtaaaaggtatttgttttaatcgtttttaataacttttgtgtatgttttgatatttagtatttgatcaaactccaagcaactggattcatggccattgtgagcttgcactttgcagcaggagagctgactgcatctgtgacggctcggacggcctgggacggtcgtttcttttctgagacagggtcgttctctgtcacccaggctggagcacagtggcgcgatcacgactcactgcagcttcaacctcccgcctcagcctcccaagtagctgggaccacaggcgtgcaccgttgtgcccaggtctaagtgtttcgatttagaaatggtttcctcttatctcaggtgggaaccactcctgctcctcactgaagtgacctcagcgaatgaagtgtgggtgacctcgaacagcacagcattagtctttgtctctgataacgtcagggaagaattggaggaagtgcaggatcttctgtgcaggacgctgcccctccccgtccagctgagctttcctgaggaagctctggatgtcgcccgtgtctgttgctcatgtgtttgtttctcccttttgcttctctgccggctcagaggagaggagacgccgtgagcgggacgaccagatgtaccgagagcggctgcgcaccttgctggtcatcgcggttgtcatgagcctcctgaatgctctcagcaccagcggaggcagcatttcctggaacgactttgtccacgagatgctggccaagggcgaggtgcagcgcgtccaggtggtgcctgagagcgacgtggtggaagtctacctgcaccctggagccgtggtgtttgggcggcctcggctagccttgatgtaccgaatgcaggttgcaaatattgacaagtttgaagagaagcttcgagcagctgaagatgagctgaatatcgaggccaaggacaggatcccagtttcctacaagcgaacaggattctttggaaatgccctgtactctgtggggatgacggcagtgggcctggccatcctgtggtatgttttccgtctggccgggatgactggaagggaaggtggattcagtgcttttaatcagcttaaaatggctcgtttcaccattgtggatgggaagatggggaaaggagtcagcttcaaagacgtggcaggaatgcacgaagccaaactggaagtccgcgagtttgtggattatctgaagagcccagaacgcttcctccagcttggcgccaaggtcccaaagggcgcactgctgctcggcccccccggctgtgggaagacgctgctggccaaggcggtggccacggaggctcaggtgcccttcctggcgatggccggcccagagttcgtggaggtcattggaggcctcggcgctgcccgtgtgcggagcctctttaaggaagcccgagcccgggccccctgcatcgtctacatcgatgagatcgacgcggtgggcaagaagcgctccaccaccatgtccggcttctccaacacggaggaggagcagacgctcaaccagcttctggtagaaatggatgtgttctacgcagaaatagaagagctgaaactggtgtatccttatcacggcgttctacacagcaactagaagagctgaaactggtgtatccttatcacggtgttgtacgcagaaatagaagagctgaaactggtgtatccttatcacggtgttgtacgcagaaatagaagagctgaaactggtgtatccttatcacggtgttctacgcagaaatagaagagctgaaactggtgtatccttatcacggtgttctacgcagaaatagaagagctgaaactggtgtatccttatcacggtgttctacgcagcaatagaagagctgaaactggtgtatccttatcatggtgttctatgcagcagtagaaggaaactttcttcctgcagcaacaaggaaatgacgcaaagtgagaagagccaggcttagtatcgtatgactccacttgaatgggtaccacagaccatgtcatcgtcctggcgtccacgaaccgagctgacattttggacggtgctctgatgaggccaggccgactggaccggcacgtcttcattgatctccccacgctgcagagaaagggtgttgcgctgtcacccaggctggagtgcagtgctgcgatcaccactcactgcggcctcaaccttcagggctcaagctgaggagctaggactactatgggcgtgcgccgccgtgctggttaatttttaacagagtctcgctgtgttgccaaggctggagtgcagcggcgcgatctcggctcactgcaaccaccatctcccaggagaggcgggagatttttgagcagcacctgaagagcctgaagctgacccagtccagcaccttttactcccagcgtctggcagagctgacaccaggattcagtggggctgacatcgccaacatctgcaatgaggctgcgctgcacgcggcgcgggagggacacacttccgtgcacactctcaacttcgagtacgccgtggagcgcgtcctcgcaggtccccagggcttcagctttgggaaagcagtgggttcctgcagaggagtggggcagctgctgtgccagacactgcaaaacacacctggcttctctccgacagccctgcgggtcgagaggactggcgctgcctgtgtcttactgaaatttattttcgtgtaaccatttacttttatgtggaaatcgaaaagcttttgataatagtagcaaagcaggaaggactgagtgggaaccacaagccagttgaaagaaaatacatgacgtacttgagtgctcaggaccacgagctgattcaagttgtacagaatggacacttacagatgtgtggaaaatctgagacaggaaatgaagcctcaccaggactgccaaaaagagcaagatcctgtccaaggaagaacagaaagtggttgcgtttcatgagtcgggccacgccttggtgggctggatgctggagcacacggaggccgtgatgaaggtctccataacccctcggacaaacgccgccctgggctttgctcagatgctccccagagaccagcacctcttcaccaaggagcagctgtttgagcggatgtgcatggccctgggaggacgggcctcggaagcactgtccttcaacgaggtcacttctggggcacaggacgacctgaggaaggtcacccgcatcgcctactccatggtgaagcagtttgggatggcacctggcatcgggcccatctccttccctgaggcgcaggagggcctcatgggcatcgggcggcgccccttcagccaaggcctgcagcagatgatggaccatgaagcaagactgctggtggccaaggcctacagacacaccgagaaggtgctgcaggacaacctggacaagttgcaggcgctggcaaacgcccttctggaaaaggaagtgataaactatgaggacattgaggctctcattggcccgccgccccatgggccgaagaaaatgatcgcaccgcagaggtggatcgacgcccagagggagaaacaggacttgggcgaggaggagaccgaagagacccagcagcctccacttggaggcgaagagccgacttggcccaagtagttgggaggtgttggctgcacgtgcgggtggtccgggaagtgagggctcactcagccaccctgagttgcttttcagctgaggtttgcacttcctctcgcggccctcagtagtccctgcacagtgacttctgagatctgttgattgatgacccttttcatgattttaagtttctctgcagaaactactgacggagtcctgtgtttgtgagtcgtttcccctatggggaaggttatcagtgcttcccgagtgagcatggaacacttcgagttcccagggttatagacagtcgttcccagtgtggctgaggccacccagaggcagcagagcattcagactccaaacagacccctgttcatgccgacgcttgcacgaccgccccagttcctgtggctccctcggaatgctaaggggatcggacatgaaaggaccctgtgagccgattgtcctatctccagcggccctgtcatccagctcactcatcaatggggccagtcaggcccaggcactgggctccggaggactcaccactgccccctgctgccatgtggactggtgcaagttgaggacttcttgctggtctagtcacgcatgcagtgttggggatgccttggtttttactgctctgagaattgttgagatactttactaataaactgtgtagttggaaaatcta

SEQ ID NO: 293477 - DNA, 4580 bp, Homo sapiens
cgaccacgcagccacgacccggccggttattcacccgccaggccctgggaatacaaggccggcttcaaaaaaaccagggcacccgcgacctcctcgcagacgcgcgcccccatacccgggcctcaggcagccacgaggtagacgggctcaggctcgggggtgcggcaagcggcacccgggcgcggcggggcgcagctgtggggaccgcgcaggcgccacgtcagaccccgcccaccccgccgcgcaggcgccgtgtagcgccccgcggatcacgcaggcgcggctttcaggccaacatggccgtgctgctgctgctgctccgtgccctccgccggggtccaggcccgggtcctcggccgctgtggggcccaggcccggcctggagtccagggttccccgccaggcccgggagggggcggccgtacatggccagcaggcctccgggggacctcgccgaggctggaggccgagctctgcagagcttacaattgagactgctaacccctacctttgaagggatcaacggattgttgttgaaacaacatttagttcagaatccagtcagactctggcaacttttaggtggtactttctattttaacacctcaaggttgaagcagaagaataaggagaaggataagtcgaaggggaaggcgcctgaagaggacgaagaggagaggagacgccgtgagcgggacgaccagatgtaccgagagcggctgcgcaccttgctggtcatcgcggttgtcatgagcctcctgaatgctctcagcaccagcggaggcagcatttcctggaacgactttgtccacgagatgctggccaagggcgaggtgcagcgcgtccaggtggtgcctgagagcgacgtggtggaagtctacctgcaccctggagccgtggtgtttgggcggcctcggctagccttgatgtaccgaatgcaggttgcaaatattgacaagtttgaagagaagcttcgagcagctgaagatgagctgaatatcgaggccaaggacaggatcccagtttcctacaagcgaacaggattctttggaaatgccctgtactctgtggggatgacggcagtgggcctggccatcctgtggtatgttttccgtctggccgggatgactggaagggaaggtggattcagtgcttttaatcagcttaaaatggctcgtttcaccattgtggatgggaagatggggaaaggagtcagcttcaaagacgtggcaggaatgcacgaagccaaactggaagtccgcgagtttgtggattatctgaagagcccagaacgcttcctccagcttggcgccaaggtcccaaagggcgcactgctgctcggcccccccggctgtgggaagacgctgctggccaaggcggtggccacggaggctcaggtgcccttcctggcgatggccggcccagagttcgtggaggtcattggaggcctcggcgctgcccgtgtgcggagcctctttaaggaagcccgagcccgggccccctgcatcgtctacatcgatgagatcgacgcggtgggcaagaagcgctccaccaccatgtccggcttctccaacacggaggaggagcagacgctcaaccagcttctggtagaaatggatggaatgggtaccacagaccatgtcatcgtcctggcgtccacgaaccgagctgacattttggacggtgctctgatgaggccaggccgactggaccggcacgtcttcattgatctccccacgctgcaggagaggcgggagatttttgagcagcacctgaagagcctgaagctgacccagtccagcaccttttactcccagcgtctggcagagctgacaccaggattcagtggggctgacatcgccaacatctgcaatgaggctgcgctgcacgcggcgcgggagggacacacttccgtgcacactctcaacttcgagtacgccgtggagcgcgtcctcgcaggtacagggggcgcgccctgggtgaaggccctccttagcagggcttgaaccccagaaatacccaggcaggtattgagaggtgaggtggatggaaccatcacacaggaaggaacacacgttgcgtttcagttctgcgtaactcatgtctttatgataccttgtacttttccttagtttaaaatatcacagatttacctaagagtagacgctcgtccaacagaaataaaaaatgccttgccaaagaaagtgaaaaaataaaaataaaaaatgccccccaaaaataaaaataataaaaactaaaaatgtcttgccagcctgggtgtggtgggctcagcctagccccagcctcatgggggctgagctccagccgctgactgtgggccggaggctgctgccgcccgtggctgtggagggacagccgtgctttcagcgcacagggggctctgcggagaggtgtggatctgcagcaccacctctggtgaaactcatggtcccgaccgtcagtaggaacgggagatgagttttggtgacgggtgaccggtgggctgaccgcctctgactgccgttccgtggctgctcagtgtggggtctgcgacgtctgtgaggagagaggaccaaactgggaatcggagctgctggaggtttccatagctatgatggcaacacccagacgtgatcagtcatctcatggaatggagttcagacccgcactgtcagtgtgagacaggttgaacgtttgaaaagggaagtggttcttgccccaggtgtttgaggagcacgagcctcctttgcgagctatccctgcgagaaccgagttcctcaccctcaattcgagtgaattcctagcacgaacacgcctcttgcaggtccccagggcttcagctttgggaaagcagtgggttcctgcagaggagtggggcagctgctgtgccagacactgcaaaacacacctggcttctctccgacagccctgcgggtcgagaggactggcgctgcctgtgtcttactgaaatttattttcgtgtaaccatttacttttatgtggaaatcgaaaagcttttgataatagtagcaaagcaggaaggactgagtgggaaccacaagccagttgaaagaaaatacatgacgtacttgagtgctcaggaccacgagctgattcaagttgtacagaatggacacttacagatgtgtggaaaatctgagacaggaaatgaagcctcaccaggactgccaaaaagagcaagatcctgtccaaggaagaacagaaagtggttgcgtttcatgagtcgggccacgccttggtgggctggatgctggagcacacggaggccgtgatgaaggtctccataacccctcggacaaacgccgccctgggctttgctcagatgctccccagagaccagcacctcttcaccaaggagcagctgtttgagcggatgtgcatggccctgggaggacgggcctcggaagcactgtccttcaacgaggtcacttctggggcacaggacgacctgaggaaggtcacccgcatcgcctactccatggtgaagcagtttgggatggcacctggcatcgggcccatctccttccctgaggcgcaggagggcctcatgggcatcgggcggcgccccttcagccaaggcctgcagcagatgatggaccatgaagcaagactgctggtggccaaggcctacagacacaccgagaaggtgctgcaggacaacctggacaagttgcaggcgctggcaaacgcccttctggaaaaggaagtgataaactatgaggacattgaggctctcattggcccgccgccccatgggccgaagaaaatgatcgcaccgcagaggtggatcgacgcccagagggagaaacaggacttgggcgaggaggagaccgaagagacccagcagcctccacttggaggcgaagagccgacttggcccaagtagttgggaggtgttggctgcacgtgcgggtggtccgggaagtgagggctcactcagccaccctgagttgcttttcagctgaggtttgcacttcctctcgcggccctcagtagtccctgcacagtgacttctgagatctgttgattgatgacccttttcatgattttaagtttctctgcagaaactactgacggagtcctgtgtttgtgagtcgtttcccctatggggaaggttatcagtgcttcccgagtgagcatggaacacttcgagttcccagggttatagacagtcgttcccagtgtggctgaggccacccagaggcagcagagcattcagactccaaacagacccctgttcatgccgacgcttgcacgaccgccccagttcctgtggctccctcggaatgctaaggggatcggacatgaaaggaccctgtgagccgattgtcctatctccagcggccctgtcatccagctcactcatcaatggggccagtcaggcccaggcactgggctccggaggactcaccactgccccctgctgccatgtggactggtgcaagttgaggacttcttgctggtctagtcacgcatgcagtgttggggatgccttggtttttactgctctgagaattgttgagatactttactaataaactgtgtagttggaaaatcta

SEQ ID NO: 293478 - DNA, 4070 bp, Homo sapiens
cgaccacgcagccacgacccggccggttattcacccgccaggccctgggaatacaaggccggcttcaaaaaaaccagggcacccgcgacctcctcgcagacgcgcgcccccatacccgggcctcaggcagccacgaggtagacgggctcaggctcgggggtgcggcaagcggcacccgggcgcggcggggcgcagctgtggggaccgcgcaggcgccacgtcagaccccgcccaccccgccgcgcaggcgccgtgtagcgccccgcggatcacgcaggcgcggctttcaggccaacatggccgtgctgctgctgctgctccgtgccctccgccggggtccaggcccgggtcctcggccgctgtggggcccaggcccggcctggagtccagggttccccgccaggcccgggagggggcggccgtacatggccagcaggcctccgggggacctcgccgaggctggaggccgagctctgcagagcttacaattgagactgctaacccctacctttgaagggatcaacggattgttgttgaaacaacatttagttcagaatccagtcagactctggcaacttttaggtggtactttctattttaacacctcaaggttgaagcagaagaataaggagaaggataagtcgaaggggaaggcgcctgaagaggacgaagaggagaggagacgccgtgagcgggacgaccagatgtaccgagagcggctgcgcaccttgctggtcatcgcggttgtcatgagcctcctgaatgctctcagcaccagcggaggcagcatttcctggaacgactttgtccacgagatgctggccaagggcgaggtgcagcgcgtccaggtggtgcctgagagcgacgtggtggaagtctacctgcaccctggagccgtggtgtttgggcggcctcggctagccttgatgtaccgaatgcaggttgcaaatattgacaagtttgaagagaagcttcgagcagctgaagatgagctgaatatcgaggccaaggacaggatcccagtttcctacaagcgaacaggattctttggaaatgccctgtactctgtggggatgacggcagtgggcctggccatcctgtggtatgttttccgtctggccgggatgactggaagggaaggtggattcagtgcttttaatcagcttaaaatggctcgtttcaccattgtggatgggaagatggggaaaggagtcagcttcaaagacgtggcaggaatgcacgaagccaaactggaagtccgcgagtttgtggattatctgaagagcccagaacgcttcctccagcttggcgccaaggtcccaaagggcgcactgctgctcggcccccccggctgtgggaagacgctgctggccaaggcggtggccacggaggctcaggtgcccttcctggcgatggccggcccagagttcgtggaggtcattggaggcctcggcgctgcccgtgtgcggagcctctttaaggaagcccgagcccgggccccctgcatcgtctacatcgatgagatcgacgcggtgggcaagaagcgctccaccaccatgtccggcttctccaacacggaggaggagcagacgctcaaccagcttctggtagaaatggatgtgttctacgcagaaatagaagagctgaaactggtgtatccttatcacggcgttctacacagcaactagaagagctgaaactggtgtatccttatcacggtgttgtacgcagaaatagaagagctgaaactggtgtatccttatcacggtgttgtacgcagaaatagaagagctgaaactggtgtatccttatcacggtgttctacgcagaaatagaagagctgaaactggtgtatccttatcacggtgttctacgcagaaatagaagagctgaaactggtgtatccttatcacggtgttctacgcagcaatagaagagctgaaactggtgtatccttatcatggtgttctatgcagcagtagaaggaaactttcttcctgcagcaacaaggaaatgacgcaaagaatgggtaccacagaccatgtcatcgtcctggcgtccacgaaccgagctgacattttggacggtgctctgatgaggccaggccgactggaccggcacgtcttcattgatctccccacgctgcagagaaagggtgttgcgctgtcacccaggctggagtgcagtgctgcgatcaccactcactgcggcctcaaccttcagggctcaagctgaggagctaggactactatgggcgtgcgccgccgtgctggttaatttttaacagagtctcgctgtgttgccaaggctggtgtcaaacccctggcctcaagtgatccccacccacctctccttccaagagcgttctcttttttttttttttgagacagtctcactctatcccccaggctggagtgcagcggcgcgatctcggctcactgcaaccaccatctcccaggagaggcgggagatttttgagcagcacctgaagagcctgaagctgacccagtccagcaccttttactcccagcgtctggcagagctgacaccaggattcagtggggctgacatcgccaacatctgcaatgaggctgcgctgcacgcggcgcgggagggacacacttccgtgcacactctcaacttcgagtacgccgtggagcgcgtcctcgcagggactgccaaaaagagcaagatcctgtccaaggaagaacagaaagtggttgcgtttcatgagtcgggccacgccttggtgggctggatgctggagcacacggaggccgtgatgaaggtctccataacccctcggacaaacgccgccctgggctttgctcagatgctccccagagaccagcacctcttcaccaaggagcagctgtttgagcggatgtgcatggccctgggaggacgggcctcggaagcactgtccttcaacgaggtcacttctggggcacaggacgacctgaggaaggtcacccgcatcgcctactccatggtgaagcagtttgggatggcacctggcatcgggcccatctccttccctgaggcgcaggagggcctcatgggcatcgggcggcgccccttcagccaaggcctgcagcagatgatggaccatgaagcaagactgctggtggccaaggcctacagacacaccgagaaggtgctgcaggacaacctggacaagttgcaggcgctggcaaacgcccttctggaaaaggaagtgataaactatgaggacattgaggctctcattggcccgccgccccatgggccgaagaaaatgatcgcaccgcagaggtggatcgacgcccagagggagaaacaggacttgggcgaggaggagaccgaagagacccagcagcctccacttggaggcgaagagccgacttggcccaagtagttgggaggtgttggctgcacgtgcgggtggtccgggaagtgagggctcactcagccaccctgagttgcttttcagctgaggtttgcacttcctctcgcggccctcagtagtccctgcacagtgacttctgagatctgttgattgatgacccttttcatgattttaagtttctctgcagaaactactgacggagtcctgtgtttgtgagtcgtttcccctatggggaaggttatcagtgcttcccgagtgagcatggaacacttcgagttcccagggttatagacagtcgttcccagtgtggctgaggccacccagaggcagcagagcattcagactccaaacagacccctgttcatgccgacgcttgcacgaccgccccagttcctgtggctccctcggaatgctaaggggatcggacatgaaaggaccctgtgagccgattgtcctatctccagcggccctgtcatccagctcactcatcaatggggccagtcaggcccaggcactgggctccggaggactcaccactgccccctgctgccatgtggactggtgcaagttgaggacttcttgctggtctagtcacgcatgcagtgttggggatgccttggtttttactgctctgagaattgttgagatactttactaataaactgtgtagttggaaaatcta

SEQ ID NO: 293479 - DNA, 3667 bp, Homo sapiens
cgaccacgcagccacgacccggccggttattcacccgccaggccctgggaatacaaggccggcttcaaaaaaaccagggcacccgcgacctcctcgcagacgcgcgcccccatacccgggcctcaggcagccacgaggtagacgggctcaggctcgggggtgcggcaagcggcacccgggcgcggcggggcgcagctgtggggaccgcgcaggcgccacgtcagaccccgcccaccccgccgcgcaggcgccgtgtagcgccccgcggatcacgcaggcgcggctttcaggccaacatggccgtgctgctgctgctgctccgtgccctccgccggggtccaggcccgggtcctcggccgctgtggggcccaggcccggcctggagtccagggttccccgccaggcccgggagggggcggccgtacatggccagcaggcctccgggggacctcgccgaggctggaggccgagctctgcagagcttacaattgagactgctaacccctacctttgaagggatcaacggattgttgttgaaacaacatttagttcagaatccagtcagactctggcaacttttaggtggtactttctattttaacacctcaaggttgaagcagaagaataaggagaaggataagtcgaaggggaaggcgcctgaagaggacgaagaggagaggagacgccgtgagcgggacgaccagatgtaccgagagcggctgcgcaccttgctggtcatcgcggttgtcatgagcctcctgaatgctctcagcaccagcggaggcagcatttcctggaacgactttgtccacgagatgctggccaagggcgaggtgcagcgcgtccaggtggtgcctgagagcgacgtggtggaagtctacctgcaccctggagccgtggtgtttgggcggcctcggctagccttgatgtaccgaatgcaggttgcaaatattgacaagtttgaagagaagcttcgagcagctgaagatgagctgaatatcgaggccaaggacaggatcccagtttcctacaagcgaacaggattctttggaaatgccctgtactctgtggggatgacggcagtgggcctggccatcctgtggtatgttttccgtctggccgggatgactggaagggaaggtggattcagtgcttttaatcagcttaaaatggctcgtttcaccattgtggatgggaagatggggaaaggagtcagcttcaaagacgtggcaggaatgcacgaagccaaactggaagtccgcgagtttgtggattatctgaagagcccagaacgcttcctccagcttggcgccaaggtcccaaagggcgcactgctgctcggcccccccggctgtgggaagacgctgctggccaaggcggtggccacggaggctcaggtgcccttcctggcgatggccggcccagagttcgtggaggtcattggaggcctcggcgctgcccgtgtgcggagcctctttaaggaagcccgagcccgggccccctgcatcgtctacatcgatgagatcgacgcggtgggcaagaagcgctccaccaccatgtccggcttctccaacacggaggaggagcagacgctcaaccagcttctggtagaaatggatggaatgggtaccacagaccatgtcatcgtcctggcgtccacgaaccgagctgacattttggacggtgctctgatgaggccaggccgactggaccggcacgtcttcattgatctccccacgctgcagagaaagggtgttgcgctgtcacccaggctggagtgcagtgctgcgatcaccactcactgcggcctcaaccttcagggctcaagctgaggagctaggactactatgggcgtgcgccgccgtgctggttaatttttaacagagtctcgctgtgttgccaaggctggtgtcaaacccctggcctcaagtgatccccacccacctctccttccaagagcgttctcttttttttttttttgagacagtctcactctatcccccaggctggagtgcagcggcgcgatctcggctcactgcaaccaccatctcccaggagaggcgggagatttttgagcagcacctgaagagcctgaagctgacccagtccagcaccttttactcccagcgtctggcagagctgacaccaggattcagtggggctgacatcgccaacatctgcaatgaggctgcgctgcacgcggcgcgggagggacacacttccgtgcacactctcaacttcgagtacgccgtggagcgcgtcctcgcagggactgccaaaaagagcaagatcctgtccaaggaagaacagaaagtggttgcgtttcatgagtcgggccacgccttggtgggctggatgctggagcacacggaggccgtgatgaaggtctccataacccctcggacaaacgccgccctgggctttgctcagatgctccccagagaccagcacctcttcaccaaggagcagctgtttgagcggatgtgcatggccctgggaggacgggcctcggaagcactgtccttcaacgaggtcacttctggggcacaggacgacctgaggaaggtcacccgcatcgcctactccatggtgaagcagtttgggatggcacctggcatcgggcccatctccttccctgaggcgcaggagggcctcatgggcatcgggcggcgccccttcagccaaggcctgcagcagatgatggaccatgaagcaagactgctggtggccaaggcctacagacacaccgagaaggtgctgcaggacaacctggacaagttgcaggcgctggcaaacgcccttctggaaaaggaagtgataaactatgaggacattgaggctctcattggcccgccgccccatgggccgaagaaaatgatcgcaccgcagaggtggatcgacgcccagagggagaaacaggacttgggcgaggaggagaccgaagagacccagcagcctccacttggaggcgaagagccgacttggcccaagtagttgggaggtgttggctgcacgtgcgggtggtccgggaagtgagggctcactcagccaccctgagttgcttttcagctgaggtttgcacttcctctcgcggccctcagtagtccctgcacagtgacttctgagatctgttgattgatgacccttttcatgattttaagtttctctgcagaaactactgacggagtcctgtgtttgtgagtcgtttcccctatggggaaggttatcagtgcttcccgagtgagcatggaacacttcgagttcccagggttatagacagtcgttcccagtgtggctgaggccacccagaggcagcagagcattcagactccaaacagacccctgttcatgccgacgcttgcacgaccgccccagttcctgtggctccctcggaatgctaaggggatcggacatgaaaggaccctgtgagccgattgtcctatctccagcggccctgtcatccagctcactcatcaatggggccagtcaggcccaggcactgggctccggaggactcaccactgccccctgctgccatgtggactggtgcaagttgaggacttcttgctggtctagtcacgcatgcagtgttggggatgccttggtttttactgctctgagaattgttgagatactttactaataaactgtgtagttggaaaatcta

SEQ ID NO: 293480 - DNA, 4122 bp, Homo sapiens
cgaccacgcagccacgacccggccggttattcacccgccaggccctgggaatacaaggccggcttcaaaaaaaccagggcacccgcgacctcctcgcagacgcgcgcccccatacccgggcctcaggcagccacgaggtagacgggctcaggctcgggggtgcggcaagcggcacccgggcgcggcggggcgcagctgtggggaccgcgcaggcgccacgtcagaccccgcccaccccgccgcgcaggcgccgtgtagcgccccgcggatcacgcaggcgcggctttcaggccaacatggccgtgctgctgctgctgctccgtgccctccgccggggtccaggcccgggtcctcggccgctgtggggcccaggcccggcctggagtccagggttccccgccaggcccgggagggggcggccgtacatggccagcaggcctccgggggacctcgccgaggctggaggccgagctctgcagagcttacaattgagactgctaacccctacctttgaagggatcaacggattgttgttgaaacaacatttagttcagaatccagtcagactctggcaacttttaggtggtactttctattttaacacctcaaggttgaagcagaagaataaggagaaggataagtcgaaggggaaggcgcctgaagaggacgaagaggagaggagacgccgtgagcgggacgaccagatgtaccgagagcggctgcgcaccttgctggtcatcgcggttgtcatgagcctcctgaatgctctcagcaccagcggaggcagcatttcctggaacgactttgtccacgagatgctggccaagggcgaggtgcagcgcgtccaggtggtgcctgagagcgacgtggtggaagtctacctgcaccctggagccgtggtgtttgggcggcctaatcagcttaaaatggctcgtttcaccattgtggatgggaagatggggaaaggagtcagcttcaaagacgtggcaggaatgcacgaagccaaactggaagtccgcgagtttgtggattatctgaagagcccagaacgcttcctccagcttggcgccaaggtcccaaagggcgcactgctgctcggcccccccggctgtgggaagacgctgctggccaaggcggtggccacggaggctcaggtgcccttcctggcgatggccggcccagagttcgtggaggtcattggaggcctcggcgctgcccgtgtgcggagcctctttaaggaagcccgagcccgggccccctgcatcgtctacatcgatgagatcgacgcggtgggcaagaagcgctccaccaccatgtccggcttctccaacacggaggaggagcagacgctcaaccagcttctggtagaaatggatgtgttctacgcagaaatagaagagctgaaactggtgtatccttatcacggcgttctacacagcaactagaagagctgaaactggtgtatccttatcacggtgttgtacgcagaaatagaagagctgaaactggtgtatccttatcacggtgttgtacgcagaaatagaagagctgaaactggtgtatccttatcacggtgttctacgcagaaatagaagagctgaaactggtgtatccttatcacggtgttctacgcagaaatagaagagctgaaactggtgtatccttatcacggtgttctacgcagcaatagaagagctgaaactggtgtatccttatcatggtgttctatgcagcagtagaaggaaactttcttcctgcagcaacaaggaaatgacgcaaagtgagaagagccaggcttagtatcgtatgactccacttgaatgggtaccacagaccatgtcatcgtcctggcgtccacgaaccgagctgacattttggacggtgctctgatgaggccaggccgactggaccggcacgtcttcattgatctccccacgctgcagagaaagggtgttgcgctgtcacccaggctggagtgcagtgctgcgatcaccactcactgcggcctcaaccttcagggctcaagctgaggagctaggactactatgggcgtgcgccgccgtgctggttaatttttaacagagtctcgctgtgttgccaaggctggagtgcagcggcgcgatctcggctcactgcaaccaccatctcccaggagaggcgggagatttttgagcagcacctgaagagcctgaagctgacccagtccagcaccttttactcccagcgtctggcagagctgacaccaggattcagtggggctgacatcgccaacatctgcaatgaggctgcgctgcacgcggcgcgggagggacacacttccgtgcacactctcaacttcgagtacgccgtggagcgcgtcctcgcaggtccccagggcttcagctttgggaaagcagtgggttcctgcagaggagtggggcagctgctgtgccagacactgcaaaacacacctggcttctctccgacagccctgcgggtcgagaggactggcgctgcctgtgtcttactgaaatttattttcgtgtaaccatttacttttatgtggaaatcgaaaagcttttgataatagtagcaaagcaggaaggactgagtgggaaccacaagccagttgaaagaaaatacatgacgtacttgagtgctcaggaccacgagctgattcaagttgtacagaatggacacttacagatgtgtggaaaatctgagacaggaaatgaagcctcaccaggactgccaaaaagagcaagatcctgtccaaggaagaacagaaagtggttgcgtttcatgagtcgggccacgccttggtgggctggatgctggagcacacggaggccgtgatgaaggtctccataacccctcggacaaacgccgccctgggctttgctcagatgctccccagagaccagcacctcttcaccaaggagcagctgtttgagcggatgtgcatggccctgggaggacgggcctcggaagcactgtccttcaacgaggtcacttctggggcacaggacgacctgaggaaggtcacccgcatcgcctactccatggtgaagcagtttgggatggcacctggcatcgggcccatctccttccctgaggcgcaggagggcctcatgggcatcgggcggcgccccttcagccaaggcctgcagcagatgatggaccatgaagcaagactgctggtggccaaggcctacagacacaccgagaaggtgctgcaggacaacctggacaagttgcaggcgctggcaaacgcccttctggaaaaggaagtgataaactatgaggacattgaggctctcattggcccgccgccccatgggccgaagaaaatgatcgcaccgcagaggtggatcgacgcccagagggagaaacaggacttgggcgaggaggagaccgaagagacccagcagcctccacttggaggcgaagagccgacttggcccaagtagttgggaggtgttggctgcacgtgcgggtggtccgggaagtgagggctcactcagccaccctgagttgcttttcagctgaggtttgcacttcctctcgcggccctcagtagtccctgcacagtgacttctgagatctgttgattgatgacccttttcatgattttaagtttctctgcagaaactactgacggagtcctgtgtttgtgagtcgtttcccctatggggaaggttatcagtgcttcccgagtgagcatggaacacttcgagttcccagggttatagacagtcgttcccagtgtggctgaggccacccagaggcagcagagcattcagactccaaacagacccctgttcatgccgacgcttgcacgaccgccccagttcctgtggctccctcggaatgctaaggggatcggacatgaaaggaccctgtgagccgattgtcctatctccagcggccctgtcatccagctcactcatcaatggggccagtcaggcccaggcactgggctccggaggactcaccactgccccctgctgccatgtggactggtgcaagttgaggacttcttgctggtctagtcacgcatgcagtgttggggatgccttggtttttactgctctgagaattgttgagatactttactaataaactgtgtagttggaaaatcta

SEQ ID NO: 293481 - DNA, 4125 bp, Homo sapiens
actcaacaagctttccagctcttggcgtcagctctagacctaaggcggacggaggaaggggtcggggtggcggaggaccccgcgcgcctgggagcccacgagggaccctgcccgggcccggagggcggaccctgaagagaacagagcctcttcctaagcttccagacggcgcctccccgcttcctacgatgggctcgcgcagcggccggggcaggaccgaggctcgaagcgcctccgagagcttacaattgagactgctaacccctacctttgaagggatcaacggattgttgttgaaacaacatttagttcagaatccagtcagactctggcaacttttaggtggtactttctattttaacacctcaaggttgaagcagaagaataaggagaaggataagtcgaaggggaaggcgcctgaagaggacgaagaggagaggagacgccgtgagcgggacgaccagatgtaccgagagcggctgcgcaccttgctggtcatcgcggttgtcatgagcctcctgaatgctctcagcaccagcggaggcagcatttcctggaacgactttgtccacgagatgctggccaagggcgaggtgcagcgcgtccaggtggtgcctgagagcgacgtggtggaagtctacctgcaccctggagccgtggtgtttgggcggcctcggctagccttgatgtaccgaatgcaggttgcaaatattgacaagtttgaagagaagcttcgagcagctgaagatgagctgaatatcgaggccaaggacaggatcccagtttcctacaagcgaacaggattctttggaaatgccctgtactctgtggggatgacggcagtgggcctggccatcctgtggtatgttttccgtctggccgggatgactggaagggaaggtggattcagtgcttttaatcagcttaaaatggctcgtttcaccattgtggatgggaagatggggaaaggagtcagcttcaaagacgtggcaggaatgcacgaagccaaactggaagtccgcgagtttgtggattatctgaagagcccagaacgcttcctccagcttggcgccaaggtcccaaagggcgcactgctgctcggcccccccggctgtgggaagacgctgctggccaaggcggtggccacggaggctcaggtgcccttcctggcgatggccggcccagagttcgtggaggtcattggaggcctcggcgctgcccgtgtgcggagcctctttaaggaagcccgagcccgggccccctgcatcgtctacatcgatgagatcgacgcggtgggcaagaagcgctccaccaccatgtccggcttctccaacacggaggaggagcagacgctcaaccagcttctggtagaaatggatgtgttctacgcagaaatagaagagctgaaactggtgtatccttatcacggcgttctacacagcaactagaagagctgaaactggtgtatccttatcacggtgttgtacgcagaaatagaagagctgaaactggtgtatccttatcacggtgttgtacgcagaaatagaagagctgaaactggtgtatccttatcacggtgttctacgcagaaatagaagagctgaaactggtgtatccttatcacggtgttctacgcagaaatagaagagctgaaactggtgtatccttatcacggtgttctacgcagcaatagaagagctgaaactggtgtatccttatcatggtgttctatgcagcagtagaaggaaactttcttcctgcagcaacaaggaaatgacgcaaagtgagaagagccaggcttagtatcgtatgactccacttgaatgggtaccacagaccatgtcatcgtcctggcgtccacgaaccgagctgacattttggacggtgctctgatgaggccaggccgactggaccggcacgtcttcattgatctccccacgctgcagagaaagggtgttgcgctgtcacccaggctggagtgcagtgctgcgatcaccactcactgcggcctcaaccttcagggctcaagctgaggagctaggactactatgggcgtgcgccgccgtgctggttaatttttaacagagtctcgctgtgttgccaaggctggagtgcagcggcgcgatctcggctcactgcaaccaccatctcccaggagaggcgggagatttttgagcagcacctgaagagcctgaagctgacccagtccagcaccttttactcccagcgtctggcagagctgacaccaggattcagtggggctgacatcgccaacatctgcaatgaggctgcgctgcacgcggcgcgggagggacacacttccgtgcacactctcaacttcgagtacgccgtggagcgcgtcctcgcaggtccccagggcttcagctttgggaaagcagtgggttcctgcagaggagtggggcagctgctgtgccagacactgcaaaacacacctggcttctctccgacagccctgcgggtcgagaggactggcgctgcctgtgtcttactgaaatttattttcgtgtaaccatttacttttatgtggaaatcgaaaagcttttgataatagtagcaaagcaggaaggactgagtgggaaccacaagccagttgaaagaaaatacatgacgtacttgagtgctcaggaccacgagctgattcaagttgtacagaatggacacttacagatgtgtggaaaatctgagacaggaaatgaagcctcaccaggactgccaaaaagagcaagatcctgtccaaggaagaacagaaagtggttgcgtttcatgagtcgggccacgccttggtgggctggatgctggagcacacggaggccgtgatgaaggtctccataacccctcggacaaacgccgccctgggctttgctcagatgctccccagagaccagcacctcttcaccaaggagcagctgtttgagcggatgtgcatggccctgggaggacgggcctcggaagcactgtccttcaacgaggtcacttctggggcacaggacgacctgaggaaggtcacccgcatcgcctactccatggtgaagcagtttgggatggcacctggcatcgggcccatctccttccctgaggcgcaggagggcctcatgggcatcgggcggcgccccttcagccaaggcctgcagcagatgatggaccatgaagcaagactgctggtggccaaggcctacagacacaccgagaaggtgctgcaggacaacctggacaagttgcaggcgctggcaaacgcccttctggaaaaggaagtgataaactatgaggacattgaggctctcattggcccgccgccccatgggccgaagaaaatgatcgcaccgcagaggtggatcgacgcccagagggagaaacaggacttgggcgaggaggagaccgaagagacccagcagcctccacttggaggcgaagagccgacttggcccaagtagttgggaggtgttggctgcacgtgcgggtggtccgggaagtgagggctcactcagccaccctgagttgcttttcagctgaggtttgcacttcctctcgcggccctcagtagtccctgcacagtgacttctgagatctgttgattgatgacccttttcatgattttaagtttctctgcagaaactactgacggagtcctgtgtttgtgagtcgtttcccctatggggaaggttatcagtgcttcccgagtgagcatggaacacttcgagttcccagggttatagacagtcgttcccagtgtggctgaggccacccagaggcagcagagcattcagactccaaacagacccctgttcatgccgacgcttgcacgaccgccccagttcctgtggctccctcggaatgctaaggggatcggacatgaaaggaccctgtgagccgattgtcctatctccagcggccctgtcatccagctcactcatcaatggggccagtcaggcccaggcactgggctccggaggactcaccactgccccctgctgccatgtggactggtgcaagttgaggacttcttgctggtctagtcacgcatgcagtgttggggatgccttggtttttactgctctgagaattgttgagatactttactaataaactgtgtagttggaaaatcta

SEQ ID NO: 293482 - DNA, 3557 bp, Homo sapiens
ttaggctaggtagaggcggggttaatcggccgagggtcaggtggtgcctgagagcgacgtggtggaagtctacctgcaccctggagccgtggtgtttgggcggcctcggctagccttgatgtaccgaatgcaggttgcaaatattgacaagtttgaagagaagcttcgagcagctgaagatgagctgaatatcgaggccaaggacaggatcccagtttcctacaagcgaacaggattctttggaaatgccctgtactctgtggggatgacggcagtgggcctggccatcctgtggtatgttttccgtctggccgggatgactggaagggaaggtggattcagtgcttttaatcagcttaaaatggctcgtttcaccattgtggatgggaagatggggaaaggagtcagcttcaaagacgtggcaggaatgcacgaagccaaactggaagtccgcgagtttgtggattatctgaagagcccagaacgcttcctccagcttggcgccaaggtcccaaagggcgcactgctgctcggcccccccggctgtgggaagacgctgctggccaaggcggtggccacggaggctcaggtgcccttcctggcgatggccggcccagagttcgtggaggtcattggaggcctcggcgctgcccgtgtgcggagcctctttaaggaagcccgagcccgggccccctgcatcgtctacatcgatgagatcgacgcggtgggcaagaagcgctccaccaccatgtccggcttctccaacacggaggaggagcagacgctcaaccagcttctggtagaaatggatgtgttctacgcagaaatagaagagctgaaactggtgtatccttatcacggcgttctacacagcaactagaagagctgaaactggtgtatccttatcacggtgttgtacgcagaaatagaagagctgaaactggtgtatccttatcacggtgttgtacgcagaaatagaagagctgaaactggtgtatccttatcacggtgttctacgcagaaatagaagagctgaaactggtgtatccttatcacggtgttctacgcagaaatagaagagctgaaactggtgtatccttatcacggtgttctacgcagcaatagaagagctgaaactggtgtatccttatcatggtgttctatgcagcagtagaaggaaactttcttcctgcagcaacaaggaaatgacgcaaagtgagaagagccaggcttagtatcgtatgactccacttgaatgggtaccacagaccatgtcatcgtcctggcgtccacgaaccgagctgacattttggacggtgctctgatgaggccaggccgactggaccggcacgtcttcattgatctccccacgctgcagagaaagggtgttgcgctgtcacccaggctggagtgcagtgctgcgatcaccactcactgcggcctcaaccttcagggctcaagctgaggagctaggactactatgggcgtgcgccgccgtgctggttaatttttaacagagtctcgctgtgttgccaaggctggagtgcagcggcgcgatctcggctcactgcaaccaccatctcccaggagaggcgggagatttttgagcagcacctgaagagcctgaagctgacccagtccagcaccttttactcccagcgtctggcagagctgacaccaggattcagtggggctgacatcgccaacatctgcaatgaggctgcgctgcacgcggcgcgggagggacacacttccgtgcacactctcaacttcgagtacgccgtggagcgcgtcctcgcaggtccccagggcttcagctttgggaaagcagtgggttcctgcagaggagtggggcagctgctgtgccagacactgcaaaacacacctggcttctctccgacagccctgcgggtcgagaggactggcgctgcctgtgtcttactgaaatttattttcgtgtaaccatttacttttatgtggaaatcgaaaagcttttgataatagtagcaaagcaggaaggactgagtgggaaccacaagccagttgaaagaaaatacatgacgtacttgagtgctcaggaccacgagctgattcaagttgtacagaatggacacttacagatgtgtggaaaatctgagacaggaaatgaagcctcaccaggactgccaaaaagagcaagatcctgtccaaggaagaacagaaagtggttgcgtttcatgagtcgggccacgccttggtgggctggatgctggagcacacggaggccgtgatgaaggtctccataacccctcggacaaacgccgccctgggctttgctcagatgctccccagagaccagcacctcttcaccaaggagcagctgtttgagcggatgtgcatggccctgggaggacgggcctcggaagcactgtccttcaacgaggtcacttctggggcacaggacgacctgaggaaggtcacccgcatcgcctactccatggtgaagcagtttgggatggcacctggcatcgggcccatctccttccctgaggcgcaggagggcctcatgggcatcgggcggcgccccttcagccaaggcctgcagcagatgatggaccatgaagcaagactgctggtggccaaggcctacagacacaccgagaaggtgctgcaggacaacctggacaagttgcaggcgctggcaaacgcccttctggaaaaggaagtgataaactatgaggacattgaggctctcattggcccgccgccccatgggccgaagaaaatgatcgcaccgcagaggtggatcgacgcccagagggagaaacaggacttgggcgaggaggagaccgaagagacccagcagcctccacttggaggcgaagagccgacttggcccaagtagttgggaggtgttggctgcacgtgcgggtggtccgggaagtgagggctcactcagccaccctgagttgcttttcagctgaggtttgcacttcctctcgcggccctcagtagtccctgcacagtgacttctgagatctgttgattgatgacccttttcatgattttaagtttctctgcagaaactactgacggagtcctgtgtttgtgagtcgtttcccctatggggaaggttatcagtgcttcccgagtgagcatggaacacttcgagttcccagggttatagacagtcgttcccagtgtggctgaggccacccagaggcagcagagcattcagactccaaacagacccctgttcatgccgacgcttgcacgaccgccccagttcctgtggctccctcggaatgctaaggggatcggacatgaaaggaccctgtgagccgattgtcctatctccagcggccctgtcatccagctcactcatcaatggggccagtcaggcccaggcactgggctccggaggactcaccactgccccctgctgccatgtggactggtgcaagttgaggacttcttgctggtctagtcacgcatgcagtgttggggatgccttggtttttactgctctgagaattgttgagatactttactaataaactgtgtagttggaaaatcta

SEQ ID NO: 293483 - DNA, 3517 bp, Homo sapiens
tgcaacctccgcctcccgggttcaagcgattctcctgcctcagcctcctgagtagctgggattacgggtgcgcgccaccacacccagctaatttttgtatttttagtagagacggggctggtctcaaactcctgatctcaagctacgcgcctgcctcagcctcccaaaatgttggaattccaggtgtgagccaccgcacctggcctgcaagaagtttttaaaagtagctgggcgtggtgccacatgcctgtatattcccagctactcgagaggctgaggtgagagggtggcttgaacccaggagtttgaggctgcagtgagctatcatggcacccactgcactccagcctgcgtgacccagagagaccttacctctaaaaaacaaaaaaacggaatccccaagtagttagtgttgcattgtctgctgccgtccagagcccagaacgcttcctccagcttggcgccaaggtcccaaagggcgcactgctgctcggcccccccggctgtgggaagacgctgctggccaaggcggtggccacggaggctcaggtgcccttcctggcgatggccggcccagagttcgtggaggtcattggaggcctcggcgctgcccgtgtgcggagcctctttaaggaagcccgagcccgggccccctgcatcgtctacatcgatgagatcgacgcggtgggcaagaagcgctccaccaccatgtccggcttctccaacacggaggaggagcagacgctcaaccagcttctggtagaaatggatgtgttctacgcagaaatagaagagctgaaactggtgtatccttatcacggcgttctacacagcaactagaagagctgaaactggtgtatccttatcacggtgttgtacgcagaaatagaagagctgaaactggtgtatccttatcacggtgttgtacgcagaaatagaagagctgaaactggtgtatccttatcacggtgttctacgcagaaatagaagagctgaaactggtgtatccttatcacggtgttctacgcagaaatagaagagctgaaactggtgtatccttatcacggtgttctacgcagcaatagaagagctgaaactggtgtatccttatcatggtgttctatgcagcagtagaaggaaactttcttcctgcagcaacaaggaaatgacgcaaagtgagaagagccaggcttagtatcgtatgactccacttgaatgggtaccacagaccatgtcatcgtcctggcgtccacgaaccgagctgacattttggacggtgctctgatgaggccaggccgactggaccggcacgtcttcattgatctccccacgctgcagagaaagggtgttgcgctgtcacccaggctggagtgcagtgctgcgatcaccactcactgcggcctcaaccttcagggctcaagctgaggagctaggactactatgggcgtgcgccgccgtgctggttaatttttaacagagtctcgctgtgttgccaaggctggagtgcagcggcgcgatctcggctcactgcaaccaccatctcccaggagaggcgggagatttttgagcagcacctgaagagcctgaagctgacccagtccagcaccttttactcccagcgtctggcagagctgacaccaggattcagtggggctgacatcgccaacatctgcaatgaggctgcgctgcacgcggcgcgggagggacacacttccgtgcacactctcaacttcgagtacgccgtggagcgcgtcctcgcaggtccccagggcttcagctttgggaaagcagtgggttcctgcagaggagtggggcagctgctgtgccagacactgcaaaacacacctggcttctctccgacagccctgcgggtcgagaggactggcgctgcctgtgtcttactgaaatttattttcgtgtaaccatttacttttatgtggaaatcgaaaagcttttgataatagtagcaaagcaggaaggactgagtgggaaccacaagccagttgaaagaaaatacatgacgtacttgagtgctcaggaccacgagctgattcaagttgtacagaatggacacttacagatgtgtggaaaatctgagacaggaaatgaagcctcaccaggactgccaaaaagagcaagatcctgtccaaggaagaacagaaagtggttgcgtttcatgagtcgggccacgccttggtgggctggatgctggagcacacggaggccgtgatgaaggtctccataacccctcggacaaacgccgccctgggctttgctcagatgctccccagagaccagcacctcttcaccaaggagcagctgtttgagcggatgtgcatggccctgggaggacgggcctcggaagcactgtccttcaacgaggtcacttctggggcacaggacgacctgaggaaggtcacccgcatcgcctactccatggtgaagcagtttgggatggcacctggcatcgggcccatctccttccctgaggcgcaggagggcctcatgggcatcgggcggcgccccttcagccaaggcctgcagcagatgatggaccatgaagcaagactgctggtggccaaggcctacagacacaccgagaaggtgctgcaggacaacctggacaagttgcaggcgctggcaaacgcccttctggaaaaggaagtgataaactatgaggacattgaggctctcattggcccgccgccccatgggccgaagaaaatgatcgcaccgcagaggtggatcgacgcccagagggagaaacaggacttgggcgaggaggagaccgaagagacccagcagcctccacttggaggcgaagagccgacttggcccaagtagttgggaggtgttggctgcacgtgcgggtggtccgggaagtgagggctcactcagccaccctgagttgcttttcagctgaggtttgcacttcctctcgcggccctcagtagtccctgcacagtgacttctgagatctgttgattgatgacccttttcatgattttaagtttctctgcagaaactactgacggagtcctgtgtttgtgagtcgtttcccctatggggaaggttatcagtgcttcccgagtgagcatggaacacttcgagttcccagggttatagacagtcgttcccagtgtggctgaggccacccagaggcagcagagcattcagactccaaacagacccctgttcatgccgacgcttgcacgaccgccccagttcctgtggctccctcggaatgctaaggggatcggacatgaaaggaccctgtgagccgattgtcctatctccagcggccctgtcatccagctcactcatcaatggggccagtcaggcccaggcactgggctccggaggactcaccactgccccctgctgccatgtggactggtgcaagttgaggacttcttgctggtctagtcacgcatgcagtgttggggatgccttggtttttactgctctgagaattgttgagatactttactaataaactgtgtagttggaaaatcta

SEQ ID NO: 293484 - DNA, 3574 bp, Homo sapiens
tttgtatttttggtagagacaggtttcaccgtgttagccagggtggtctcgatctcttgacctcgtgatccgcccatctcggcctcccaaagtgctaggattacaggcgtgagccaccatgcctggctgagtaattttttttaaagcaaattgctagataagtttcttactaattaatgacgaaacatttcccttctgtgcttgaagactgactgtgagcctcgtcagcctgacatgagtgaagccttgggatcctaggatggagacgtggggttggggcggctcaggtgcgtgggctgagcgctggcatcgtgctgctgatttcctgacttcgcccagctccttgcactttgttctttctgcacaaatcagcttaaaatggctcgtttcaccattgtggatgggaagatggggaaaggagtcagcttcaaagacgtggcaggaatgcacgaagccaaactggaagtccgcgagtttgtggattatctgaagagcccagaacgcttcctccagcttggcgccaaggtcccaaagggcgcactgctgctcggcccccccggctgtgggaagacgctgctggccaaggcggtggccacggaggctcaggtgcccttcctggcgatggccggcccagagttcgtggaggtcattggaggcctcggcgctgcccgtgtgcggagcctctttaaggaagcccgagcccgggccccctgcatcgtctacatcgatgagatcgacgcggtgggcaagaagcgctccaccaccatgtccggcttctccaacacggaggaggagcagacgctcaaccagcttctggtagaaatggatgtgttctacgcagaaatagaagagctgaaactggtgtatccttatcacggcgttctacacagcaactagaagagctgaaactggtgtatccttatcacggtgttgtacgcagaaatagaagagctgaaactggtgtatccttatcacggtgttgtacgcagaaatagaagagctgaaactggtgtatccttatcacggtgttctacgcagaaatagaagagctgaaactggtgtatccttatcacggtgttctacgcagaaatagaagagctgaaactggtgtatccttatcacggtgttctacgcagcaatagaagagctgaaactggtgtatccttatcatggtgttctatgcagcagtagaaggaaactttcttcctgcagcaacaaggaaatgacgcaaagtgagaagagccaggcttagtatcgtatgactccacttgaatgggtaccacagaccatgtcatcgtcctggcgtccacgaaccgagctgacattttggacggtgctctgatgaggccaggccgactggaccggcacgtcttcattgatctccccacgctgcagagaaagggtgttgcgctgtcacccaggctggagtgcagtgctgcgatcaccactcactgcggcctcaaccttcagggctcaagctgaggagctaggactactatgggcgtgcgccgccgtgctggttaatttttaacagagtctcgctgtgttgccaaggctggagtgcagcggcgcgatctcggctcactgcaaccaccatctcccaggagaggcgggagatttttgagcagcacctgaagagcctgaagctgacccagtccagcaccttttactcccagcgtctggcagagctgacaccaggattcagtggggctgacatcgccaacatctgcaatgaggctgcgctgcacgcggcgcgggagggacacacttccgtgcacactctcaacttcgagtacgccgtggagcgcgtcctcgcaggtccccagggcttcagctttgggaaagcagtgggttcctgcagaggagtggggcagctgctgtgccagacactgcaaaacacacctggcttctctccgacagccctgcgggtcgagaggactggcgctgcctgtgtcttactgaaatttattttcgtgtaaccatttacttttatgtggaaatcgaaaagcttttgataatagtagcaaagcaggaaggactgagtgggaaccacaagccagttgaaagaaaatacatgacgtacttgagtgctcaggaccacgagctgattcaagttgtacagaatggacacttacagatgtgtggaaaatctgagacaggaaatgaagcctcaccaggactgccaaaaagagcaagatcctgtccaaggaagaacagaaagtggttgcgtttcatgagtcgggccacgccttggtgggctggatgctggagcacacggaggccgtgatgaaggtctccataacccctcggacaaacgccgccctgggctttgctcagatgctccccagagaccagcacctcttcaccaaggagcagctgtttgagcggatgtgcatggccctgggaggacgggcctcggaagcactgtccttcaacgaggtcacttctggggcacaggacgacctgaggaaggtcacccgcatcgcctactccatggtgaagcagtttgggatggcacctggcatcgggcccatctccttccctgaggcgcaggagggcctcatgggcatcgggcggcgccccttcagccaaggcctgcagcagatgatggaccatgaagcaagactgctggtggccaaggcctacagacacaccgagaaggtgctgcaggacaacctggacaagttgcaggcgctggcaaacgcccttctggaaaaggaagtgataaactatgaggacattgaggctctcattggcccgccgccccatgggccgaagaaaatgatcgcaccgcagaggtggatcgacgcccagagggagaaacaggacttgggcgaggaggagaccgaagagacccagcagcctccacttggaggcgaagagccgacttggcccaagtagttgggaggtgttggctgcacgtgcgggtggtccgggaagtgagggctcactcagccaccctgagttgcttttcagctgaggtttgcacttcctctcgcggccctcagtagtccctgcacagtgacttctgagatctgttgattgatgacccttttcatgattttaagtttctctgcagaaactactgacggagtcctgtgtttgtgagtcgtttcccctatggggaaggttatcagtgcttcccgagtgagcatggaacacttcgagttcccagggttatagacagtcgttcccagtgtggctgaggccacccagaggcagcagagcattcagactccaaacagacccctgttcatgccgacgcttgcacgaccgccccagttcctgtggctccctcggaatgctaaggggatcggacatgaaaggaccctgtgagccgattgtcctatctccagcggccctgtcatccagctcactcatcaatggggccagtcaggcccaggcactgggctccggaggactcaccactgccccctgctgccatgtggactggtgcaagttgaggacttcttgctggtctagtcacgcatgcagtgttggggatgccttggtttttactgctctgagaattgttgagatactttactaataaactgtgtagttggaaaatcta

SEQ ID NO: 293485 - DNA, 3052 bp, Homo sapiens
atgcaaagaaaccagatcccttgtacgctgctgatgggggtgtgacgtggtgcagcctcactgggaaacagtttggcagcttcttaaaaaactaaacgtgtgctcaccatgtgaccccgtgtccacatgcgctcaccacatgaccccgcatccaccctcctgggtgctcatcccaggaaagcaaagacttaggctcacacgaaatgcctgggcgccgacgctcatttacctgtaatagctaaaaactggaagtgacccaggtgccattcagtggctgagagctgaaactggtgtatccttatcacagtgttctacgcagaaatagaagagctgaaactggtgtatccttatcacggcgttctacacagcaactagaagagctgaaactggtgtatccttatcacggtgttgtacgcagaaatagaagagctgaaactggtgtatccttatcacggtgttgtacgcagaaatagaagagctgaaactggtgtatccttatcacggtgttctacgcagaaatagaagagctgaaactggtgtatccttatcacggtgttctacgcagaaatagaagagctgaaactggtgtatccttatcacggtgttctacgcagcaatagaagagctgaaactggtgtatccttatcatggtgttctatgcagcagtagaaggaaactttcttcctgcagcaacaaggaaatgacgcaaagtgagaagagccaggcttagtatcgtatgactccacttgaatgggtaccacagaccatgtcatcgtcctggcgtccacgaaccgagctgacattttggacggtgctctgatgaggccaggccgactggaccggcacgtcttcattgatctccccacgctgcagagaaagggtgttgcgctgtcacccaggctggagtgcagtgctgcgatcaccactcactgcggcctcaaccttcagggctcaagctgaggagctaggactactatgggcgtgcgccgccgtgctggttaatttttaacagagtctcgctgtgttgccaaggctggagtgcagcggcgcgatctcggctcactgcaaccaccatctcccaggagaggcgggagatttttgagcagcacctgaagagcctgaagctgacccagtccagcaccttttactcccagcgtctggcagagctgacaccaggattcagtggggctgacatcgccaacatctgcaatgaggctgcgctgcacgcggcgcgggagggacacacttccgtgcacactctcaacttcgagtacgccgtggagcgcgtcctcgcaggtccccagggcttcagctttgggaaagcagtgggttcctgcagaggagtggggcagctgctgtgccagacactgcaaaacacacctggcttctctccgacagccctgcgggtcgagaggactggcgctgcctgtgtcttactgaaatttattttcgtgtaaccatttacttttatgtggaaatcgaaaagcttttgataatagtagcaaagcaggaaggactgagtgggaaccacaagccagttgaaagaaaatacatgacgtacttgagtgctcaggaccacgagctgattcaagttgtacagaatggacacttacagatgtgtggaaaatctgagacaggaaatgaagcctcaccaggactgccaaaaagagcaagatcctgtccaaggaagaacagaaagtggttgcgtttcatgagtcgggccacgccttggtgggctggatgctggagcacacggaggccgtgatgaaggtctccataacccctcggacaaacgccgccctgggctttgctcagatgctccccagagaccagcacctcttcaccaaggagcagctgtttgagcggatgtgcatggccctgggaggacgggcctcggaagcactgtccttcaacgaggtcacttctggggcacaggacgacctgaggaaggtcacccgcatcgcctactccatggtgaagcagtttgggatggcacctggcatcgggcccatctccttccctgaggcgcaggagggcctcatgggcatcgggcggcgccccttcagccaaggcctgcagcagatgatggaccatgaagcaagactgctggtggccaaggcctacagacacaccgagaaggtgctgcaggacaacctggacaagttgcaggcgctggcaaacgcccttctggaaaaggaagtgataaactatgaggacattgaggctctcattggcccgccgccccatgggccgaagaaaatgatcgcaccgcagaggtggatcgacgcccagagggagaaacaggacttgggcgaggaggagaccgaagagacccagcagcctccacttggaggcgaagagccgacttggcccaagtagttgggaggtgttggctgcacgtgcgggtggtccgggaagtgagggctcactcagccaccctgagttgcttttcagctgaggtttgcacttcctctcgcggccctcagtagtccctgcacagtgacttctgagatctgttgattgatgacccttttcatgattttaagtttctctgcagaaactactgacggagtcctgtgtttgtgagtcgtttcccctatggggaaggttatcagtgcttcccgagtgagcatggaacacttcgagttcccagggttatagacagtcgttcccagtgtggctgaggccacccagaggcagcagagcattcagactccaaacagacccctgttcatgccgacgcttgcacgaccgccccagttcctgtggctccctcggaatgctaaggggatcggacatgaaaggaccctgtgagccgattgtcctatctccagcggccctgtcatccagctcactcatcaatggggccagtcaggcccaggcactgggctccggaggactcaccactgccccctgctgccatgtggactggtgcaagttgaggacttcttgctggtctagtcacgcatgcagtgttggggatgccttggtttttactgctctgagaattgttgagatactttactaataaactgtgtagttggaaaatcta

SEQ ID NO: 293486 - DNA, 2782 bp, Homo sapiens
gaaccttgtaataacgtgcacgcaccagtcatagatgtcgctgatccaatactcgagttcatatacccctattgtgtattatgaactctatattaggacaggacagttcctatcttgcgtccgctattccgggttcgtatttacagcgataaaagtccttcgtaatccgctttcacacgcgggattcctccgaggtcggttctctatctattgtccaatattcctccctctgtgtaaatttttttctccctatatgaacattcgtggtgtatccttatcacggtgttctacgcagaaatagaagagctgaaactggtgtatccttatcacggtgttctacgcagcaatagaagagctgaaactggtgtatccttatcatggtgttctatgcagcagtagaaggaaactttcttcctgcagcaacaaggaaatgacgcaaagtgagaagagccaggcttagtatcgtatgactccacttgaatgggtaccacagaccatgtcatcgtcctggcgtccacgaaccgagctgacattttggacggtgctctgatgaggccaggccgactggaccggcacgtcttcattgatctccccacgctgcagagaaagggtgttgcgctgtcacccaggctggagtgcagtgctgcgatcaccactcactgcggcctcaaccttcagggctcaagctgaggagctaggactactatgggcgtgcgccgccgtgctggttaatttttaacagagtctcgctgtgttgccaaggctggagtgcagcggcgcgatctcggctcactgcaaccaccatctcccaggagaggcgggagatttttgagcagcacctgaagagcctgaagctgacccagtccagcaccttttactcccagcgtctggcagagctgacaccaggattcagtggggctgacatcgccaacatctgcaatgaggctgcgctgcacgcggcgcgggagggacacacttccgtgcacactctcaacttcgagtacgccgtggagcgcgtcctcgcaggtccccagggcttcagctttgggaaagcagtgggttcctgcagaggagtggggcagctgctgtgccagacactgcaaaacacacctggcttctctccgacagccctgcgggtcgagaggactggcgctgcctgtgtcttactgaaatttattttcgtgtaaccatttacttttatgtggaaatcgaaaagcttttgataatagtagcaaagcaggaaggactgagtgggaaccacaagccagttgaaagaaaatacatgacgtacttgagtgctcaggaccacgagctgattcaagttgtacagaatggacacttacagatgtgtggaaaatctgagacaggaaatgaagcctcaccaggactgccaaaaagagcaagatcctgtccaaggaagaacagaaagtggttgcgtttcatgagtcgggccacgccttggtgggctggatgctggagcacacggaggccgtgatgaaggtctccataacccctcggacaaacgccgccctgggctttgctcagatgctccccagagaccagcacctcttcaccaaggagcagctgtttgagcggatgtgcatggccctgggaggacgggcctcggaagcactgtccttcaacgaggtcacttctggggcacaggacgacctgaggaaggtcacccgcatcgcctactccatggtgaagcagtttgggatggcacctggcatcgggcccatctccttccctgaggcgcaggagggcctcatgggcatcgggcggcgccccttcagccaaggcctgcagcagatgatggaccatgaagcaagactgctggtggccaaggcctacagacacaccgagaaggtgctgcaggacaacctggacaagttgcaggcgctggcaaacgcccttctggaaaaggaagtgataaactatgaggacattgaggctctcattggcccgccgccccatgggccgaagaaaatgatcgcaccgcagaggtggatcgacgcccagagggagaaacaggacttgggcgaggaggagaccgaagagacccagcagcctccacttggaggcgaagagccgacttggcccaagtagttgggaggtgttggctgcacgtgcgggtggtccgggaagtgagggctcactcagccaccctgagttgcttttcagctgaggtttgcacttcctctcgcggccctcagtagtccctgcacagtgacttctgagatctgttgattgatgacccttttcatgattttaagtttctctgcagaaactactgacggagtcctgtgtttgtgagtcgtttcccctatggggaaggttatcagtgcttcccgagtgagcatggaacacttcgagttcccagggttatagacagtcgttcccagtgtggctgaggccacccagaggcagcagagcattcagactccaaacagacccctgttcatgccgacgcttgcacgaccgccccagttcctgtggctccctcggaatgctaaggggatcggacatgaaaggaccctgtgagccgattgtcctatctccagcggccctgtcatccagctcactcatcaatggggccagtcaggcccaggcactgggctccggaggactcaccactgccccctgctgccatgtggactggtgcaagttgaggacttcttgctggtctagtcacgcatgcagtgttggggatgccttggtttttactgctctgagaattgttgagatactttactaataaactgtgtagttggaaaatcta

SEQ ID NO: 293487 - DNA, 3303 bp, Homo sapiens
cgaccacgcagccacgacccggccggttattcacccgccaggccctgggaatacaaggccggcttcaaaaaaaccagggcacccgcgacctcctcgcagacgcgcgcccccatacccgggcctcaggcagccacgaggtagacgggctcaggctcgggggtgcggcaagcggcacccgggcgcggcggggcgcagctgtggggaccgcgcaggcgccacgtcagaccccgcccaccccgccgcgcaggcgccgtgtagcgccccgcggatcacgcaggcgcggctttcaggccaacatggccgtgctgctgctgctgctccgtgccctccgccggggtccaggcccgggtcctcggccgctgtggggcccaggcccggcctggagtccagggttccccgccaggcccgggagggggcggccgtacatggccagcaggcctccgggggacctcgccgaggctggaggccgagctctgcagagcttacaattgagactgctaacccctacctttgaagggatcaacggattgttgttgaaacaacatttagttcagaatccagtcagactctggcaacttttaggtggtactttctattttaacacctcaaggttgaagcagaagaataaggagaaggataagtcgaaggggaaggcgcctgaagaggacgaagaggagaggagacgccgtgagcgggacgaccagatgtaccgagagcggctgcgcaccttgctggtcatcgcggttgtcatgagcctcctgaatgctctcagcaccagcggaggcagcatttcctggaacgactttgtccacgagatgctggccaagggcgaggtgcagcgcgtccaggtggtgcctgagagcgacgtggtggaagtctacctgcaccctggagccgtggtgtttgggcggcctcggctagccttgatgtaccgaatgcaggttgcaaatattgacaagtttgaagagaagcttcgagcagctgaagatgagctgaatatcgaggccaaggacaggatcccagtttcctacaagcgaacaggattctttggaaatgccctgtactctgtggggatgacggcagtgggcctggccatcctgtggtatgttttccgtctggccgggatgactggaagggaaggtggattcagtgcttttaatcagcttaaaatggctcgtttcaccattgtggatgggaagatggggaaaggagtcagcttcaaagacgtggcaggaatgcacgaagccaaactggaagtccgcgagtttgtggattatctgaagagcccagaacgcttcctccagcttggcgccaaggtcccaaagggcgcactgctgctcggcccccccggctgtgggaagacgctgctggccaaggcggtggccacggaggctcaggtgcccttcctggcgatggccggcccagagttcgtggaggtcattggaggcctcggcgctgcccgtgtgcggagcctctttaaggaagcccgagcccgggccccctgcatcgtctacatcgatgagatcgacgcggtgggcaagaagcgctccaccaccatgtccggcttctccaacacggaggaggagcagacgctcaaccagcttctggtagaaatggatggaatgggtaccacagaccatgtcatcgtcctggcgtccacgaaccgagctgacattttggacggtgctctgatgaggccaggccgactggaccggcacgtcttcattgatctccccacgctgcaggagaggcgggagatttttgagcagcacctgaagagcctgaagctgacccagtccagcaccttttactcccagcgtctggcagagctgacaccaggattcagtggggctgacatcgccaacatctgcaatgaggctgcgctgcacgcggcgcgggagggacacacttccgtgcacactctcaacttcgagtacgccgtggagcgcgtcctcgcagggactgccaaaaagagcaagatcctgtccaaggaagaacagaaagtggttgcgtttcatgagtcgggccacgccttggtgggctggatgctggagcacacggaggccgtgatgaaggtctccataacccctcggacaaacgccgccctgggctttgctcagatgctccccagagaccagcacctcttcaccaaggagcagctgtttgagcggatgtgcatggccctgggaggacgggcctcggaagcactgtccttcaacgaggtcacttctggggcacaggacgacctgaggaaggtcacccgcatcgcctactccatggtgaagcagtttgggatggcacctggcatcgggcccatctccttccctgaggcgcaggagggcctcatgggcatcgggcggcgccccttcagccaaggcctgcagcagatgatggaccatgaagcaagactgctggtggccaaggcctacagacacaccgagaaggtgctgcaggacaacctggacaagttgcaggcgctggcaaacgcccttctggaaaaggaagtgataaactatgaggacattgaggctctcattggcccgccgccccatgggccgaagggcgaggaggagaccgaagagacccagcagcctccacttggaggcgaagagccgacttggcccaagtagttgggaggtgttggctgcacgtgcgggtggtccgggaagtgagggctcactcagccaccctgagttgcttttcagctgaggtttgcacttcctctcgcggccctcagtagtccctgcacagtgacttctgagatctgttgattgatgacccttttcatgattttaagtttctctgcagaaactactgacggagtcctgtgtttgtgagtcgtttcccctatggggaaggttatcagtgcttcccgagtgagcatggaacacttcgagttcccagggttatagacagtcgttcccagtgtggctgaggccacccagaggcagcagagcattcagactccaaacagacccctgttcatgccgacgcttgcacgaccgccccagttcctgtggctccctcggaatgctaaggggatcggacatgaaaggaccctgtgagccgattgtcctatctccagcggccctgtcatccagctcactcatcaatggggccagtcaggcccaggcactgggctccggaggactcaccactgccccctgctgccatgtggactggtgcaagttgaggacttcttgctggtctagtcacgcatgcagtgttggggatgccttggtttttactgctctgagaattgttgagatactttactaataaactgtgtagttggaaaatcta

SEQ ID NO: 293488 - DNA, 3208 bp, Homo sapiens
cgaccacgcagccacgacccggccggttattcacccgccaggccctgggaatacaaggccggcttcaaaaaaaccagggcacccgcgacctcctcgcagacgcgcgcccccatacccgggcctcaggcagccacgaggtagacgggctcaggctcgggggtgcggcaagcggcacccgggcgcggcggggcgcagctgtggggaccgcgcaggcgccacgtcagaccccgcccaccccgccgcgcaggcgccgtgtagcgccccgcggatcacgcaggcgcggctttcaggccaacatggccgtgctgctgctgctgctccgtgccctccgccggggtccaggcccgggtcctcggccgctgtggggcccaggcccggcctggagtccagggttccccgccaggcccgggagggggcggccgtacatggccagcaggcctccgggggacctcgccgaggctggaggccgagctctgcagagcttacaattgagactgctaacccctacctttgaagggatcaacggattgttgttgaaacaacatttagttcagaatccagtcagactctggcaacttttaggtggtactttctattttaacacctcaaggttgaagcagaagaataaggagaaggataagtcgaaggggaaggcgcctgaagaggacgaagaggagaggagacgccgtgagcgggacgaccagatgtaccgagagcggctgcgcaccttgctggtcatcgcggttgtcatgagcctcctgaatgctctcagcaccagcggaggcagcatttcctggaacgactttgtccacgagatgctggccaagggcgaggtgcagcgcgtccaggtggtgcctgagagcgacgtggtggaagtctacctgcaccctggagccgtggtgtttgggcggcctcggctagccttgatgtaccgaatgcaggttgcaaatattgacaagtttgaagagaagcttcgagcagctgaagatgagctgaatatcgaggccaaggacaggatcccagtttcctacaagcgaacaggattctttggaaatgccctgtactctgtggggatgacggcagtgggcctggccatcctgtggtatgttttccgtctggccgggatgactggaagggaaggtggattcagtgcttttaatcagcttaaaatggctcgtttcaccattgtggatgggaagatggggaaaggagtcagcttcaaagacgtggcaggaatgcacgaagccaaactggaagtccgcgagtttgtggattatctgaagagcccagaacgcttcctccagcttggcgccaaggtcccaaagggcgcactgctgctcggcccccccggctgtgggaagacgctgctggccaaggcggtggccacggaggctcaggtgcccttcctggcgatggccggcccagagttcgtggaggtcattggaggcctcggcgctgcccgtgtgcggagcctctttaaggaagcccgagcccgggccccctgcatcgtctacatcgatgagatcgacgcggtgggcaagaagcgctccaccaccatgtccggcttctccaacacggaggaggagcagacgctcaaccagcttctggtagaaatggatggaatgggtaccacagaccatgtcatcgtcctggcgtccacgaaccgagctgacattttggacggtgctctgatgaggccaggccgactggaccggcacgtcttcattgatctccccacgctgcaggagaggcgggagatttttgagcagcacctgaagagcctgaagctgacccagtccagcaccttttactcccagcgtctggcagagctgacaccaggattcagtggggctgacatcgccaacatctgcaatgaggctgcgctgcacgcggcgcgggagggacacacttccgtgcacactctcaacttcgagtacgccgtggagcgcgtcctcgcagggactgccaaaaagagcaagatcctgtccaaggaagaacagaaagtggttgcgtttcatgagtcgggccacgccttggtgggctggatgctggagcacacggaggccgtgatgaaggtctccataacccctcggacaaacgccgccctgggctttgctcagatgctccccagagaccagcacctcttcaccaaggagcagctgtttgagcggatgtgcatggccctgggaggacgggcctcggaagcactgtccttcaacgaggtcacttctggggcacaggacgacctgaggaaggtcacccgcatcgcctactccatggtgaagcagtttgggatggcacctggcatcgggcccatctccttccctgaggcgcaggagggcctcatgggcatcgggcggcgccccttcagccaaggcctgcagcagatgatggaccatgaagcaagactgctggtggccaaggcctacagacacaccgagaaggtgctgcaggacaacctggacaagttgcaggcgctggcaaacgcccttctggaaaaggaagtgataaactatgaggacattgaggctctcattggcccgccgccccatgggccgaagaaaatgatcgcaccgcagaggtggatcgacgccctgagttgcttttcagctgaggtttgcacttcctctcgcggccctcagtagtccctgcacagtgacttctgagatctgttgattgatgacccttttcatgattttaagtttctctgcagaaactactgacggagtcctgtgtttgtgagtcgtttcccctatggggaaggttatcagtgcttcccgagtgagcatggaacacttcgagttcccagggttatagacagtcgttcccagtgtggctgaggccacccagaggcagcagagcattcagactccaaacagacccctgttcatgccgacgcttgcacgaccgccccagttcctgtggctccctcggaatgctaaggggatcggacatgaaaggaccctgtgagccgattgtcctatctccagcggccctgtcatccagctcactcatcaatggggccagtcaggcccaggcactgggctccggaggactcaccactgccccctgctgccatgtggactggtgcaagttgaggacttcttgctggtctagtcacgcatgcagtgttggggatgccttggtttttactgctctgagaattgttgagatactttactaataaactgtgtagttggaaaatcta

SEQ ID NO: 293489 - DNA, 2224 bp, Homo sapiens
ggtggcgaactcggcacgaggcacaatcagcttaaaatggctcgtttcaccattgtggatgggaagatggggaaaggagtcagcttcaaagacgtggcaggaatgcacgaagccaaactggaagtccgcgagtttgtggattatctgaagagcccagaacgcttcctccagcttggcgccaaggtcccaaagggcgcactgctgctcggcccccccggctgtgggaagacgctgctggccaaggcggtggccacggaggctcaggtgcccttcctggcgatggccggcccagagttcgtggaggtcattggaggcctcggcgctgcccgtgtgcggagcctctttaaggaagcccgagcccgggccccctgcatcgtctacatcgatgagatcgacgcggtgggcaagaagcgctccaccaccatgtccggcttctccaacacggaggaggagcagacgctcaaccagcttctggtagaaatggatggaatgggtaccacagaccatgtcatcgtcctggcgtccacgaaccgagctgacattttggacggtgctctgatgaggccaggccgactggaccggcacgtcttcattgatctccccacgctgcaggagaggcgggagatttttgagcagcacctgaagagcctgaagctgacccagtccagcaccttttactcccagcgtctggcagagctgacaccaggattcagtggggctgacatcgccaacatctgcaatgaggctgcgctgcacgcggcgcgggagggacacacttccgtgcacactctcaacttcgagtacgccgtggagcgcgtcctcgcagggactgccaaaaagagcaagatcctgtccaaggaagaacagaaagtggttgcgtttcatgagtcgggccacgccttggtgggctggatgctggagcacacggaggccgtgatgaaggtctccataacccctcggacaaacgccgccctgggctttgctcagatgctccccagagaccagcacctcttcaccaaggagcagctgtttgagcggatgtgcatggccctgggaggacgggcctcggaagcactgtccttcaacgaggtcacttctggggcacaggacgacctgaggaaggtcacccgcatcgcctactccatggtgaagcagtttgggatggcacctggcatcgggcccatctccttccctgaggcgcaggagggcctcatgggcatcgggcggcgccccttcagccaaggcctgcagcagatgatggaccatgaagcaagactgctggtggccaaggcctacagacacaccgagaaggtgctgcaggacaacctggacaagttgcaggcgctggcaaacgcccttctggaaaaggaagtgataaactatgaggacattgaggctctcattggcccgccgccccatgggccgaagaaaatgatcgcaccgcagaggtggatcgacgcccagagggagaaacaggacttgggcgaggaggagaccgaagagacccagcagcctccacttggaggcgaagagccgacttggcccaagtagttgggaggtgttggctgcacgtgcgggtggtccgggaagtgagggctcactcagccaccctgagttgcttttcagctgaggtttgcacttcctctcgcggccctcagtagtccctgcacagtgacttctgagatctgttgattgatgacccttttcatgattttaagtttctctgcagaaactactgacggagtcctgtgtttgtgagtcgtttcccctatggggaaggttatcagtgcttcccgagtgagcatggaacacttcgagttcccagggttatagacagtcgttcccagtgtggctgaggccacccagaggcagcagagcattcagactccaaacagacccctgttcatgccgacgcttgcacgaccgccccagttcctgtggctccctcggaatgctaaggggatcggacatgaaaggaccctgtgagccgattgtcctatctccagcggccctgtcatccagctcactcatcaatggggccagtcaggcccaggcactgggctccggaggactcaccactgccccctgctgccatgtggactggtgcaagttgaggacttcttgctggtctagtcacgcatgcagtgttggggatgccttggtttttactgctctgagaattgttgagatactttactaataaactgtgtagttggaaaatcta

SEQ ID NO: 293490 - DNA, 3439 bp, Homo sapiens
ctgactcactttaaatcctccgatgacaaacgtcaagcctgaaccccaggcctagggccagacgttgaagataaaatgtttccaagtcacagcctaaagctgggtgttagctaaaatgttacaaagtcacaataatgatgacagggcggtggggggtggggggtggctgttaggaccggctcccagatggcaccgtgaggcagggagaggctccaggatgctgtaggagctcccggagggccttggacagttctgctgtttgcacttgtcaaaataggcaaattcctgttcctcctggtgatgctggctgggagcgatgggggatcgcggctcctagttcagaaggaccgggctgttcctttctctctgggccttaggggggtctctctccctcctgtgtcctgaaggggaacctgcaggggaaatctgttgtgtcaggacccctaccctcagagccactgtctgctctgtcccctcaggaatgggtaccacagaccatgtcatcgtcctggcgtccacgaaccgagctgacattttggacggtgctctgatgaggccaggccgactggaccggcacgtcttcattgatctccccacgctgcaggagaggcgggagatttttgagcagcacctgaagagcctgaagctgacccagtccagcaccttttactcccagcgtctggcagagctgacaccaggattcagtggggctgacatcgccaacatctgcaatgaggctgcgctgcacgcggcgcgggagggacacacttccgtgcacactctcaacttcgagtacgccgtggagcgcgtcctcgcaggtacagggggcgcgccctgggtgaaggccctccttagcagggcttgaaccccagaaatacccaggcaggtattgagaggtgaggtggatggaaccatcacacaggaaggaacacacgttgcgtttcagttctgcgtaactcatgtctttatgataccttgtacttttccttagtttaaaatatcacagatttacctaagagtagacgctcgtccaacagaaataaaaaatgccttgccaaagaaagtgaaaaaataaaaataaaaaatgccccccaaaaataaaaataataaaaactaaaaatgtcttgccagcctgggtgtggtgggctcagcctagccccagcctcatgggggctgagctccagccgctgactgtgggccggaggctgctgccgcccgtggctgtggagggacagccgtgctttcagcgcacagggggctctgcggagaggtgtggatctgcagcaccacctctggtgaaactcatggtcccgaccgtcagtaggaacgggagatgagttttggtgacgggtgaccggtgggctgaccgcctctgactgccgttccgtggctgctcagtgtggggtctgcgacgtctgtgaggagagaggaccaaactgggaatcggagctgctggaggtttccatagctatgatggcaacacccagacgtgatcagtcatctcatggaatggagttcagacccgcactgtcagtgtgagacaggttgaacgtttgaaaagggaagtggttcttgccccaggtgtttgaggagcacgagcctcctttgcgagctatccctgcgagaaccgagttcctcaccctcaattcgagtgaattcctagcacgaacacgcctcttgcaggtccccagggcttcagctttgggaaagcagtgggttcctgcagaggagtggggcagctgctgtgccagacactgcaaaacacacctggcttctctccgacagccctgcgggtcgagaggactggcgctgcctgtgtcttactgaaatttattttcgtgtaaccatttacttttatgtggaaatcgaaaagcttttgataatagtagcaaagcaggaaggactgagtgggaaccacaagccagttgaaagaaaatacatgacgtacttgagtgctcaggaccacgagctgattcaagttgtacagaatggacacttacagatgtgtggaaaatctgagacaggaaatgaagcctcaccaggactgccaaaaagagcaagatcctgtccaaggaagaacagaaagtggttgcgtttcatgagtcgggccacgccttggtgggctggatgctggagcacacggaggccgtgatgaaggtctccataacccctcggacaaacgccgccctgggctttgctcagatgctccccagagaccagcacctcttcaccaaggagcagctgtttgagcggatgtgcatggccctgggaggacgggcctcggaagcactgtccttcaacgaggtcacttctggggcacaggacgacctgaggaaggtcacccgcatcgcctactccatggtgaagcagtttgggatggcacctggcatcgggcccatctccttccctgaggcgcaggagggcctcatgggcatcgggcggcgccccttcagccaaggcctgcagcagatgatggaccatgaagcaagactgctggtggccaaggcctacagacacaccgagaaggtgctgcaggacaacctggacaagttgcaggcgctggcaaacgcccttctggaaaaggaagtgataaactatgaggacattgaggctctcattggcccgccgccccatgggccgaagaaaatgatcgcaccgcagaggtggatcgacgcccagagggagaaacaggacttgggcgaggaggagaccgaagagacccagcagcctccacttggaggcgaagagccgacttggcccaagtagttgggaggtgttggctgcacgtgcgggtggtccgggaagtgagggctcactcagccaccctgagttgcttttcagctgaggtttgcacttcctctcgcggccctcagtagtccctgcacagtgacttctgagatctgttgattgatgacccttttcatgattttaagtttctctgcagaaactactgacggagtcctgtgtttgtgagtcgtttcccctatggggaaggttatcagtgcttcccgagtgagcatggaacacttcgagttcccagggttatagacagtcgttcccagtgtggctgaggccacccagaggcagcagagcattcagactccaaacagacccctgttcatgccgacgcttgcacgaccgccccagttcctgtggctccctcggaatgctaaggggatcggacatgaaaggaccctgtgagccgattgtcctatctccagcggccctgtcatccagctcactcatcaatggggccagtcaggcccaggcactgggctccggaggactcaccactgccccctgctgccatgtggactggtgcaagttgaggacttcttgctggtctagtcacgcatgcagtgttggggatgccttggtttttactgctctgagaattgttgagatactttactaataaactgtgtagttggaaaatcta

SEQ ID NO: 293491 - DNA, 1610 bp, Homo sapiens
ccttatctcggatcgtggacgcaggcagataattggtctgtggtaccagtccagcaccttttactcccagcgtctggcagagctgacaccaggattcagtggggctgacatcgccaacatctgcaatgaggctgcgctgcacgcggcgcgggagggacacacttccgtgcacactctcaacttcgagtacgccgtggagcgcgtcctcgcagggactgccaaaaagagcaagatcctgtccaaggaagaacagaaagtggttgcgtttcatgagtcgggccacgccttggtgggctggatgctggagcacacggaggccgtgatgaaggtctccataacccctcggacaaacgccgccctgggctttgctcagatgctccccagagaccagcacctcttcaccaaggagcagctgtttgagcggatgtgcatggccctgggaggacgggcctcggaagcactgtccttcaacgaggtcacttctggggcacaggacgacctgaggaaggtcacccgcatcgcctactccatggtgaagcagtttgggatggcacctggcatcgggcccatctccttccctgaggcgcaggagggcctcatgggcatcgggcggcgccccttcagccaaggcctgcagcagatgatggaccatgaagcaagactgctggtggccaaggcctacagacacaccgagaaggtgctgcaggacaacctggacaagttgcaggcgctggcaaacgcccttctggaaaaggaagtgataaactatgaggacattgaggctctcattggcccgccgccccatgggccgaagaaaatgatcgcaccgcagaggtggatcgacgcccagagggagaaacaggacttgggcgaggaggagaccgaagagacccagcagcctccacttggaggcgaagagccgacttggcccaagtagttgggaggtgttggctgcacgtgcgggtggtccgggaagtgagggctcactcagccaccctgagttgcttttcagctgaggtttgcacttcctctcgcggccctcagtagtccctgcacagtgacttctgagatctgttgattgatgacccttttcatgattttaagtttctctgcagaaactactgacggagtcctgtgtttgtgagtcgtttcccctatggggaaggttatcagtgcttcccgagtgagcatggaacacttcgagttcccagggttatagacagtcgttcccagtgtggctgaggccacccagaggcagcagagcattcagactccaaacagacccctgttcatgccgacgcttgcacgaccgccccagttcctgtggctccctcggaatgctaaggggatcggacatgaaaggaccctgtgagccgattgtcctatctccagcggccctgtcatccagctcactcatcaatggggccagtcaggcccaggcactgggctccggaggactcaccactgccccctgctgccatgtggactggtgcaagttgaggacttcttgctggtctagtcacgcatgcagtgttggggatgccttggtttttactgctctgagaattgttgagatactttactaataaactgtgtagttggaaaatcta

SEQ ID NO: 293492 - DNA, 2572 bp, Homo sapiens
atatgctttgtaaacagatcctgaaggcagcatgctcgttaagagtcatcaccactcccttatctcaagtacccagggacacaaacactgtggaaggccgcagggtcctctgcctaggaaaaccagagacctttgttcacgtgtttatctgccgaccttccctccactattgtcctatgaccctgccaaatccccctctgcgagaaacacaagaatgatcaattaaaaaaataaaaataataaaaactaaaaatgtcttgccagcctgggtgtggtgggctcagcctagccccagcctcatgggggctgagctccagccgctgactgtgggccggaggctgctgccgcccgtggctgtggagggacagccgtgctttcagcgcacagggggctctgcggagaggtgtggatctgcagcaccacctctggtgaaactcatggtcccgaccgtcagtaggaacgggagatgagttttggtgacgggtgaccggtgggctgaccgcctctgactgccgttccgtggctgctcagtgtggggtctgcgacgtctgtgaggagagaggaccaaactgggaatcggagctgctggaggtttccatagctatgatggcaacacccagacgtgatcagtcatctcatggaatggagttcagacccgcactgtcagtgtgagacaggttgaacgtttgaaaagggaagtggttcttgccccaggtgtttgaggagcacgagcctcctttgcgagctatccctgcgagaaccgagttcctcaccctcaattcgagtgaattcctagcacgaacacgcctcttgcaggtccccagggcttcagctttgggaaagcagtgggttcctgcagaggagtggggcagctgctgtgccagacactgcaaaacacacctggcttctctccgacagccctgcgggtcgagaggactggcgctgcctgtgtcttactgaaatttattttcgtgtaaccatttacttttatgtggaaatcgaaaagcttttgataatagtagcaaagcaggaaggactgagtgggaaccacaagccagttgaaagaaaatacatgacgtacttgagtgctcaggaccacgagctgattcaagttgtacagaatggacacttacagatgtgtggaaaatctgagacaggaaatgaagcctcaccaggactgccaaaaagagcaagatcctgtccaaggaagaacagaaagtggttgcgtttcatgagtcgggccacgccttggtgggctggatgctggagcacacggaggccgtgatgaaggtctccataacccctcggacaaacgccgccctgggctttgctcagatgctccccagagaccagcacctcttcaccaaggagcagctgtttgagcggatgtgcatggccctgggaggacgggcctcggaagcactgtccttcaacgaggtcacttctggggcacaggacgacctgaggaaggtcacccgcatcgcctactccatggtgaagcagtttgggatggcacctggcatcgggcccatctccttccctgaggcgcaggagggcctcatgggcatcgggcggcgccccttcagccaaggcctgcagcagatgatggaccatgaagcaagactgctggtggccaaggcctacagacacaccgagaaggtgctgcaggacaacctggacaagttgcaggcgctggcaaacgcccttctggaaaaggaagtgataaactatgaggacattgaggctctcattggcccgccgccccatgggccgaagaaaatgatcgcaccgcagaggtggatcgacgcccagagggagaaacaggacttgggcgaggaggagaccgaagagacccagcagcctccacttggaggcgaagagccgacttggcccaagtagttgggaggtgttggctgcacgtgcgggtggtccgggaagtgagggctcactcagccaccctgagttgcttttcagctgaggtttgcacttcctctcgcggccctcagtagtccctgcacagtgacttctgagatctgttgattgatgacccttttcatgattttaagtttctctgcagaaactactgacggagtcctgtgtttgtgagtcgtttcccctatggggaaggttatcagtgcttcccgagtgagcatggaacacttcgagttcccagggttatagacagtcgttcccagtgtggctgaggccacccagaggcagcagagcattcagactccaaacagacccctgttcatgccgacgcttgcacgaccgccccagttcctgtggctccctcggaatgctaaggggatcggacatgaaaggaccctgtgagccgattgtcctatctccagcggccctgtcatccagctcactcatcaatggggccagtcaggcccaggcactgggctccggaggactcaccactgccccctgctgccatgtggactggtgcaagttgaggacttcttgctggtctagtcacgcatgcagtgttggggatgccttggtttttactgctctgagaattgttgagatactttactaataaactgtgtagttggaaaatcta

SEQ ID NO: 293493 - DNA, 2018 bp, Homo sapiens
tagcgaaggggtctcgttatgttgcccaggctagtctcgaactcctgggctcatgcaatctgcccacctctaactcccaaagtaccgagatcacagatgtgagcgaccccgcccagcctagttttagattttaaattaagcgtcctcgggattctcagagcacttggatgtggccatctcgccgccacaattctcagaagcagcagctgggccagcccctgccccgtctccgtccgtctcccactcagcggttccgtgttgtcgagttagctcgttgccccgcgccacctccttgcacacctgatgtggggctgtgggggagcagcagaggtgaggacagcctctgctgcctcagcatcgtggggttctcattgctctgaaccctcagtagctgtcgctggtgtgaggggtcagcgcagcggccatcgggggtgaaacttgtccttcgcctctcagctgtcttctacgggccttgtcttcttgactccctgcctgtctagtcatgtatgagaagacacttcccggcagtgtgtgaacaggcacctgtggtgggaacgctgctgtctctgggctggccatctagagtgttaggatcccctgttgttgtagaggatgctgcacatttgccttcctgctttgagacgctttaatgacggagacctcttagtcccacaccttcctcctcaaagcccacgcatcctgcctactgacctgggtcatcttgaccttgtgccaggtctccataacccctcggacaaacgccgccctgggctttgctcagatgctccccagagaccagcacctcttcaccaaggagcagctgtttgagcggatgtgcatggccctgggaggacgggcctcggaagcactgtccttcaacgaggtcacttctggggcacaggacgacctgaggaaggtcacccgcatcgcctactccatggtgaagcagtttgggatggcacctggcatcgggcccatctccttccctgaggcgcaggagggcctcatgggcatcgggcggcgccccttcagccaaggcctgcagcagatgatggaccatgaagcaagactgctggtggccaaggcctacagacacaccgagaaggtgctgcaggacaacctggacaagttgcaggcgctggcaaacgcccttctggaaaaggaagtgataaactatgaggacattgaggctctcattggcccgccgccccatgggccgaagaaaatgatcgcaccgcagaggtggatcgacgcccagagggagaaacaggacttgggcgaggaggagaccgaagagacccagcagcctccacttggaggcgaagagccgacttggcccaagtagttgggaggtgttggctgcacgtgcgggtggtccgggaagtgagggctcactcagccaccctgagttgcttttcagctgaggtttgcacttcctctcgcggccctcagtagtccctgcacagtgacttctgagatctgttgattgatgacccttttcatgattttaagtttctctgcagaaactactgacggagtcctgtgtttgtgagtcgtttcccctatggggaaggttatcagtgcttcccgagtgagcatggaacacttcgagttcccagggttatagacagtcgttcccagtgtggctgaggccacccagaggcagcagagcattcagactccaaacagacccctgttcatgccgacgcttgcacgaccgccccagttcctgtggctccctcggaatgctaaggggatcggacatgaaaggaccctgtgagccgattgtcctatctccagcggccctgtcatccagctcactcatcaatggggccagtcaggcccaggcactgggctccggaggactcaccactgccccctgctgccatgtggactggtgcaagttgaggacttcttgctggtctagtcacgcatgcagtgttggggatgccttggtttttactgctctgagaattgttgagatactttactaataaactgtgtagttggaaaatcta

SEQ ID NO: 293494 - DNA, 3657 bp, Homo sapiens
  misc_feature (3614)..(3614): n is a, c, g, or t
cgaccacgcagccacgacccggccggttattcacccgccaggccctgggaatacaaggccggcttcaaaaaaaccagggcacccgcgacctcctcgcagacgcgcgcccccatacccgggcctcaggcagccacgaggtagacgggctcaggctcgggggtgcggcaagcggcacccgggcgcggcggggcgcagctgtggggaccgcgcaggcgccacgtcagaccccgcccaccccgccgcgcaggcgccgtgtagcgccccgcggatcacgcaggcgcggctttcaggccaacatggccgtgctgctgctgctgctccgtgccctccgccggggtccaggcccgggtcctcggccgctgtggggcccaggcccggcctggagtccagggttccccgccaggcccgggagggggcggccgtacatggccagcaggcctccgggggacctcgccgaggctggaggccgagctctgcagagcttacaattgagactgctaacccctacctttgaagggatcaacggattgttgttgaaacaacatttagttcagaatccagtcagactctggcaacttttaggtggtactttctattttaacacctcaaggttgaagcagaagaataaggagaaggataagtcgaaggggaaggcgcctgaagaggacgaagaggagaggagacgccgtgagcgggacgaccagatgtaccgagagcggctgcgcaccttgctggtcatcgcggttgtcatgagcctcctgaatgctctcagcaccagcggaggcagcatttcctggaacgactttgtccacgagatgctggccaagggcgaggtgcagcgcgtccaggtggtgcctgagagcgacgtggtggaagtctacctgcaccctggagccgtggtgtttgggcggcctcggctagccttgatgtaccgaatgcaggttgcaaatattgacaagtttgaagagaagcttcgagcagctgaagatgagctgaatatcgaggccaaggacaggatcccagtttcctacaagcgaacaggattctttggaaatgccctgtactctgtggggatgacggcagtgggcctggccatcctgtggtatgttttccgtctggccgggatgactggaagggaaggtggattcagtgcttttaatcagcttaaaatggctcgtttcaccattgtggatgggaagatggggaaaggagtcagcttcaaagacgtggcaggaatgcacgaagccaaactggaagtccgcgagtttgtggattatctgaagagcccagaacgcttcctccagcttggcgccaaggtcccaaagggcgcactgctgctcggcccccccggctgtgggaagacgctgctggccaaggcggtggccacggaggctcaggtgcccttcctggcgatggccggcccagagttcgtggaggtcattggaggcctcggcgctgcccgtgtgcggagcctctttaaggaagcccgagcccgggccccctgcatcgtctacatcgatgagatcgacgcggtgggcaagaagcgctccaccaccatgtccggcttctccaacacggaggaggagcagacgctcaaccagcttctggtagaaatggatggaatgggtaccacagaccatgtcatcgtcctggcgtccacgaaccgagctgacattttggacggtgctctgatgaggccaggccgactggaccggcacgtcttcattgatctccccacgctgcaggagaggcgggagatttttgagcagcacctgaagagcctgaagctgacccagtccagcaccttttactcccagcgtctggcagagctgacaccaggattcagtggggctgacatcgccaacatctgcaatgaggctgcgctgcacgcggcgcgggagggacacacttccgtgcacactctcaacttcgagtacgccgtggagcgcgtcctcgcagggactgccaaaaagagcaagatcctgtccaaggaagaacagaaagtggttgcgtttcatgagtcgggccacgccttggtgggctggatgctggagcacacggaggccgtgatgaaggtctccataacccctcggacaaacgccgccctgggctttgctcagatgctccccagagaccagcacctcttcaccaaggagcagctgtttgagcggatgtgcatggccctgggaggacgggcctcggaagcactgtccttcaacgaggtcacttctggggcacaggacgacctgaggaaggtcacccgcatcgcctactccatggtgaagcagtttgggatggcacctggcatcgggcccatctccttccctgaggcgcaggagggcctcatgggcatcgggcggcgccccttcagccaaggcctgcagcagatgatggaccatgaagcaagactgctggtggccaaggcctacagacacaccgagaaggtgctgcaggacaacctggacaagttgcaggcgctggcaaacgcccttctggaaaaggaagtgataaactatgaggacattgaggctctcattggcccgccgccccatgggccgaagaaaatgatcgcaccgcagaggtggatcgacgcccagagggagaaacaggacttgggcgaggaggagaccgaagagacccagcagcctccacttggaggcgaagagccgacttggcccaagtagttgggaggtgttggctgcacgtgcgggtggtccgggaagtgagggctcactcagccaccctgagttgcttttcagctgaggtttgcacttcctctcgcggccctcagtagtccctgcacagtgacttctgagatctgttgattgatgacccttttcatgattttaagtttctctgcagaaactactgacggagtcctgtgtttgtgagtcgtttcccctatggggaaggttatcagtgcttcccgagtgagcatggaacacttcgagttcccagggttatagacagtcgttcccagtgtggctgaggccacccagaggcagcagagcattcagactccaaacagacccctgttcatgccgacgcttgcacgaccgccccagttcctgtggctccctcggaatgctaaggggatcggacatgaaaggaccctgtgagccgattgtcctatctccagcggccctgtcatccagctcactcatcaatggggccagtcaggcccaggcactgggctccggaggactcaccactgccccctgctgccatgtggactggtgcaagttgaggacttcttgctggtctagtcacgcatgcagtgttggggatgccttggtttttactgctctgagaattgttgagatactttactaataaactgtgtagttggaaaatctaaaaaaaaaaaaaaaaactcgagtttttttttttttttttttttaaccagaggtggaatctttatttcacaagtttcaagatacagtacaaaacgattctgtacatctctctattaacaggatttgtttacacaattatattacacttcaccaacctttatactgcatttcattaaatacaaaatacatttacaaaaagagtctaccatggtgttccttcacaatgccagcttaaggtcttttatgagttttatgagnttattttctaatcaaagagaatagtgtcagcctgtttctcaac

SEQ ID NO: 293495 - DNA, 744 bp, Homo sapiens
atcggctcggccctgctttcgtcgggtgaatagcaactcaggcaggcgaagagccgacttggcccaagtagttgggaggtgttggctgcacgtgcgggtggtccgggaagtgagggctcactcagccaccctgagttgcttttcagctgaggtttgcacttcctctcgcggccctcagtagtccctgcacagtgacttctgagatctgttgattgatgacccttttcatgattttaagtttctctgcagaaactactgacggagtcctgtgtttgtgagtcgtttcccctatggggaaggttatcagtgcttcccgagtgagcatggaacacttcgagttcccagggttatagacagtcgttcccagtgtggctgaggccacccagaggcagcagagcattcagactccaaacagacccctgttcatgccgacgcttgcacgaccgccccagttcctgtggctccctcggaatgctaaggggatcggacatgaaaggaccctgtgagccgattgtcctatctccagcggccctgtcatccagctcactcatcaatggggccagtcaggcccaggcactgggctccggaggactcaccactgccccctgctgccatgtggactggtgcaagttgaggacttcttgctggtctagtcacgcatgcagtgttggggatgccttggtttttactgctctgagaattgttgagatactttactaataaactgtgtagttggaaaatcta

SEQ ID NO: 293496 - DNA, 3249 bp, Homo sapiens
cgaccacgcagccacgacccggccggttattcacccgccaggccctgggaatacaaggccggcttcaaaaaaaccagggcacccgcgacctcctcgcagacgcgcgcccccatacccgggcctcaggcagccacgaggtagacgggctcaggctcgggggtgcggcaagcggcacccgggcgcggcggggcgcagctgtggggaccgcgcaggcgccacgtcagaccccgcccaccccgccgcgcaggcgccgtgtagcgccccgcggatcacgcaggcgcggctttcaggccaacatggccgtgctgctgctgctgctccgtgccctccgccggggtccaggcccgggtcctcggccgctgtggggcccaggcccggcctggagtccagggttccccgccaggcccgggagggggcggccgtacatggccagcaggcctccgggggacctcgccgaggctggaggccgagctctgcagagcttacaattgagactgctaacccctacctttgaagggatcaacggattgttgttgaaacaacatttagttcagaatccagtcagactctggcaacttttaggtggtactttctattttaacacctcaaggttgaagcagaagaataaggagaaggataagtcgaaggggaaggcgcctgaagaggacgaagaggagaggagacgccgtgagcgggacgaccagatgtaccgagagcggctgcgcaccttgctggtcatcgcggttgtcatgagcctcctgaatgctctcagcaccagcggaggcagcatttcctggaacgactttgtccacgagatgctggccaagggcgaggtgcagcgcgtccaggtggtgcctgagagcgacgtggtggaagtctacctgcaccctggagccgtggtgtttgggcggcctcggctagccttgatgtaccgaatgcaggttgcaaatattgacaagtttgaagagaagcttcgagcagctgaagatgagctgaatatcgaggccaaggacaggatcccagtttcctacaagcgaacaggattctttggaaatgccctgtactctgtggggatgacggcagtgggcctggccatcctgtggtatgttttccgtctggccgggatgactggaagggaaggtggattcagtgcttttaatcagcttaaaatggctcgtttcaccattgtggatgggaagatggggaaaggagtcagcttcaaagacgtggcaggaatgcacgaagccaaactggaagtccgcgagtttgtggattatctgaagagcccagaacgcttcctccagcttggcgccaaggtcccaaagggcgcactgctgctcggcccccccggctgtgggaagacgctgctggccaaggcggtggccacggaggctcaggtgcccttcctggcgatggccggcccagagttcgtggaggtcattggaggcctcggcgctgcccgtgtgcggagcctctttaaggaagcccgagcccgggccccctgcatcgtctacatcgatgagatcgacgcggtgggcaagaagcgctccaccaccatgtccggcttctccaacacggaggaggagcagacgctcaaccagcttctggtagaaatggatggaatgggtaccacagaccatgtcatcgtcctggcgtccacgaaccgagctgacattttggacggtgctctgatgaggccaggccgactggaccggcacgtcttcattgatctccccacgctgcaggagaggcgggagatttttgagcagcacctgaagagcctgaagctgacccagtccagcaccttttactcccagcgtctggcagagctgacaccaggattcagtggggctgacatcgccaacatctgcaatgaggctgcgctgcacgcggcgcgggagggacacacttccgtgcacactctcaacttcgagtacgccgtggagcgcgtcctcgcagggactgccaaaaagagcaagatcctgtccaaggaagaacagaaagtggttgcgtttcatgagtcgggccacgccttggtgggctggatgctggagcacacggaggccgtgatgaaggtctccataacccctcggacaaacgccgccctgggctttgctcagatgctccccagagaccagcacctcttcaccaaggagcagctgtttgagcggatgtgcatggccctgggaggacgggcctcggaagcactgtccttcaacgaggtcacttctggggcacaggacgacctgaggaaggtcacccgcatcgcctactccatggtgaagcagtttgggatggcacctggcatcgggcccatctccttccctgaggcgcaggagggcctcatgggcatcgggcggcgccccttcagccaaggcctgcagcagatgatggaccatgaagcaagactgctggtggccaaggcctacagacacaccgagaaggtgctgcaggacaacctggacaagttgcaggcgctggcaaacgcccttctggaaaaggaagtgataaactatgaggacattgaggctctcattggcccgccgccccatgggccgaagaaaatgatcgcaccgcagaggtggatcgacgcccagagggagaaacaggacttgggcgaggaggagaccgaagagacccagcagcctccacttggaggcgaagagccgacttggcccaagtagttgggaggtgttggctgcacgtgcgggtggtccgggaagtgagggctcactcagccaccctgagttgcttttcagctgaggtttgcacttcctctcgcggccctcagtagtccctgcacagtgacttctgagatctgttgattgatgacccttttcatgattttaagtttctctgcagaaactactgacggagtcctgtgtttgtgagtcgtttcccctatggggaaggttatcagtgcttcccgagtgagcatggaacacttcgagttcccagggttatagacagtcgttcccagtgtggctgaggccacccagaggcagcagagcattcagactccaaacagacccctgttcatgccgacgcttgcacgaccgccccagttcctgtggctccctcggaatgctaaggggatcggacatgaaaggaccctgtgagccgattgtcctatctccagcggccctgtcatccagccgcacatgggtcatattcgcgactcactgcaggcgtcagggattgcgccggcaggatgcacacaggaaagcgctctgatcacaaatacgaatt

SEQ ID NO: 293497 - DNA, 3166 bp, Homo sapiens
cgaccacgcagccacgacccggccggttattcacccgccaggccctgggaatacaaggccggcttcaaaaaaaccagggcacccgcgacctcctcgcagacgcgcgcccccatacccgggcctcaggcagccacgaggtagacgggctcaggctcgggggtgcggcaagcggcacccgggcgcggcggggcgcagctgtggggaccgcgcaggcgccacgtcagaccccgcccaccccgccgcgcaggcgccgtgtagcgccccgcggatcacgcaggcgcggctttcaggccaacatggccgtgctgctgctgctgctccgtgccctccgccggggtccaggcccgggtcctcggccgctgtggggcccaggcccggcctggagtccagggttccccgccaggcccgggagggggcggccgtacatggccagcaggcctccgggggacctcgccgaggctggaggccgagctctgcagagcttacaattgagactgctaacccctacctttgaagggatcaacggattgttgttgaaacaacatttagttcagaatccagtcagactctggcaacttttaggtggtactttctattttaacacctcaaggttgaagcagaagaataaggagaaggataagtcgaaggggaaggcgcctgaagaggacgaagaggagaggagacgccgtgagcgggacgaccagatgtaccgagagcggctgcgcaccttgctggtcatcgcggttgtcatgagcctcctgaatgctctcagcaccagcggaggcagcatttcctggaacgactttgtccacgagatgctggccaagggcgaggtgcagcgcgtccaggtggtgcctgagagcgacgtggtggaagtctacctgcaccctggagccgtggtgtttgggcggcctcggctagccttgatgtaccgaatgcaggttgcaaatattgacaagtttgaagagaagcttcgagcagctgaagatgagctgaatatcgaggccaaggacaggatcccagtttcctacaagcgaacaggattctttggaaatgccctgtactctgtggggatgacggcagtgggcctggccatcctgtggtatgttttccgtctggccgggatgactggaagggaaggtggattcagtgcttttaatcagcttaaaatggctcgtttcaccattgtggatgggaagatggggaaaggagtcagcttcaaagacgtggcaggaatgcacgaagccaaactggaagtccgcgagtttgtggattatctgaagagcccagaacgcttcctccagcttggcgccaaggtcccaaagggcgcactgctgctcggcccccccggctgtgggaagacgctgctggccaaggcggtggccacggaggctcaggtgcccttcctggcgatggccggcccagagttcgtggaggtcattggaggcctcggcgctgcccgtgtgcggagcctctttaaggaagcccgagcccgggccccctgcatcgtctacatcgatgagatcgacgcggtgggcaagaagcgctccaccaccatgtccggcttctccaacacggaggaggagcagacgctcaaccagcttctggtagaaatggatggaatgggtaccacagaccatgtcatcgtcctggcgtccacgaaccgagctgacattttggacggtgctctgatgaggccaggccgactggaccggcacgtcttcattgatctccccacgctgcaggagaggcgggagatttttgagcagcacctgaagagcctgaagctgacccagtccagcaccttttactcccagcgtctggcagagctgacaccaggattcagtggggctgacatcgccaacatctgcaatgaggctgcgctgcacgcggcgcgggagggacacacttccgtgcacactctcaacttcgagtacgccgtggagcgcgtcctcgcagggactgccaaaaagagcaagatcctgtccaaggaagaacagaaagtggttgcgtttcatgagtcgggccacgccttggtgggctggatgctggagcacacggaggccgtgatgaaggtctccataacccctcggacaaacgccgccctgggctttgctcagatgctccccagagaccagcacctcttcaccaaggagcagctgtttgagcggatgtgcatggccctgggaggacgggcctcggaagcactgtccttcaacgaggtcacttctggggcacaggacgacctgaggaaggtcacccgcatcgcctactccatggtgaagcagtttgggatggcacctggcatcgggcccatctccttccctgaggcgcaggagggcctcatgggcatcgggcggcgccccttcagccaaggcctgcagcagatgatggaccatgaagcaagactgctggtggccaaggcctacagacacaccgagaaggtgctgcaggacaacctggacaagttgcaggcgctggcaaacgcccttctggaaaaggaagtgataaactatgaggacattgaggctctcattggcccgccgccccatgggccgaagaaaatgatcgcaccgcagaggtggatcgacgcccagagggagaaacaggacttgggcgaggaggagaccgaagagacccagcagcctccacttggaggcgaagagccgacttggcccaagtagttgggaggtgttggctgcacgtgcgggtggtccgggaagtgagggctcactcagccaccctgagttgcttttcagctgaggtttgcacttcctctcgcggccctcagtagtccctgcacagtgacttctgagatctgttgattgatgacccttttcatgattttaagtttctctgcagaaactactgacggagtcctgtgtttgtgagtcgtttcccctatggggaaggttatcagtgcttcccgagtgagcatggaacacttcgagttcccagggttatagacagtcgttcccagtgtggctgaggccacccagaggcagcagagcattcagactccaaacagacccctgttcatgggtgtttatcgatgccacagactgagagaaaatatgggcaaaaagtgtatatgataaataactgttatttaaaatatacaaagaactcttaaaactcaacaataagaaaacataaaacccagtat

SEQ ID NO: 293498 - DNA, 2503 bp, Homo sapiens
cgaccacgcagccacgacccggccggttattcacccgccaggccctgggaatacaaggccggcttcaaaaaaaccagggcacccgcgacctcctcgcagacgcgcgcccccatacccgggcctcaggcagccacgaggtagacgggctcaggctcgggggtgcggcaagcggcacccgggcgcggcggggcgcagctgtggggaccgcgcaggcgccacgtcagaccccgcccaccccgccgcgcaggcgccgtgtagcgccccgcggatcacgcaggcgcggctttcaggccaacatggccgtgctgctgctgctgctccgtgccctccgccggggtccaggcccgggtcctcggccgctgtggggcccaggcccggcctggagtccagggttccccgccaggcccgggagggggcggccgtacatggccagcaggcctccgggggacctcgccgaggctggaggccgagctctgcagagcttacaattgagactgctaacccctacctttgaagggatcaacggattgttgttgaaacaacatttagttcagaatccagtcagactctggcaacttttaggtggtactttctattttaacacctcaaggttgaagcagaagaataaggagaaggataagtcgaaggggaaggcgcctgaagaggacgaagaggagaggagacgccgtgagcgggacgaccagatgtaccgagagcggctgcgcaccttgctggtcatcgcggttgtcatgagcctcctgaatgctctcagcaccagcggaggcagcatttcctggaacgactttgtccacgagatgctggccaagggcgaggtgcagcgcgtccaggtggtgcctgagagcgacgtggtggaagtctacctgcaccctggagccgtggtgtttgggcggcctcggctagccttgatgtaccgaatgcaggttgcaaatattgacaagtttgaagagaagcttcgagcagctgaagatgagctgaatatcgaggccaaggacaggatcccagtttcctacaagcgaacaggattctttggaaatgccctgtactctgtggggatgacggcagtgggcctggccatcctgtggtatgttttccgtctggccgggatgactggaagggaaggtggattcagtgcttttaatcagcttaaaatggctcgtttcaccattgtggatgggaagatggggaaaggagtcagcttcaaagacgtggcaggaatgcacgaagccaaactggaagtccgcgagtttgtggattatctgaagagcccagaacgcttcctccagcttggcgccaaggtcccaaagggcgcactgctgctcggcccccccggctgtgggaagacgctgctggccaaggcggtggccacggaggctcaggtgcccttcctggcgatggccggcccagagttcgtggaggtcattggaggcctcggcgctgcccgtgtgcggagcctctttaaggaagcccgagcccgggccccctgcatcgtctacatcgatgagatcgacgcggtgggcaagaagcgctccaccaccatgtccggcttctccaacacggaggaggagcagacgctcaaccagcttctggtagaaatggatggaatgggtaccacagaccatgtcatcgtcctggcgtccacgaaccgagctgacattttggacggtgctctgatgaggccaggccgactggaccggcacgtcttcattgatctccccacgctgcaggagaggcgggagatttttgagcagcacctgaagagcctgaagctgacccagtccagcaccttttactcccagcgtctggcagagctgacaccaggattcagtggggctgacatcgccaacatctgcaatgaggctgcgctgcacgcggcgcgggagggacacacttccgtgcacactctcaacttcgagtacgccgtggagcgcgtcctcgcagggactgccaaaaagagcaagatcctgtccaaggaagaacagaaagtggttgcgtttcatgagtcgggccacgccttggtgggctggatgctggagcacacggaggccgtgatgaaggtctccataacccctcggacaaacgccgccctgggctttgctcagatgctccccagagaccagcacctcttcaccaaggagcagctgtttgagcggatgtgcatggccctgggaggacgggcctcggaagcactgtccttcaacgaggtcacttctggggcacaggacgacctgaggaaggtcacccgcatcgcctactccatggtgaagcagtttgggatggcacctggcatcgggcccatctccttccctgaggcgcaggagggcctcatgggcatcgggcggcgccccttcagccaaggcctgcagcagatgatggaccatgaagcaagactgctggtggccaaggcctacagacacaccgagaaggtgctgcaggacaacctggacaagttgcaggcgaaatcttctgtatcctcgctcaaaaa

SEQ ID NO: 293499 - DNA, 2324 bp, Homo sapiens
  misc_feature (2291)..(2291): n is a, c, g, or t
cgaccacgcagccacgacccggccggttattcacccgccaggccctgggaatacaaggccggcttcaaaaaaaccagggcacccgcgacctcctcgcagacgcgcgcccccatacccgggcctcaggcagccacgaggtagacgggctcaggctcgggggtgcggcaagcggcacccgggcgcggcggggcgcagctgtggggaccgcgcaggcgccacgtcagaccccgcccaccccgccgcgcaggcgccgtgtagcgccccgcggatcacgcaggcgcggctttcaggccaacatggccgtgctgctgctgctgctccgtgccctccgccggggtccaggcccgggtcctcggccgctgtggggcccaggcccggcctggagtccagggttccccgccaggcccgggagggggcggccgtacatggccagcaggcctccgggggacctcgccgaggctggaggccgagctctgcagagcttacaattgagactgctaacccctacctttgaagggatcaacggattgttgttgaaacaacatttagttcagaatccagtcagactctggcaacttttaggtggtactttctattttaacacctcaaggttgaagcagaagaataaggagaaggataagtcgaaggggaaggcgcctgaagaggacgaagaggagaggagacgccgtgagcgggacgaccagatgtaccgagagcggctgcgcaccttgctggtcatcgcggttgtcatgagcctcctgaatgctctcagcaccagcggaggcagcatttcctggaacgactttgtccacgagatgctggccaagggcgaggtgcagcgcgtccaggtggtgcctgagagcgacgtggtggaagtctacctgcaccctggagccgtggtgtttgggcggcctcggctagccttgatgtaccgaatgcaggttgcaaatattgacaagtttgaagagaagcttcgagcagctgaagatgagctgaatatcgaggccaaggacaggatcccagtttcctacaagcgaacaggattctttggaaatgccctgtactctgtggggatgacggcagtgggcctggccatcctgtggtatgttttccgtctggccgggatgactggaagggaaggtggattcagtgcttttaatcagcttaaaatggctcgtttcaccattgtggatgggaagatggggaaaggagtcagcttcaaagacgtggcaggaatgcacgaagccaaactggaagtccgcgagtttgtggattatctgaagagcccagaacgcttcctccagcttggcgccaaggtcccaaagggcgcactgctgctcggcccccccggctgtgggaagacgctgctggccaaggcggtggccacggaggctcaggtgcccttcctggcgatggccggcccagagttcgtggaggtcattggaggcctcggcgctgcccgtgtgcggagcctctttaaggaagcccgagcccgggccccctgcatcgtctacatcgatgagatcgacgcggtgggcaagaagcgctccaccaccatgtccggcttctccaacacggaggaggagcagacgctcaaccagcttctggtagaaatggatggaatgggtaccacagaccatgtcatcgtcctggcgtccacgaaccgagctgacattttggacggtgctctgatgaggccaggccgactggaccggcacgtcttcattgatctccccacgctgcaggagaggcgggagatttttgagcagcacctgaagagcctgaagctgacccagtccagcaccttttactcccagcgtctggcagagctgacaccaggattcagtggggctgacatcgccaacatctgcaatgaggctgcgctgcacgcggcgcgggagggacacacttccgtgcacactctcaacttcgagtacgccgtggagcgcgtcctcgcagggactgccaaaaagagcaagatcctgtccaaggaagaacagaaagtggttgcgtttcatgagtcgggccacgccttggtgggctggatgctggagcacacggaggccgtgatgaaggtctccataacccctcggacaaacgccgccctgggctttgctcagatgctccccagagaccagcacctcttcaccaaggagcagctgtttgagcggatgtgcatggccctgggaggacgggcctcggaagcactgtccttcaacgaggtcacttctggggccaggacgactgggaggtcccgtggctatcctggggaccttggtgggcctggtggncctctcccggggcggggcagggagggggccctg

SEQ ID NO: 293500 - DNA, 3343 bp, Homo sapiens
cgaccacgcagccacgacccggccggttattcacccgccaggccctgggaatacaaggccggcttcaaaaaaaccagggcacccgcgacctcctcgcagacgcgcgcccccatacccgggcctcaggcagccacgaggtagacgggctcaggctcgggggtgcggcaagcggcacccgggcgcggcggggcgcagctgtggggaccgcgcaggcgccacgtcagaccccgcccaccccgccgcgcaggcgccgtgtagcgccccgcggatcacgcaggcgcggctttcaggccaacatggccgtgctgctgctgctgctccgtgccctccgccggggtccaggcccgggtcctcggccgctgtggggcccaggcccggcctggagtccagggttccccgccaggcccgggagggggcggccgtacatggccagcaggcctccgggggacctcgccgaggctggaggccgagctctgcagagcttacaattgagactgctaacccctacctttgaagggatcaacggattgttgttgaaacaacatttagttcagaatccagtcagactctggcaacttttaggtggtactttctattttaacacctcaaggttgaagcagaagaataaggagaaggataagtcgaaggggaaggcgcctgaagaggacgaagaggagaggagacgccgtgagcgggacgaccagatgtaccgagagcggctgcgcaccttgctggtcatcgcggttgtcatgagcctcctgaatgctctcagcaccagcggaggcagcatttcctggaacgactttgtccacgagatgctggccaagggcgaggtgcagcgcgtccaggtggtgcctgagagcgacgtggtggaagtctacctgcaccctggagccgtggtgtttgggcggcctcggctagccttgatgtaccgaatgcaggttgcaaatattgacaagtttgaagagaagcttcgagcagctgaagatgagctgaatatcgaggccaaggacaggatcccagtttcctacaagcgaacaggattctttggaaatgccctgtactctgtggggatgacggcagtgggcctggccatcctgtggtatgttttccgtctggccgggatgactggaagggaaggtggattcagtgcttttaatcagcttaaaatggctcgtttcaccattgtggatgggaagatggggaaaggagtcagcttcaaagacgtggcaggaatgcacgaagccaaactggaagtccgcgagtttgtggattatctgaagagcccagaacgcttcctccagcttggcgccaaggtcccaaagggcgcactgctgctcggcccccccggctgtgggaagacgctgctggccaaggcggtggccacggaggctcaggtgcccttcctggcgatggccggcccagagttcgtggaggtcattggaggcctcggcgctgcccgtgtgcggagcctctttaaggaagcccgagcccgggccccctgcatcgtctacatcgatgagatcgacgcggtgggcaagaagcgctccaccaccatgtccggcttctccaacacggaggaggagcagacgctcaaccagcttctggtagaaatggatggaatgggtaccacagaccatgtcatcgtcctggcgtccacgaaccgagctgacattttggacggtgctctgatgaggccaggccgactggaccggcacgtcttcattgatctccccacgctgcaggagaggcgggagatttttgagcagcacctgaagagcctgaagctgacccagtccagcaccttttactcccagcgtctggcagagctgacaccaggattcagtggggctgacatcgccaacatctgcaatgaggctgcgctgcacgcggcgcgggagggacacacttccgtgcacactctcaacttcgagtacgccgtggagcgcgtcctcgcaggtacagggggcgcgccctgggtgaaggccctccttagcagggcttgaaccccagaaatacccaggcaggtattgagaggtgaggtggatggaaccatcacacaggaaggaacacacgttgcgtttcagttctgcgtaactcatgtctttatgataccttgtacttttccttagtttaaaatatcacagatttacctaagagtagacgctcgtccaacagaaataaaaaatgccttgccaaagaaagtgaaaaaataaaaataaaaaatgccccccaaaaataaaaataataaaaactaaaaatgtcttgccagcctgggtgtggtgggctcagcctagccccagcctcatgggggctgagctccagccgctgactgtgggccggaggctgctgccgcccgtggctgtggagggacagccgtgctttcagcgcacagggggctctgcggagaggtgtggatctgcagcaccacctctggtgaaactcatggtcccgaccgtcagtaggaacgggagatgagttttggtgacgggtgaccggtgggctgaccgcctctgactgccgttccgtggctgctcagtgtggggtctgcgacgtctgtgaggagagaggaccaaactgggaatcggagctgctggaggtttccatagctatgatggcaacacccagacgtgatcagtcatctcatggaatggagttcagacccgcactgtcagtgtgagacaggttgaacgtttgaaaagggaagtggttcttgccccaggtgtttgaggagcacgagcctcctttgcgagctatccctgcgagaaccgagttcctcaccctcaattcgagtgaattcctagcacgaacacgcctcttgcaggtccccagggcttcagctttgggaaagcagtgggttcctgcagaggagtggggcagctgctgtgccagacactgcaaaacacacctggcttctctccgacagccctgcgggtcgagaggactggcgctgcctgtgtcttactgaaatttattttcgtgtaaccatttacttttatgtggaaatcgaaaagcttttgataatagtagcaaagcaggaaggactgagtgggaaccacaagccagttgaaagaaaatacatgacgtacttgagtgctcaggaccacgagctgattcaagttgtacagaatggacacttacagatgtgtggaaaatctgagacaggaaatgaagcctcaccagtaagctgaacaggggagatttaatgcaaacatttgtccctggctgggcactgtggctcatgcctgtaatcccagcactttgggggctgaggcgggagggttgcttgaggccaggagtttgagaccagcctgggcaatacagcaagaccccatctcttaaa

SEQ ID NO: 293501 - DNA, 2234 bp, Homo sapiens
cgaccacgcagccacgacccggccggttattcacccgccaggccctgggaatacaaggccggcttcaaaaaaaccagggcacccgcgacctcctcgcagacgcgcgcccccatacccgggcctcaggcagccacgaggtagacgggctcaggctcgggggtgcggcaagcggcacccgggcgcggcggggcgcagctgtggggaccgcgcaggcgccacgtcagaccccgcccaccccgccgcgcaggcgccgtgtagcgccccgcggatcacgcaggcgcggctttcaggccaacatggccgtgctgctgctgctgctccgtgccctccgccggggtccaggcccgggtcctcggccgctgtggggcccaggcccggcctggagtccagggttccccgccaggcccgggagggggcggccgtacatggccagcaggcctccgggggacctcgccgaggctggaggccgagctctgcagagcttacaattgagactgctaacccctacctttgaagggatcaacggattgttgttgaaacaacatttagttcagaatccagtcagactctggcaacttttaggtggtactttctattttaacacctcaaggttgaagcagaagaataaggagaaggataagtcgaaggggaaggcgcctgaagaggacgaagaggagaggagacgccgtgagcgggacgaccagatgtaccgagagcggctgcgcaccttgctggtcatcgcggttgtcatgagcctcctgaatgctctcagcaccagcggaggcagcatttcctggaacgactttgtccacgagatgctggccaagggcgaggtgcagcgcgtccaggtggtgcctgagagcgacgtggtggaagtctacctgcaccctggagccgtggtgtttgggcggcctcggctagccttgatgtaccgaatgcaggttgcaaatattgacaagtttgaagagaagcttcgagcagctgaagatgagctgaatatcgaggccaaggacaggatcccagtttcctacaagcgaacaggattctttggaaatgccctgtactctgtggggatgacggcagtgggcctggccatcctgtggtatgttttccgtctggccgggatgactggaagggaaggtggattcagtgcttttaatcagcttaaaatggctcgtttcaccattgtggatgggaagatggggaaaggagtcagcttcaaagacgtggcaggaatgcacgaagccaaactggaagtccgcgagtttgtggattatctgaagagcccagaacgcttcctccagcttggcgccaaggtcccaaagggcgcactgctgctcggcccccccggctgtgggaagacgctgctggccaaggcggtggccacggaggctcaggtgcccttcctggcgatggccggcccagagttcgtggaggtcattggaggcctcggcgctgcccgtgtgcggagcctctttaaggaagcccgagcccgggccccctgcatcgtctacatcgatgagatcgacgcggtgggcaagaagcgctccaccaccatgtccggcttctccaacacggaggaggagcagacgctcaaccagcttctggtagaaatggatggaatgggtaccacagaccatgtcatcgtcctggcgtccacgaaccgagctgacattttggacggtgctctgatgaggccaggccgactggaccggcacgtcttcattgatctccccacgctgcaggagaggcgggagatttttgagcagcacctgaagagcctgaagctgacccagtccagcaccttttactcccagcgtctggcagagctgacaccaggattcagtggggctgacatcgccaacatctgcaatgaggctgcgctgcacgcggcgcgggagggacacacttccgtgcacactctcaacttcgagtacgccgtggagcgcgtcctcgcaggtacagggggcgcgccctgggtgaaggccctccttagcagggcttgaaccccagaaatacccaggcaggtattgagaggtgaggtggatggaaccatcacacaggaaggaacacacgttgcgtttcagttctgcgtaactcatgtctttatgataccttgtacttttccttagtttaaaatatcacagatttacctaagagtagacgctcgtccaacagaaataaaaaatgccttgccaaagaaagtgaaaaaataaaaataaaaaatgcccccc

SEQ ID NO: 293502 - DNA, 1911 bp, Homo sapiens
cgaccacgcagccacgacccggccggttattcacccgccaggccctgggaatacaaggccggcttcaaaaaaaccagggcacccgcgacctcctcgcagacgcgcgcccccatacccgggcctcaggcagccacgaggtagacgggctcaggctcgggggtgcggcaagcggcacccgggcgcggcggggcgcagctgtggggaccgcgcaggcgccacgtcagaccccgcccaccccgccgcgcaggcgccgtgtagcgccccgcggatcacgcaggcgcggctttcaggccaacatggccgtgctgctgctgctgctccgtgccctccgccggggtccaggcccgggtcctcggccgctgtggggcccaggcccggcctggagtccagggttccccgccaggcccgggagggggcggccgtacatggccagcaggcctccgggggacctcgccgaggctggaggccgagctctgcagagcttacaattgagactgctaacccctacctttgaagggatcaacggattgttgttgaaacaacatttagttcagaatccagtcagactctggcaacttttaggtggtactttctattttaacacctcaaggttgaagcagaagaataaggagaaggataagtcgaaggggaaggcgcctgaagaggacgaagaggagaggagacgccgtgagcgggacgaccagatgtaccgagagcggctgcgcaccttgctggtcatcgcggttgtcatgagcctcctgaatgctctcagcaccagcggaggcagcatttcctggaacgactttgtccacgagatgctggccaagggcgaggtgcagcgcgtccaggtggtgcctgagagcgacgtggtggaagtctacctgcaccctggagccgtggtgtttgggcggcctcggctagccttgatgtaccgaatgcaggttgcaaatattgacaagtttgaagagaagcttcgagcagctgaagatgagctgaatatcgaggccaaggacaggatcccagtttcctacaagcgaacaggattctttggaaatgccctgtactctgtggggatgacggcagtgggcctggccatcctgtggtatgttttccgtctggccgggatgactggaagggaaggtggattcagtgcttttaatcagcttaaaatggctcgtttcaccattgtggatgggaagatggggaaaggagtcagcttcaaagacgtggcaggaatgcacgaagccaaactggaagtccgcgagtttgtggattatctgaagagcccagaacgcttcctccagcttggcgccaaggtcccaaagggcgcactgctgctcggcccccccggctgtgggaagacgctgctggccaaggcggtggccacggaggctcaggtgcccttcctggcgatggccggcccagagttcgtggaggtcattggaggcctcggcgctgcccgtgtgcggagcctctttaaggaagcccgagcccgggccccctgcatcgtctacatcgatgagatcgacgcggtgggcaagaagcgctccaccaccatgtccggcttctccaacacggaggaggagcagacgctcaaccagcttctggtagaaatggatgtgttctacgcagaaatagaagagctgaaactggtgtatccttatcacggcgttctacacagcaactagaagagctgaaactggtaaatagaagagctgaaactggtgtatccttatcacggtgttctacgcagaaatagaagagctgaaactggtgtatccttatcacggtgttctacgcagcaatagaagagctgaaactggtatttacctaagagtagacgctcgtccaacagaaataaaaaatgccttgccaaagaaagtgaaaaaataaaaataaaaaatgcccccc

SEQ ID NO: 293503 - DNA, 1824 bp, Homo sapiens
cgaccacgcagccacgacccggccggttattcacccgccaggccctgggaatacaaggccggcttcaaaaaaaccagggcacccgcgacctcctcgcagacgcgcgcccccatacccgggcctcaggcagccacgaggtagacgggctcaggctcgggggtgcggcaagcggcacccgggcgcggcggggcgcagctgtggggaccgcgcaggcgccacgtcagaccccgcccaccccgccgcgcaggcgccgtgtagcgccccgcggatcacgcaggcgcggctttcaggccaacatggccgtgctgctgctgctgctccgtgccctccgccggggtccaggcccgggtcctcggccgctgtggggcccaggcccggcctggagtccagggttccccgccaggcccgggagggggcggccgtacatggccagcaggcctccgggggacctcgccgaggctggaggccgagctctgcagagcttacaattgagactgctaacccctacctttgaagggatcaacggattgttgttgaaacaacatttagttcagaatccagtcagactctggcaacttttaggtggtactttctattttaacacctcaaggttgaagcagaagaataaggagaaggataagtcgaaggggaaggcgcctgaagaggacgaagaggagaggagacgccgtgagcgggacgaccagatgtaccgagagcggctgcgcaccttgctggtcatcgcggttgtcatgagcctcctgaatgctctcagcaccagcggaggcagcatttcctggaacgactttgtccacgagatgctggccaagggcgaggtgcagcgcgtccaggtggtgcctgagagcgacgtggtggaagtctacctgcaccctggagccgtggtgtttgggcggcctcggctagccttgatgtaccgaatgcaggttgcaaatattgacaagtttgaagagaagcttcgagcagctgaagatgagctgaatatcgaggccaaggacaggatcccagtttcctacaagcgaacaggattctttggaaatgccctgtactctgtggggatgacggcagtgggcctggccatcctgtggtatgttttccgtctggccgggatgactggaagggaaggtggattcagtgcttttgtaagttctgtaaatcagagctctctgaactctttctggtttgtgtttgctgaatacttttcccataagctatacgatgaatacacagggaaaacctgttgcagagagtagcctgaagccacaattagacagcagctcaccttcctttcccatggtccggctgtaaggcgtgtagtaaccaatgttgcctgagggcctctcacccctaactctggggtgcctgagccttgtgagattacagggcagttgaatctgcgtttttcttttctttttttttgagacggagtttcgcccttcttgcccaggctggagtgcagccgtgcgatctcagctcaccgcaacttgcacctcccgcattcaagcaattctcctgcctcagcttcccgagtagctgggattacaggcacgcgccaccacgtccagctaattttggtatttttggtagagacggggtttctccatgttgttcaggctggtctcgaactcccgacctcaggtgatcctcccgcctcagcctcccaaagtgctgggattataggcatgagccactgcacctggcctttcttttattgtgtgtgtgtgtgtgacagagtctggctctgttgcccaggctggagtgcagtggtgcgatctcagctcactgcaacctctgcctcctgggttcaag

SEQ ID NO: 293504 - DNA, 1937 bp, Homo sapiens
cgaccacgcagccacgacccggccggttattcacccgccaggccctgggaatacaaggccggcttcaaaaaaaccagggcacccgcgacctcctcgcagacgcgcgcccccatacccgggcctcaggcagccacgaggtagacgggctcaggctcgggggtgcggcaagcggcacccgggcgcggcggggcgcagctgtggggaccgcgcaggcgccacgtcagaccccgcccaccccgccgcgcaggcgccgtgtagcgccccgcggatcacgcaggcgcggctttcaggccaacatggccgtgctgctgctgctgctccgtgccctccgccggggtccaggcccgggtcctcggccgctgtggggcccaggcccggcctggagtccagggttccccgccaggcccgggagggggcggccgtacatggccagcaggcctccgggggacctcgccgaggctggaggccgagctctgcagagcttacaattgagactgctaacccctacctttgaagggatcaacggattgttgttgaaacaacatttagttcagaatccagtcagactctggcaacttttaggtggtactttctattttaacacctcaaggttgaagcagaagaataaggagaaggataagtcgaaggggaaggcgcctgaagaggacgaagaggagaggagacgccgtgagcgggacgaccagatgtaccgagagcggctgcgcaccttgctggtcatcgcggttgtcatgagcctcctgaatgctctcagcaccagcggaggcagcatttcctggaacgactttgtccacgagatgctggccaagggcgaggtgcagcgcgtccaggtggtgcctgagagcgacgtggtggaagtctacctgcaccctggagccgtggtgtttgggcggcctcggctagccttgatgtaccgaatgcaggttgcaaatattgacaagtttgaagagaagcttcgagcagctgaagatgagctgaatatcgaggccaaggacaggatcccagtttcctacaagcgaacaggattctttggaaagtatgttggatgtatttgttgatgcttgaactaaacctaacttggctttgtaatctgagaaacagattgcaatcaaaaatctcaaactgtctttgcctatagttaactagactttttagtgggagggttaaataaatatagaagtgaatgatacaatgccaggagatttggaaatatagttatccctgggtatccatgggggctggttctcggacttcccaaggataccagcacctgaggatgcctaagcccctggtgtaggatgctgaagtctaagcccctgatgtagatgccgaagtctcagcccccgacgtaagatgccgaagtctcagcccccgacgtaggatggcgaagtctcagcccccgacgtaggatgccgaagtctcagcccccgacgtaggatgccgaagtctcagcccccgacgtaggatgccgaagtctcagcccccgacgtaggatggcgaagtctcagcccccgacgtaggatggcgaagtctcagcccccgacgtaggatggcgaagtctcagcccctggtgtaaaatgccgaaatctttgtgtgtaacctaagaacattctctgatatgctttaaatcatctgtaggttgataataatacccaataccctgtaaatactatttcaatcgttgttatactttagggaataatgacaaaaatgtgtctgtgcatgttgagtatagatgcacgtttttccccagatacattcattctgtgcttggttaaacctgcagagatgaaacctgtggctgtggaggccaaccgtgtgcaagtccgttggagtttgtttagtcactttctttagttgtgtggcgcttctgaattcacattcttgtataattttcactgactgtgctctttgatgaa

SEQ ID NO: 293505 - DNA, 477 bp, Homo sapiens
aggggtggccaggggcccccgcgagcagctgccgtgtgtctgtttgtagggaatggagctggtagctttagttgtccttggtgtagaactttgtctggcccgggtacaggaagaggctttgttttttattaactgcccatttcctgattctctctgtgtcccctcaggcctcggcgctgcccgtgtgcggagcctctttaaggaagcccgagcccgggccccctgcatcgtctacatcgatgagatcgacgcggtgggcaagaagcgctccaccaccatgtccggcttctccaacacggaggaggagcagacgctcaaccagcttctggtagaaatggatggtcagtgctcgtgcgccccgcacccccattgcaccatcagaggaggttttccgatgtctttcagaacaggttgtggtgagccaagatcgtgtcactgcactccggcctgggtgacagagtgagactctgtctcaag

SEQ ID NO: 293506 - DNA, 1067 bp, Homo sapiens
gcagagccatggcctcccacctgcgcccgccgtccccgctcctcgtgcgggtgtacaagtccggcccccgagtacgaaggaagctggagagctacttccagagctctaagtcctcgggcggcggggagtgcacggtcagcacccaggaacacgaagccccgggcaccttccgggtggagttcagtgaaagggcagctaaggagagagtgttgaaaaaaggagagcaccaaatacttgttgacgaaaaacctgtgcccattttcctggtacccactgacaattcaataaagaagaacacgagacctcaaatttcttcactgacacaatcacaagcagaaacaccgtctggtgatatgcatcaacatgaaggacatattcctaatgctgtggattcctgtctccaaaagatctttcttactgtaacagctgacctgaactgtaacctgttctccaaagagcagagggcatacataaccacactgtgccctagtatcagaaaaatggaaggtcacgatggaattgagaaggtgtgtggtgacttccaagacattgaaagaatacatcaatttttgagtgagcagttcctggaaagtgagcagaaacaacaattttccccttcaatgacagagaggaagccactcagtcagcaggagagggacagctgcatttctccttctgaaccagaaaccaaggcagaacaaaaaagcaactattttgaagttcccttgccttactttgaatactttaaatatatctgtcctgataaaatcaactcaatagagaaaagatttggtgtaaacattgaaatccaggagagttctccaaatatggtctgtttagatttcacctcaagtcgatcaggtgacctggaagcagctcgtgagtcttttgctagtgaatttcagaagaacacagaacctctgaagcaagaatgtgtctctttagcagacagtaagcaggcaaataaattcaaacaggaattgaatcaccagtttacaaagctccttataaaggagaaaggaggcgaattaactctccttgggacccaagatgacatttcagctgcc

SEQ ID NO: 293507 - DNA, 417 bp, Homo sapiens
ctgagttgcctttggcctgtaactccaatgatttgcaggtagggagtatagagctgctatctttaatgtagatttataattacctccgctgtctctcaaattctaagtcattgggactggagtactggctctatacagttccttggtttcagagctttattactaacaagactgtatctcctttaatccctgaactctcatctctcccagcttctgaactgttacaataccaaacaataaagttatttaactttaagtcactctttggagactggatatagtcaggtacagtgaaagtctgaggggtggtgaactctggtgagtggcactgaggagaggacaggggtacttccagaagtaagctcagtgacactctgacttgaaacctttttcttccttcccagacccagaacgctg

SEQ ID NO: 293508 - DNA, 810 bp, Homo sapiens
agcgggagatccgagcgtctcggctggtggaaggggcgaggagctttgcagttgtgtgcgagtgtgtacagggacagagtcctgagcaaggaaacctagaagggagagaggaataccatggaattgagtcctgtctggtagcactgacagacacagtggccagccaccctcatgccaccctgtcctgccatgggaaggaacagcagctctagagttcctatgggaactctctttccttctcactgaactctagcttcatcaataactcagtgcctctggccaagtttttagcctctgggacaacatccactatatccatatgaggcactcatgtaacacggtgattaagagtacagatgctgaagccagcagcctaagtctgaatcctgactgccaattattaatataagttgtggaaccatggtcaagttactcaacctctttatgcctctgtctcctggtctacgaaatgaagctttgaatctgctgttattaagttgctggtgctgaaataacacttattatttatgatctaactgaaatgggaacactggaaacttctttgaaactgaagaaaaaaatgaaaaagaagtttttacaatcaaaactgccatgaagactgctttacccaaaattttggtccacagctttcattgaattacttatcagggcaaacaaagtttagccatgtgaacacgttccaattttgttggaaataatttggatccagctatctttatacaatggtgagttcgtattgcatctcatggctaaaatactgaggtaaaggcttttggatctttgtgtgtg

SEQ ID NO: 293509 - DNA, 1817 bp, Homo sapiens
aagcttacgaggaattcttggatgacatccctcagcatgtctgagcgactgctgagggagaaaatgatgcccaggttgggctccccggcccaccggccgaggagaggcctgcgctgcacacgcgcagaccgagcatccgcgtcaagaggcgaagagagcgcgcgctccccacgtcctgcgctcctggctgccgggcattcgtctcagccgtgactctcgccaggccggggctggcgcgcccacgtctgaagagcgatgccccgggagatcatcaccctgcagctgggccagtgcggcaaccagattgggttcgagttctggaaacagctgtgcgccgagcatggtatcagccccgagggcatcgtggaggaattcgccaccgagggcactgaccgcaaggacgtctttttctaccaggcagacgatgagcactacatcccccgggccgtgctgctggacttggaaccccgggtgatccactccatcctcaactccccctatgccaagctctacaacccagagaacatctacctgtcggaacatggaggaggagctggcaacaactgggccagcggattctcccagggtgagaaaattcatgaagacatctttgacatcatagaccgagaagcagatggaagtgacagtttggagggcttcgtgctgtgtcactccatcgctgggggtacgggttctggcctgggctcctacctcctggagcgactgaatgacaggtaccccaagaagctagtgcagacttattcagtgtttccctaccaggacgagatgagcgacgtagtggttcagccctacaattcactcctgacactcaagaggctgacgcagaacgcagattgtgtggtggtgctggacaacacagccctgaaccggattgccacagaccgcctgcacatccagaacccgtccttctcccagatcaaccagctggtgtccaccatcatgtcggccagcaccaccaccctgcgctaccccggctacatgaacaatgacctcatcggcctcatcgcctcgctcattcccaccccacggctccacttcctcatgaccggctacaccccgctcactacagaccagtcagtggccagcgtgaggaagaccacggtcctggatgtcatgaggcggctgctgcagcccaagaacgtgatggtgtccacaggccgagaccgccagaccaaccactgctacatcgccatcctcaacatcatccagggagaggtggaccccacccaggtccacaagagcctgcagaggatccgggaacggaagttggccaacttcatcccgtggggccccgccagcatccaggtggccctgtcgaggaagtctccctacctgccctcggcccaccgggtcagcgggctcatgatggccaaccacaccagcatctcctcgctctttgaaagttcctgccagcagtttgacaagctgcggaagcgggatgccttcctcgagcagttccgtaaggaggacatgttcaaggacaactttgatgagatggacaggtctagggaggttgttcaggagctcattgatgagtaccatgcggccacccagccagactacatttcctggggcacccaggagcagtgatttccctccccactactccttctccttctagatggtaaccacagcctcgaccatgcctgctccctctgacccagcttcacctcatggacaacccttcttggttcatctccagcccgtgagctggtcctgcttcctcccttccatgccctaacttttaatatgcttgttcagctctaataaagtaataaagcttggttgtcagtata

SEQ ID NO: 293510 - DNA, 844 bp, Homo sapiens
tacgtagtagagcctggtggttaatcgcccgagggagggcaaagagcgcgcgctccccacgtcctgcgctcctggctgccgggcattcgtctcagccgtgactctcgcccgggagatcatcaccctgcagctgggccagtgcggcaaccagattgggttcgagttctggaaacagctgtgcgccgagcatggtatcagccccgagggcatcgtggaggaattcgccaccgagggcactgaccgcaaggacgtctttttctaccaggcagacgatgagcactacatcccccgggccgtgctgctggacttggaaccccgggtgatccactccatcctcaactccccctatgccaagctctacaacccagagaacatctacctgtcggaacatggaggaggagctggcaacaactgggccagcggattctcccagggtgagaaaattcatgaagacatctttgacatcatagaccgagaagcagatggaagtgacagtttggagggcttcgtgctgtgtcactccatcgctgggggtacgggttctggcctgggctcctacctcctggagcgactgaatgacaggtaccccaagaagctagtgcagacttattcagtgtttccctaccaggacgagatgagcgacgtagtggttcagccctacaattcactcctgacactcaagaggctgacgcagaacgcagattgtgtgcgtggttgctggacaatgactagcaccttgtaaccggattgccactggatcgcctgccacatacagaacccggccttgctaccagatccaaccggttggtgttcacatcgatggtcggcagtcgcatcacctgcg

SEQ ID NO: 293511 - DNA, 1828 bp, Homo sapiens
atgtttttacaaaaaatcaggtttggtatctggtccggaattcccgggatgctgagcgactgctgagggagaaaatgatgcccaggttgggctccccggcccaccggccgaggagaggcctgcgctgcacacgcgcagaccgagcatccgcgtcaagaggcgaagagagcgcgcgctccccacgtcctgcgctcctggctgccgggcattcgtctcagccgtgactctcgccaggccggggctggcgcgcccacgtctgaagagcgatgccccgggagatcatcaccctgcagctgggccagtgcggcaaccagattgggttcgagttctggaaacagctgtgcgccgagcatggtatcagccccgagggcatcgtggaggaattcgccaccgagggcactgaccgcaaggacgtctttttctaccaggcagacgatgagcactacatcccccgggccgtgctgctggacttggaaccccgggtgatccactccatcctcaactccccctatgccaagctctacaacccagagaacatctacctgtcggaacatggaggaggagctggcaacaactgggccagcggattctcccagggtgagaaaattcatgaagacatctttgacatcatagaccgagaagcagatggaagtgacagtttggagggcttcgtgctgtgtcactccatcgctgggggtacgggttctggcctgggctcctacctcctggagcgactgaatgacaggtaccccaagaagctagtgcagacttattcagtgtttccctaccaggacgagatgagcgacgtagtggttcagccctacaattcactcctgacactcaagaggctgacgcagaacgcagattgtgtggtggtgctggacaacacagccctgaaccggattgccacagaccgcctgcacatccagaacccgtccttctcccagatcaaccagctggtgtccaccatcatgtcggccagcaccaccaccctgcgctaccccggctacatgaacaatgacctcatcggcctcatcgcctcgctcattcccaccccacggctccacttcctcatgaccggctacaccccgctcactacagaccagtcagtggccagcgtgaggaagaccacggtcctggatgtcatgaggcggctgctgcagcccaagaacgtgatggtgtccacaggccgagaccgccagaccaaccactgctacatcgccatcctcaacatcatccagggagaggtggaccccacccaggtccacaagagcctgcagaggatccgggaacggaagttggccaacttcatcccgtggggccccgccagcatccaggtggccctgtcgaggaagtctccctacctgccctcggcccaccgggtcagcgggctcatgatggccaaccacaccagcatctcctcgctctttgaaagttcctgccagcagtttgacaagctgcggaagcgggatgccttcctcgagcagttccgtaaggaggacatgttcaaggacaactttgatgagatggacaggtctagggaggttgttcaggagctcattgatgagtaccatgcggccacccagccagactacatttcctggggcacccaggagcagtgatttccctccccactactccttctccttctagatggtaaccacagcctcgaccatgcctgctccctctgacccagcttcacctcatggacaacccttcttggttcatctccagcccgtgagctggtcctgcttcctcccttccatgccctaacttttaatatgcttgttcagctctaataaagtaataaagcttggttgtcagtata

SEQ ID NO: 293512 - DNA, 2137 bp, Homo sapiens
  misc_feature (2095)..(2095): n is a, c, g, or t
atgtttttacaaaaaatcaggtttggtatctggtccggaattcccgggatgctgagcgactgctgagggagaaaatgatgcccaggttgggctccccggcccaccggccgaggagaggcctgcgctgcacacgcgcagaccgagcatccgcgtcaagaggcgaagagagcgcgcgctccccacgtcctgcgctcctggctgccgggcattcgtctcagccgtgactctcgccaggccggggctggcgcgcccacgtctgaagagcgatgccccgggagatcatcaccctgcagctgggccagtgcggcaaccagattgggttcgagttctggaaacagctgtgcgccgagcatggtatcagccccgagggcatcgtggaggaattcgccaccgagggcactgaccgcaaggacgtctttttctaccaggcagacgatgagcactacatcccccgggccgtgctgctggacttggaaccccgggtgatccactccatcctcaactccccctatgccaagctctacaacccagagaacatctacctgtcggaacatggaggaggagctggcaacaactgggccagcggattctcccagggtgagaaaattcatgaagacatctttgacatcatagaccgagaagcagatggaagtgacagtttggagggcttcgtgctgtgtcactccatcgctgggggtacgggttctggcctgggctcctacctcctggagcgactgaatgacaggtaccccaagaagctagtgcagacttattcagtgtttccctaccaggacgagatgagcgacgtagtggttcagccctacaattcactcctgacactcaagaggctgacgcagaacgcagattgtgtggtggtgctggacaacacagccctgaaccggattgccacagaccgcctgcacatccagaacccgtccttctcccagatcaaccagctggtgtccaccatcatgtcggccagcaccaccaccctgcgctaccccggctacatgaacaatgacctcatcggcctcatcgcctcgctcattcccaccccacggctccacttcctcatgaccggctacaccccgctcactacagaccagtcagtggccagcgtgaggaagaccacggtcctggatgtcatgaggcggctgctgcagcccaagaacgtgatggtgtccacaggccgagaccgccagaccaaccactgctacatcgccatcctcaacatcatccagggagaggtggaccccacccaggtccacaagagcctgcagaggatccgggaacggaagttggccaacttcatcccgtggggccccgccagcatccaggtggccctgtcgaggaagtctccctacctgccctcggcccaccgggtcagcgggctcatgatggccaaccacaccagcatctcctcgctctttgaaagttcctgccagcagtttgacaagctgcggaagcgggatgccttcctcgagcagttccgtaaggaggacatgttcaaggacaactttgatgagatggacaggtctagggaggttgttcaggagctcattgatgagtaccatgcggccacccagccagactacatttcctggggcacccaggagcagtgatttccctccccactactccttctccttctagatggtaaccacagcctcgaccatgcctgctccctctgacccagcttcacctcatggacaacccttcttggttcatctccagcccgtgagctggtcctgcttcctcccttccatgccctaacttttaatatgcttgttcagctctaataaagtaataaagcttggttgtcagtataacacacacaccagaaaaaactctggaaatagttctctttttcccccgaggtagaaattccggtgccttttaaggcggccaccaaccttaagggggctccccgttggaaggggtgtggcttccctttatgcaacaggggtggcacaaaaaccgtgtttgtcgcgtggcgctgttctgtgacccctctgggcgtgtacatgaccgcgggtggcacataagacacggtggtgaaaaattggctccgccccattatatgattggtgaccgnccgcacccaaaaatattgttggcctaagaaaaatatgctcgc

SEQ ID NO: 293513 - DNA, 1844 bp, Homo sapiens
aagcttacgaggaattcttggatgacatccctcagcatgtctgagcgactgctgagggagaaaatgatgcccaggttgggctccccggcccaccggccgaggagaggcctgcgctgcacacgcgcagaccgagcatccgcgtcaagaggcgaagagagcgcgcgctccccacgtcctgcgctcctggctgccgggcattcgtctcagccgtgactctcgccaggccggggctggcgcgcccacgtctgaagagcgatgccccgggagatcatcaccctgcagctgggccagtgcggcaaccagattgggttcgagttctggaaacagctgtgcgccgagcatggtatcagccccgagggcatcgtggaggaattcgccaccgagggcactgaccgcaaggacgtctttttctaccaggcagacgatgagcactacatcccccgggccgtgctgctggacttggaaccccgggtgatccactccatcctcaactccccctatgccaagctctacaacccagagaacatctacctgtcggaacatggaggaggagctggcaacaactgggccagcggattctcccagggtgagaaaattcatgaagacatctttgacatcatagaccgagaagcagatggaagtgacagtttggagctccagaacagctccagagtgataaagggcttcgtgctgtgtcactccatcgctgggggtacgggttctggcctgggctcctacctcctggagcgactgaatgacaggtaccccaagaagctagtgcagacttattcagtgtttccctaccaggacgagatgagcgacgtagtggttcagccctacaattcactcctgacactcaagaggctgacgcagaacgcagattgtgtggtggtgctggacaacacagccctgaaccggattgccacagaccgcctgcacatccagaacccgtccttctcccagatcaaccagctggtgtccaccatcatgtcggccagcaccaccaccctgcgctaccccggctacatgaacaatgacctcatcggcctcatcgcctcgctcattcccaccccacggctccacttcctcatgaccggctacaccccgctcactacagaccagtcagtggccagcgtgaggaagaccacggtcctggatgtcatgaggcggctgctgcagcccaagaacgtgatggtgtccacaggccgagaccgccagaccaaccactgctacatcgccatcctcaacatcatccagggagaggtggaccccacccaggtccacaagagcctgcagaggatccgggaacggaagttggccaacttcatcccgtggggccccgccagcatccaggtggccctgtcgaggaagtctccctacctgccctcggcccaccgggtcagcgggctcatgatggccaaccacaccagcatctcctcgctctttgaaagttcctgccagcagtttgacaagctgcggaagcgggatgccttcctcgagcagttccgtaaggaggacatgttcaaggacaactttgatgagatggacaggtctagggaggttgttcaggagctcattgatgagtaccatgcggccacccagccagactacatttcctggggcacccaggagcagtgatttccctccccactactccttctccttctagatggtaaccacagcctcgaccatgcctgctccctctgacccagcttcacctcatggacaacccttcttggttcatctccagcccgtgagctggtcctgcttcctcccttccatgccctaacttttaatatgcttgttcagctctaataaagtaataaagcttggttgtcagtata

SEQ ID NO: 293514 - DNA, 1957 bp, Homo sapiens
atgtttttacaaaaaatcaggtttggtatctggtccggaattcccgggatgctgagcgactgctgagggagaaaatgatgcccaggttgggctccccggcccaccggccgaggagaggcctgcgctgcacacgcgcagaccgagcatccgcgtcaagaggcgaagagagcgcgcgctccccacgtcctgcgctcctggctgccgggcattcgtctcagccgtgactctcgccaggccggggctggcgcgcccacgtctgaagagcgatgccccgggagatcatcaccctgcagctgggccagtgcggcaaccagattgggttcgagttctggaaacagctgtgcgccgagcatggtatcagccccgagggcatcgtggaggaattcgccaccgagggcactgaccgcaaggacgtctttttctaccaggcagacgatgagcactacatcccccgggccgtgctgctggacttggaaccccgggtgatccactccatcctcaactccccctatgccaagctctacaacccagagaacatctacctgtcggaacatggaggaggagctggcaacaactgggccagcggattctcccagggtgagaaaattcatgaagacatctttgacatcatagaccgagaagcagatggaagtgacagtttggagggcttcgtgctgtgtcactccatcgctgggggtacgggttctggcctgggctcctacctcctggagcgactgaatgacaggtaccccaagaagctagtgcagacttattcagtgtttccctaccaggacgagatgagcgacgtagtggttcagccctacaattcactcctgacactcaagaggctgacgcagaacgcagattgtgtggtggtgctggacaacacagccctgaaccggattgccacagaccgcctgcacatccagaacccgtccttctcccagatcaaccagctggtgtccaccatcatgtcggccagcaccaccaccctgcgctaccccggctacatgaacaatgacctcatcggcctcatcgcctcgctcattcccaccccacggctccacttcctcatgaccggctacaccccgctcactacagaccagtcagtggccagcgtgaggaagaccacggtcctggatgtcatgaggcggctgctgcagcccaagaacgtgatggtgtccacaggccgagaccgccagaccaaccactgctacatcgccatcctcaacatcatccagggagaggtggaccccacccaggtccacaagagcctgcagaggatccgggaacggaagttggccaacttcatcccgtggggccccgccagcatccaggtggccctgtcgaggaagtctccctacctgccctcggcccaccgggtcagcgggctcatgatggccaaccacaccagcatctcctcgctctttgaaagttcctgccagcagtttgacaagctgcggaagcgggatgccttcctcgagcagttccgtaaggaggacatgttcaaggacaactttgatgagatggacaggtctagggaggttgttcaggagctcattgatgagtaccatgcggccacccagccagactacatttcctggggcacccaggagcagtgatttccctccccactactccttctccttctagatggtaaccacagcctcgaccatgcctgctccctctgacccagcttcacctcatggacaacccttcttggttcatctccagcccgtgagctggtcctgcttcctcccttccatgccctaacttttaatatgcttgttcagctctaataaagtaataaagcttggttgtcagtatatcagtatagccagggcttgatctgtgaatacgggggggtggtgaaggggtccagtttctaggcatctgacagtagggtggccttcacctcctccaacgtcttatcacttagtccaaatcttagtgtgtt

SEQ ID NO: 293515 - DNA, 1737 bp, Homo sapiens
aagcttacgaggaattcttggatgacatccctcagcatgtctgagcgactgctgagggagaaaatgatgcccaggttgggctccccggcccaccggccgaggagaggcctgcgctgcacacgcgcagaccgagcatccgcgtcaagaggcgaagagagcgcgcgctccccacgtcctgcgctcctggctgccgggcattcgtctcagccgtgactctcgccaggccggggctggcgcgcccacgtctgaagagcgatgccccgggagatcatcaccctgcagctgggccagtgcggcaaccagattgggttcgagttctggaaacagctgtgcgccgagcatggtatcagccccgagggcatcgtggaggaattcgccaccgagggcactgaccgcaaggacgtctttttctaccaggcagacgatgagcactacatcccccgggccgtgctgctggacttggaaccccgggtgatccactccatcctcaactccccctatgccaagctctacaacccagagaacatctacctgtcggaacatggaggaggagctggcaacaactgggccagcggattctcccagggtgagaaaattcatgaagacatctttgacatcatagaccgagaagcagatggaagtgacagtttggaggtaccccaagaagctagtgcagacttattcagtgtttccctaccaggacgagatgagcgacgtagtggttcagccctacaattcactcctgacactcaagaggctgacgcagaacgcagattgtgtggtggtgctggacaacacagccctgaaccggattgccacagaccgcctgcacatccagaacccgtccttctcccagatcaaccagctggtgtccaccatcatgtcggccagcaccaccaccctgcgctaccccggctacatgaacaatgacctcatcggcctcatcgcctcgctcattcccaccccacggctccacttcctcatgaccggctacaccccgctcactacagaccagtcagtggccagcgtgaggaagaccacggtcctggatgtcatgaggcggctgctgcagcccaagaacgtgatggtgtccacaggccgagaccgccagaccaaccactgctacatcgccatcctcaacatcatccagggagaggtggaccccacccaggtccacaagagcctgcagaggatccgggaacggaagttggccaacttcatcccgtggggccccgccagcatccaggtggccctgtcgaggaagtctccctacctgccctcggcccaccgggtcagcgggctcatgatggccaaccacaccagcatctcctcgctctttgaaagttcctgccagcagtttgacaagctgcggaagcgggatgccttcctcgagcagttccgtaaggaggacatgttcaaggacaactttgatgagatggacaggtctagggaggttgttcaggagctcattgatgagtaccatgcggccacccagccagactacatttcctggggcacccaggagcagtgatttccctccccactactccttctccttctagatggtaaccacagcctcgaccatgcctgctccctctgacccagcttcacctcatggacaacccttcttggttcatctccagcccgtgagctggtcctgcttcctcccttccatgccctaacttttaatatgcttgttcagctctaataaagtaataaagcttggttgtcagtata

SEQ ID NO: 293516 - DNA, 1874 bp, Homo sapiens
  misc_feature (1857)..(1857): n is a, c, g, or t
atgtttttacaaaaaatcaggtttggtatctggtccggaattcccgggatgctgagcgactgctgagggagaaaatgatgcccaggttgggctccccggcccaccggccgaggagaggcctgcgctgcacacgcgcagaccgagcatccgcgtcaagaggcgaagagagcgcgcgctccccacgtcctgcgctcctggctgccgggcattcgtctcagccgtgactctcgccaggccggggctggcgcgcccacgtctgaagagcgatgccccgggagatcatcaccctgcagctgggccagtgcggcaaccagattgggttcgagttctggaaacagctgtgcgccgagcatggtatcagccccgagggcatcgtggaggaattcgccaccgagggcactgaccgcaaggacgtctttttctaccaggcagacgatgagcactacatcccccgggccgtgctgctggacttggaaccccgggtgatccactccatcctcaactccccctatgccaagctctacaacccagagaacatctacctgtcggaacatggaggaggagctggcaacaactgggccagcggattctcccagggtgagaaaattcatgaagacatctttgacatcatagaccgagaagcagatggaagtgacagtttggagggcttcgtgctgtgtcactccatcgctgggggtacgggttctggcctgggctcctacctcctggagcgactgaatgacaggtaccccaagaagctagtgcagacttattcagtgtttccctaccaggacgagatgagcgacgtagtggttcagccctacaattcactcctgacactcaagaggctgacgcagaacgcagattgtgtggtggtgctggacaacacagccctgaaccggattgccacagaccgcctgcacatccagaacccgtccttctcccagatcaaccagctggtgtccaccatcatgtcggccagcaccaccaccctgcgctaccccggctacatgaacaatgacctcatcggcctcatcgcctcgctcattcccaccccacggctccacttcctcatgaccggctacaccccgctcactacagaccagtcagtggccagcgtgaggaagaccacggtcctggatgtcatgaggcggctgctgcagcccaagaacgtgatggtgtccacaggccgagaccgccagaccaaccactgctacatcgccatcctcaacatcatccagggagaggtggaccccacccaggtccacaagagcctgcagaggatccgggaacggaagttggccaacttcatcccgtggggccccgccagcatccaggtggccctgtcgaggaagtctccctacctgccctcggcccaccgggtcagcgggctcatgatggccaaccacaccagcatctcctcgctctttgaaagttcctgccagcagtttgacaagctgcggaagcgggatgccttcctcgagcagttccgtaaggaggacatgttcaaggacaactttgatgagatggacaggtctagggaggttgttcaggagctcattgatgagtaccatgcggccacccagccagactacatttcctggggcacccaggagcagtgatttccctccccactactccttctccttctagatggtaaccacagcctcgaccatgcctgctccctctgacccagcttcacctcatggacaacccttcttggttcatctccagcccgtgagctggtcctgcttcctcccttccatgccctaacttttaatatgcttgttcagctctaataaagtaataaagcttggttgtcagtataagaaattctcatgtgcaaaaggcaggagnacagacgaggcagggtt

SEQ ID NO: 293517 - DNA, 1435 bp, Homo sapiens
ttgtaattcagatgcttcttgatttaagatgggattatgtgctgataaacccatcataaagccaaaacatcttaaattaaaccatcctaagtcagggacagtctgtaggtagtccagaattgaagtgaattagtggatacccagctggcatctactgtagaattgactgcttacctgatgtgtgtggtaagaccccacccatctggtatcagaattgtgttgtgagagtgtggcaggagaaactgagtctgtttattcctgtatacacacagggcttcgtgctgtgtcactccatcgctgggggtacgggttctggcctgggctcctacctcctggagcgactgaatgacaggtaccccaagaagctagtgcagacttattcagtgtttccctaccaggacgagatgagcgacgtagtggttcagccctacaattcactcctgacactcaagaggctgacgcagaacgcagattgtgtggtggtgctggacaacacagccctgaaccggattgccacagaccgcctgcacatccagaacccgtccttctcccagatcaaccagctggtgtccaccatcatgtcggccagcaccaccaccctgcgctaccccggctacatgaacaatgacctcatcggcctcatcgcctcgctcattcccaccccacggctccacttcctcatgaccggctacaccccgctcactacagaccagtcagtggccagcgtgaggaagaccacggtcctggatgtcatgaggcggctgctgcagcccaagaacgtgatggtgtccacaggccgagaccgccagaccaaccactgctacatcgccatcctcaacatcatccagggagaggtggaccccacccaggtccacaagagcctgcagaggatccgggaacggaagttggccaacttcatcccgtggggccccgccagcatccaggtggccctgtcgaggaagtctccctacctgccctcggcccaccgggtcagcgggctcatgatggccaaccacaccagcatctcctcgctctttgaaagttcctgccagcagtttgacaagctgcggaagcgggatgccttcctcgagcagttccgtaaggaggacatgttcaaggacaactttgatgagatggacaggtctagggaggttgttcaggagctcattgatgagtaccatgcggccacccagccagactacatttcctggggcacccaggagcagtgatttccctccccactactccttctccttctagatggtaaccacagcctcgaccatgcctgctccctctgacccagcttcacctcatggacaacccttcttggttcatctccagcccgtgagctggtcctgcttcctcccttccatgccctaacttttaatatgcttgttcagctctaataaagtaataaagcttggttgtcagtata

SEQ ID NO: 293518 - DNA, 1783 bp, Homo sapiens
aagcttacgaggaattcttggatgacatccctcagcatgtctgagcgactgctgagggagaaaatgatgcccaggttgggctccccggcccaccggccgaggagaggcctgcgctgcacacgcgcagaccgagcatccgcgtcaagaggcgaagagagcgcgcgctccccacgtcctgcgctcctggctgccgggcattcgtctcagccgtgactctcgccaggccggggctggcgcgcccacgtctgaagagcgatgccccgggagatcatcaccctgcagctgggccagtgcggcaaccagattgggttcgagttctggaaacagctgtgcgccgagcatggtatcagccccgagggcatcgtggaggaattcgccaccgagggcactgaccgcaaggacgtctttttctaccaggcagacgatgagcactacatcccccgggccgtgctgctggacttggaaccccgggtgatccactccatcctcaactccccctatgccaagctctacaacccagagaacatctacctgtcggaacatggaggaggagctggcaacaactgggccagcggattctcccaggtgtcctagcgaccattccagagacctttgatattcccatccagagggtgagaaaattcatgaagacatctttgacatcatagaccgagaagcagatggaagtgacagtttggaggtaccccaagaagctagtgcagacttattcagtgtttccctaccaggacgagatgagcgacgtagtggttcagccctacaattcactcctgacactcaagaggctgacgcagaacgcagattgtgtggtggtgctggacaacacagccctgaaccggattgccacagaccgcctgcacatccagaacccgtccttctcccagatcaaccagctggtgtccaccatcatgtcggccagcaccaccaccctgcgctaccccggctacatgaacaatgacctcatcggcctcatcgcctcgctcattcccaccccacggctccacttcctcatgaccggctacaccccgctcactacagaccagtcagtggccagcgtgaggaagaccacggtcctggatgtcatgaggcggctgctgcagcccaagaacgtgatggtgtccacaggccgagaccgccagaccaaccactgctacatcgccatcctcaacatcatccagggagaggtggaccccacccaggtccacaagagcctgcagaggatccgggaacggaagttggccaacttcatcccgtggggccccgccagcatccaggtggccctgtcgaggaagtctccctacctgccctcggcccaccgggtcagcgggctcatgatggccaaccacaccagcatctcctcgctctttgaaagttcctgccagcagtttgacaagctgcggaagcgggatgccttcctcgagcagttccgtaaggaggacatgttcaaggacaactttgatgagatggacaggtctagggaggttgttcaggagctcattgatgagtaccatgcggccacccagccagactacatttcctggggcacccaggagcagtgatttccctccccactactccttctccttctagatggtaaccacagcctcgaccatgcctgctccctctgacccagcttcacctcatggacaacccttcttggttcatctccagcccgtgagctggtcctgcttcctcccttccatgccctaacttttaatatgcttgttcagctctaataaagtaataaagcttggttgtcagtata

SEQ ID NO: 293519 - DNA, 1707 bp, Homo sapiens
ttcagcaggatccccttcgactggtgctctgagggttggaatttacaggcccacccctcacctctggggaagggagaggggatgaagattgagtagagcaccaattgccaatgatttaatcggtcatgcctgtgtaatgaagcctccataaaaatccaaaaggactgagtttgggggcttccaggaaggtgaacaagaacacatccacaggccaggagggtgcaaacccaacgccacagggcagcaactcctatgcgccggacccttctagagcttcccctcggtatctcttcatctggctgtttatttgtatcctttaaaatatcctttataacaaatggatgaacgtaagtaagtgtctccttgagttctgtgagctactctaacaaattaattgaacccaaggagcagtcctgagaacctcgatttatagccggttggtcagaggcacagataaaacaacctgaagcttgtgttggcattggaagtgggagagtcttgtgggactgagccttcactctgtgggatctgatgctatcttcagggcttcgtgctgtgtcactccatcgctgggggtacgggttctggcctgggctcctacctcctggagcgactgaatgacaggtaccccaagaagctagtgcagacttattcagtgtttccctaccaggacgagatgagcgacgtagtggttcagccctacaattcactcctgacactcaagaggctgacgcagaacgcagattgtgtggtggtgctggacaacacagccctgaaccggattgccacagaccgcctgcacatccagaacccgtccttctcccagatcaaccagctggtgtccaccatcatgtcggccagcaccaccaccctgcgctaccccggctacatgaacaatgacctcatcggcctcatcgcctcgctcattcccaccccacggctccacttcctcatgaccggctacaccccgctcactacagaccagtcagtggccagcgtgaggaagaccacggtcctggatgtcatgaggcggctgctgcagcccaagaacgtgatggtgtccacaggccgagaccgccagaccaaccactgctacatcgccatcctcaacatcatccagggagaggtggaccccacccaggtccacaagagcctgcagaggatccgggaacggaagttggccaacttcatcccgtggggccccgccagcatccaggtggccctgtcgaggaagtctccctacctgccctcggcccaccgggtcagcgggctcatgatggccaaccacaccagcatctcctcgctctttgaaagttcctgccagcagtttgacaagctgcggaagcgggatgccttcctcgagcagttccgtaaggaggacatgttcaaggacaactttgatgagatggacaggtctagggaggttgttcaggagctcattgatgagtaccatgcggccacccagccagactacatttcctggggcacccaggagcagtgatttccctccccactactccttctccttctagatggtaaccacagcctcgaccatgcctgctccctctgacccagcttcacctcatggacaacccttcttggttcatctccagcccgtgagctggtcctgcttcctcccttccatgccctaacttttaatatgcttgttcagctctaataaagtaataaagcttggttgtcagtata

SEQ ID NO: 293520 - DNA, 1946 bp, Homo sapiens
atgtttttacaaaaaatcaggtttggtatctggtccggaattcccgggatgctgagcgactgctgagggagaaaatgatgcccaggttgggctccccggcccaccggccgaggagaggcctgcgctgcacacgcgcagaccgagcatccgcgtcaagaggcgaagagagcgcgcgctccccacgtcctgcgctcctggctgccgggcattcgtctcagccgtgactctcgccaggccggggctggcgcgcccacgtctgaagagcgatgccccgggagatcatcaccctgcagctgggccagtgcggcaaccagattgggttcgagttctggaaacagctgtgcgccgagcatggtatcagccccgagggcatcgtggaggaattcgccaccgagggcactgaccgcaaggacgtctttttctaccaggcagacgatgagcactacatcccccgggccgtgctgctggacttggaaccccgggtgatccactccatcctcaactccccctatgccaagctctacaacccagagaacatctacctgtcggaacatggaggaggagctggcaacaactgggccagcggattctcccagggtgagaaaattcatgaagacatctttgacatcatagaccgagaagcagatggaagtgacagtttggagggcttcgtgctgtgtcactccatcgctgggggtacgggttctggcctgggctcctacctcctggagcgactgaatgacaggtaccccaagaagctagtgcagacttattcagtgtttccctaccaggacgagatgagcgacgtagtggttcagccctacaattcactcctgacactcaagaggctgacgcagaacgcagattgtgtggtggtgctggacaacacagccctgaaccggattgccacagaccgcctgcacatccagaacccgtccttctcccagatcaaccagctggtgtccaccatcatgtcggccagcaccaccaccctgcgctaccccggctacatgaacaatgacctcatcggcctcatcgcctcgctcattcccaccccacggctccacttcctcatgaccggctacaccccgctcactacagaccagtcagtggccagcgtgaggaagaccacggtcctggatgtcatgaggcggctgctgcagcccaagaacgtgatggtgtccacaggccgagaccgccagaccaaccactgctacatcgccatcctcaacatcatccagggagaggtggaccccacccaggtccacaagagcctgcagaggatccgggaacggaagttggccaacttcatcccgtggggccccgccagcatccaggtggccctgtcgaggaagtctccctacctgccctcggcccaccgggtcagcgggctcatgatggccaaccacaccagcatctcctcggtgagtctaggtttctattcttcttagaagagtctgttccactggccaccttcatcatcttccccaagttcactcctaaccccctggctcgcattttggagattttcatctctttcagctctttgaaagttcctgccagcagtttgacaagctgcggaagcgggatgccttcctcgagcagttccgtaaggaggacatgttcaaggacaactttgatgagatggacaggtctagggaggttgttcaggagctcattgatgagtaccatgcggccacccagccagactacatttcctggggcacccaggagcagtgatttccctccccactactccttctccttctagatggtaaccacagcctcgaccatgcctgctccctctgacccagcttcacctcatggacaacccttcttggttcatctccagcccgtgagctggtcctgcttcctcccttccatgccctaacttttaatatgcttgttcagctctaataaagtaataaagcttggttgtcagtata

SEQ ID NO: 293521 - DNA, 1238 bp, Homo sapiens
gggaggggatctacagagtttgaagctttcaggcttatcctttttggctctgaagactcagttctgccctcaccccttttgtacaaaatggcacatatgggcagtgatggaggggtccttccggttcactatgccaccatcctcttttctctcaggtaccccaagaagctagtgcagacttattcagtgtttccctaccaggacgagatgagcgacgtagtggttcagccctacaattcactcctgacactcaagaggctgacgcagaacgcagattgtgtggtggtgctggacaacacagccctgaaccggattgccacagaccgcctgcacatccagaacccgtccttctcccagatcaaccagctggtgtccaccatcatgtcggccagcaccaccaccctgcgctaccccggctacatgaacaatgacctcatcggcctcatcgcctcgctcattcccaccccacggctccacttcctcatgaccggctacaccccgctcactacagaccagtcagtggccagcgtgaggaagaccacggtcctggatgtcatgaggcggctgctgcagcccaagaacgtgatggtgtccacaggccgagaccgccagaccaaccactgctacatcgccatcctcaacatcatccagggagaggtggaccccacccaggtccacaagagcctgcagaggatccgggaacggaagttggccaacttcatcccgtggggccccgccagcatccaggtggccctgtcgaggaagtctccctacctgccctcggcccaccgggtcagcgggctcatgatggccaaccacaccagcatctcctcgctctttgaaagttcctgccagcagtttgacaagctgcggaagcgggatgccttcctcgagcagttccgtaaggaggacatgttcaaggacaactttgatgagatggacaggtctagggaggttgttcaggagctcattgatgagtaccatgcggccacccagccagactacatttcctggggcacccaggagcagtgatttccctccccactactccttctccttctagatggtaaccacagcctcgaccatgcctgctccctctgacccagcttcacctcatggacaacccttcttggttcatctccagcccgtgagctggtcctgcttcctcccttccatgccctaacttttaatatgcttgttcagctctaataaagtaataaagcttggttgtcagtata

SEQ ID NO: 293522 - DNA, 1129 bp, Homo sapiens
ccaccggcaggttgtactcacggcagatggtagtgaccgtttggaggtaccccaagaagctagtgcagacttattcagtgtttccctaccaggacgagatgagcgacgtagtggttcagccctacaattcactcctgacactcaagaggctgacgcagaacgcagattgtgtggtggtgctggacaacacagccctgaaccggattgccacagaccgcctgcacatccagaacccgtccttctcccagatcaaccagctggtgtccaccatcatgtcggccagcaccaccaccctgcgctaccccggctacatgaacaatgacctcatcggcctcatcgcctcgctcattcccaccccacggctccacttcctcatgaccggctacaccccgctcactacagaccagtcagtggccagcgtgaggaagaccacggtcctggatgtcatgaggcggctgctgcagcccaagaacgtgatggtgtccacaggccgagaccgccagaccaaccactgctacatcgccatcctcaacatcatccagggagaggtggaccccacccaggtccacaagagcctgcagaggatccgggaacggaagttggccaacttcatcccgtggggccccgccagcatccaggtggccctgtcgaggaagtctccctacctgccctcggcccaccgggtcagcgggctcatgatggccaaccacaccagcatctcctcgctctttgaaagttcctgccagcagtttgacaagctgcggaagcgggatgccttcctcgagcagttccgtaaggaggacatgttcaaggacaactttgatgagatggacaggtctagggaggttgttcaggagctcattgatgagtaccatgcggccacccagccagactacatttcctggggcacccaggagcagtgatttccctccccactactccttctccttctagatggtaaccacagcctcgaccatgcctgctccctctgacccagcttcacctcatggacaacccttcttggttcatctccagcccgtgagctggtcctgcttcctcccttccatgccctaacttttaatatgcttgttcagctctaataaagtaataaagcttggttgtcagtata

SEQ ID NO: 293523 - DNA, 1550 bp, Homo sapiens
ttgtaattcagatgcttcttgatttaagatgggattatgtgctgataaacccatcataaagccaaaacatcttaaattaaaccatcctaagtcagggacagtctgtaggtagtccagaattgaagtgaattagtggatacccagctggcatctactgtagaattgactgcttacctgatgtgtgtggtaagaccccacccatctggtatcagaattgtgttgtgagagtgtggcaggagaaactgagtctgtttattcctgtatacacacagggcttcgtgctgtgtcactccatcgctgggggtacgggttctggcctgggctcctacctcctggagcgactgaatgacaggtaccccaagaagctagtgcagacttattcagtgtttccctaccaggacgagatgagcgacgtagtggttcagccctacaattcactcctgacactcaagaggctgacgcagaacgcagattgtgtggtggtgctggacaacacagccctgaaccggattgccacagaccgcctgcacatccagaacccgtccttctcccagatcaaccagctggtgggcccccactcccggactcctttggactggaagccctccttgctggagggtcatctggggaaggaaggtcccacccaggccgagccccatgacatggcacgcctgtccccaggtgtccaccatcatgtcggccagcaccaccaccctgcgctaccccggctacatgaacaatgacctcatcggcctcatcgcctcgctcattcccaccccacggctccacttcctcatgaccggctacaccccgctcactacagaccagtcagtggccagcgtgaggaagaccacggtcctggatgtcatgaggcggctgctgcagcccaagaacgtgatggtgtccacaggccgagaccgccagaccaaccactgctacatcgccatcctcaacatcatccagggagaggtggaccccacccaggtccacaagagcctgcagaggatccgggaacggaagttggccaacttcatcccgtggggccccgccagcatccaggtggccctgtcgaggaagtctccctacctgccctcggcccaccgggtcagcgggctcatgatggccaaccacaccagcatctcctcgctctttgaaagttcctgccagcagtttgacaagctgcggaagcgggatgccttcctcgagcagttccgtaaggaggacatgttcaaggacaactttgatgagatggacaggtctagggaggttgttcaggagctcattgatgagtaccatgcggccacccagccagactacatttcctggggcacccaggagcagtgatttccctccccactactccttctccttctagatggtaaccacagcctcgaccatgcctgctccctctgacccagcttcacctcatggacaacccttcttggttcatctccagcccgtgagctggtcctgcttcctcccttccatgccctaacttttaatatgcttgttcagctctaataaagtaataaagcttggttgtcagtata

SEQ ID NO: 293524 - DNA, 1332 bp, Homo sapiens
atgtttttacaaaaaatcaggtttggtatctggtccggaattcccgggatgctgagcgactgctgagggagaaaatgatgcccaggttgggctccccggcccaccggccgaggagaggcctgcgctgcacacgcgcagaccgagcatccgcgtcaagaggcgaagagagcgcgcgctccccacgtcctgcgctcctggctgccgggcattcgtctcagccgtgactctcgccaggccggggctggcgcgcccacgtctgaagagcgatgccccgggagatcatcaccctgcagctgggccagtgcggcaaccagattgggttcgagttctggaaacagctgtgcgccgagcatggtatcagccccgagggcatcgtggaggaattcgccaccgagggcactgaccgcaaggacgtctttttctaccaggcagacgatgagcactacatcccccgggccgtgctgctggacttggaaccccgggtgatccactccatcctcaactccccctatgccaagctctacaacccagagaacatctacctgtcggaacatggaggaggagctggcaacaactgggccagcggattctcccagggtgagaaaattcatgaagacatctttgacatcatagaccgagaagcagatggaagtgacagtttggagggcttcgtgctgtgtcactccatcgctgggggtacgggttctggcctgggctcctacctcctggagcgactgaatgacaggtaccccaagaagctagtgcagacttattcagtgtttccctaccaggacgagatgagcgacgtagtggttcagccctacaattcactcctgacactcaagaggctgacgcagaacgcagattgtgtggtggtgctggacaacacagccctgaaccggattgccacagaccgcctgcacatccagaacccgtccttctcccagatcaaccagctggtgtccaccatcatgtcggccagcaccaccaccctgcgctaccccggctacatgaacaatgacctcatcggcctcatcgcctcgctcattcccaccccacggctccacttcctcatgaccggctacaccccccagactacatttcctggggcacccaggagcagtgatttccctccccactactccttctccttctagatggtaaccacagcctcgaccatgcctgctccctctgacccagcttcacctcatggacaacccttcttggttcatctccagcccgtgagctggtcctgcttcctcccttccatgccctaacttttaatatgcttgttcagctctaataaagtaataaagcttggttgtcagtata

SEQ ID NO: 293525 - DNA, 838 bp, Homo sapiens
aagcttacgaggaattcttggatgacatccctcagcatgtctgagcgactgctgagggagaaaatgatgcccaggttgggctccccggcccaccggccgaggagaggcctgcgctgcacacgcgcagaccgagcatccgcgtcaagaggcgaagagagcgcgcgctccccacgtcctgcgctcctggctgccgggcattcgtctcagccgtgactctcgccaggccggggctggcgcgcccacgtctgaagagcgatgccccgggagatcatcaccctgcagctgggccagtgcggcaaccagattgggttcgagttctggaaacagctgtgcgccgagcatggtatcagccccgagggcatcgtggaggaattcgccaccgagggcactgaccgcaaggacgtctttttctaccaggcagacgatgagcactacatcccccgggccgtgctgctggacttggaaccccgggtgatccactccatcctcaactccccctatgccaagctctacaacccagagaacatctacctgtcggaacatggaggaggagctggcaacaactgggccagcggattctcccaggtgtcctagcgaccattccagagacctttgatattcccatccagagggtgagaaaattcatgaagacatctttgacatcatagaccgagaagcagatggaagtgacagtttggaggtgaagttatggagtgggggaaggaatgggcagggaggccgaagagtgctggggacaggtcaggaggtggcctggataggtaatatgaggggagcaattcaattcctttgttctcaaggaagtcataaatctgaatgg

SEQ ID NO: 293526 - DNA, 585 bp, Homo sapiens
gtaggggaggccccttcatcccgcgccctggacctgcaggggtagaggagaggccacctccactgctcctatgcccaccccaggtccacaagagcctgcagaggatccgggaacggaagttggccaacttcatcccgtggggccccgccagcatccaggtggccctgtcgaggaagtctccctacctgccctcggcccaccgggtcagcgggctcatgatggccaaccacaccagcatctcctcggtgagtctaggtttctattcttcttagaagagtctgttccactggccaccttcatcatcttccccaagttcactcctaaccccctggctcgcattttggagattttcatctctttcagctctttgaaagttcctgccagcagtttgacaagctgcggaagcgggatgccttcctcgagcagttccgtaaggaggacatgttcaaggacaactttgatgagatggacaggtctagggaggttgttcaggagctcattgatgagtaccatgcggccacccagccagactacatttcctggggcacccaggagcagtgatttccctccccactactccttctc

SEQ ID NO: 293527 - DNA, 319 bp, Homo sapiens
ggagaggcctgcgctgcacacgcgcagaccgagcatccgcgtcaagaggcgaagagagcgcgcgctccccacgtcctgcgctcctggctgccgggcattcgtctcagccgtgactctcgccaggccggggctggcgcgcccacgtctgaagagcgatgccccgggagatcatcaccctgcagctgggccagtgcggcaaccagagtgagcaagcgagcgccggccccgccggtctctggttctgccccttcgggtcccacccaagtgcctggcttccaccagtccccctttcccttccatgaaccccctgccctgctgc

SEQ ID NO: 293528 - DNA, 643 bp, Homo sapiens
ttcaaccaaacctgagcttatgttaaagaggcgatttttggaaagtcccagatagccactggatggggggctggttgccaggggaacaaacctggtgctctgagggttggaatttacaggcccacccctcacctctggggaagggagaggggatgaagattgagtagagcaccaattgccaatgatttaatcggtcatgcctgtgtaatgaagcctccataaaaatccaaaaggactgagtttgggggcttccaggaaggtgaacaagaacacatccacaggccaggagggtgcaaacccaacgccacagggcagcaactcctatgcgccggacccttctagagcttcccctcggtatctcttcatctggctgtttatttgtatcctttaaaatatcctttataacaaatggatgaacgtaagtaagtgtctccttgagttctgtgagctactctaacaaattaattgaacccaaggagcagtcctgagaacctcgatttatagccggttggtcagaggcacagataaaacaacctgaagcttgtgttggcattggaagtgggagagtcttgtgggactgagccttcactctgtgggatctgatgctatcttcaggtacagatactcctcaacttacaatggg

SEQ ID NO: 293529 - DNA, 383 bp, Homo sapiens
aaactaacaaacctacttcctggctttggagttcagcaggggctaagccaatatcttatttctatgcccattttatcctcaagatgctgtgatgctcttctgtccccccaggtggtgctggacaacacagccctgaaccggattgccacagaccgcctgcacatccagaacccgtccttctcccagatcaaccagctggtgggcccccactcccggactcctttggactggaagccctccttgctggagggtcatctggggaaggaaggtcccacccaggccgagccccatgacatggcacgcctgtccccaggtgtccaccatcatgtcggccagcaccaccaccctgcgctaccccggctacatgaacaatgacctcatcg

SEQ ID NO: 293530 - DNA, 2076 bp, Homo sapiens
acatgcgtcccgagcccgccagaagctgctaggctgaggctgctgtcccggcgggagctgtggcgcggagcggcccctctgctgcgtctgccctcgttttgtctcacgactcacactcagtgctccattccccaagagttcgcgttccccgcgcggcggtcgagaggcggctgcccgcggtcccgcgcgggcgcggggcgatggcggcgcgggggtcagggccccgcgcgctccgcctgctgctcttggtccagctggtcgcggggcgctgcggtctagcgggcgcggcgggcggcgcgcagagaggattatctgaaccttcttctattgcaaaacatgaagatagtttgcttaaggatttatttcaagactacgaaagatgggttcgtcctgtggaacacctgaatgacaaaataaaaataaaatttggacttgcaatatctcaattggtggatgtggatgagaaaaatcagttaatgacaacaaacgtctggttgaaacaggaatggatagatgtaaaattaagatggaaccctgatgactatggtggaataaaagttatacgtgttccttcagactctgtctggacaccagacatcgttttgtttgataatgcagatggacgttttgaagggaccagtacgaaaacagtcatcaggtacaatggcactgtcacctggactccaccggcaaactacaaaagttcctgtaccatagatgtcacgtttttcccatttgaccttcagaactgttccatgaaatttggttcttggacttatgatggatcacaggttgatataattctagaggaccaagatgtagacaagagagatttttttgataatggagaatgggagattgtgagtgcaacagggagcaaaggaaacagaaccgacagctgttgctggtatccgtatgtcacttactcatttgtaatcaagcgcctgcctctcttttataccttgttccttataataccctgtattgggctctcatttttaactgtacttgtcttctatcttccttcaaatgaaggtgaaaagatttgtctctgcacttcagtacttgtgtctttgactgtcttccttctggttattgaagagatcataccatcatcttcaaaagtcatacctctaattggagagtatctggtatttaccatgatttttgtgacactgtcaattatggtaaccgtcttcgctatcaacattcatcatcgttcttcctcaacacataatgccatggcgcctttggtccgcaagatatttcttcacacgcttcccaaactgctttgcatgagaagtcatgtagacaggtacttcactcagaaagaggaaactgagagtggtagtggaccaaaatcttctagaaacacattggaagctgcgctcgattctattcgctacattacaagacacatcatgaaggaaaatgatgtccgtgaggttgttgaagattggaaattcatagcccaggttcttgatcggatgtttctgtggacttttcttttcgtttcaattgttggatctcttgggctttttgttcctgttatttataaatgggcaaatatattaataccagttcatattggaaatgcaaataagtgaagcctcccaagggactgaagtatacatttagttaacacacatatatctgatggcacctataaaattatgaaaatgtaagttatgtgttaaatttagtgcaagctttaacagactaagttgctaacctcaatttatgttaacagatgatccatttgaacagttggctgtatgactgaagtaataactgatgagatacatttgatcttgtaaaaatagcaaaatattatctgaactggactagtgaaaaatctagtatttgtatcctggcaaataatactaatttataatccacagtaaagttcatcctttgactgtgctggagaattccagttgtatttgaagactgattttaaaacttttctgcatttggtaaaggtatgtaaactttcctgcactcactgagtaacagctaatctttaatataatattatactgctatatttaaaaagctgactacttgatataatta

SEQ ID NO: 293531 - DNA, 804 bp, Homo sapiens
cgcatcttgctcccatcaggatatattccagaaatgctaagtgttgatcaacattaggaaatctgtgaatataagtgagagcactgtagcagttgaaaggttagattacatgaccatcttgatagacgctgaaaaggcatgataaaattggttttttgatttaaaacaaacattagcatacaaggatgaataaaaaagaatctgaacatgataaaacatggttatcagaaacaaacagccaatactagagacacttaaccttagtccacaggaacctgatgggacgaagagcgcccccatcagcatcttggataactctaaagaaaatttagtgttatattctaaggaataatcctgccatatttcttggctctgacctgatgaattgttttaatttcttggggtgagggcagtgggtgaactgttttaattttgtcttcagtaactttgtttctaaattgtgataatctgtaggcagaactccattataacagttaatggagttatcaaaagttcttttaggctgggcgcagtggcttcatgcctgtaatcccaccactttgggaggccgaggtgggtggatcatttgaggtcaggagtttgagatcagcctggtcaacatggtgaaactccatttctactaaaaatacaaaaattagctgggcatggtggcacatgcctatagtcacagctactcgggaggctggggcaggagaatcgcttgaacccaggaggcggagattgcagtgagccgagatcacgccattgcactccagcctgggcgaccgagcaagactccgtctc

SEQ ID NO: 293532 - DNA, 587 bp, Homo sapiens
tgcgtccatcagtagtaaaaaccggttaatttttaccctttgcaggaattgctgatgggagcaaactgcgcgcatccccccatcagcatcttggataactctaaagaaaatttagtgttatattctaaggaataatcctgccatatttcttggctctgacctgatgaattgttttaatttcttggggtgagggcagtgggtgaactgttttaattttgtcttcagtaactttgtttctaaattgtgataatctgtaggcagaactccattataacagttaatggagttatcaaaagttcttttaggctgggcgcagtggcttcatgcctgtaatcccaccactttgggaggccgaggtgggtggatcatttgaggtcaggagtttgagatcagcctggtcaacatggtgaaactccatttctactaaaaatacaaaaattagctgggcatggtggcacatgcctatagtcacagctactcgggaggctggggcaggagaatcgcttgaacccaggaggcggagattgcagtgagccgagatcacgccattgcactccagcctgggcgaccgagcaagactccgtctc

SEQ ID NO: 293533 - DNA, 1538 bp, Homo sapiens
acatgcgtcccgagcccgccagaagctgctaggctgaggctgctgtcccggcgggagctgtggcgcggagcggcccctctgctgcgtctgccctcgttttgtctcacgactcacactcagtgctccattccccaagagttcgcgttccccgcgcggcggtcgagaggcggctgcccgcggtcccgcgcgggcgcggggcgatggcggcgcgggggtcagggccccgcgcgctccgcctgctgctcttggtccagctggtcgcggggcgctgcggtctagcgggcgcggcgggcggcgcgcagagaggattatctgaaccttcttctattgcaaaacatgaagatagtttgcttaaggatttatttcaagactacgaaagatgggttcgtcctgtggaacacctgaatgacaaaataaaaataaaatttggacttgcaatatctcaattggtggatgtggatgagaaaaatcagttaatgacaacaaacgtctggttgaaacaggaatggatagatgtaaaattaagatggaaccctgatgactatggtggaataaaagttatacgtgttccttcagactctgtctggacaccagacatcgttttgtttgataatgcagatggacgttttgaagggaccagtacgaaaacagtcatcaggtacaatggcactgtcacctggactccaccggcaaactacaaaagttcctgtaccatagatgtcacgtttttcccatttgaccttcagaactgttccatgaaatttggttcttggacttatgatggatcacaggttgatataattctagaggaccaagatgtagacaagagagatttttttgataatggagaatgggagattgtgagtgcaacagggagcaaaggaaacagaaccgacagctgttgctggttgttgaagattggaaattcatagcccaggttcttgatcggatgtttctgtggacttttcttttcgtttcaattgttggatctcttgggctttttgttcctgttatttataaatgggcaaatatattaataccagttcatattggaaatgcaaataagtgaagcctcccaagggactgaagtatacatttagttaacacacatatatctgatggcacctataaaattatgaaaatgtaagttatgtgttaaatttagtgcaagctttaacagactaagttgctaacctcaatttatgttaacagatgatccatttgaacagttggctgtatgactgaagtaataactgatgagatacatttgatcttgtaaaaatagcaaaatattatctgaactggactagtgaaaaatctagtatttgtatcctggcaaataatactaatttataatccacagtaaagttcatcctttgactgtgctggagaattccagttgtatttgaagactgattttaaaacttttctgcatttggtaaaggtatgtaaactttcctgcactcactgagtaacagctaatctttaatataatattatactgctatatttaaaaagctgactacttgatataatta

SEQ ID NO: 293534 - DNA, 2179 bp, Homo sapiens
acatgcgtcccgagcccgccagaagctgctaggctgaggctgctgtcccggcgggagctgtggcgcggagcggcccctctgctgcgtctgccctcgttttgtctcacgactcacactcagtgctccattccccaagagttcgcgttccccgcgcggcggtcgagaggcggctgcccgcggtcccgcgcgggcgcggggcgatggcggcgcgggggtcagggccccgcgcgctccgcctgctgctcttggtccagctggtcgcggggcgctgcggtctagcgggcgcggcgggcggcgcgcagagaggattatctgaaccttcttctattgcaaaacatgaagatagtttgcttaaggatttatttcaagactacgaaagatgggttcgtcctgtggaacacctgaatgacaaaataaaaataaaatttggacttgcaatatctcaattggtggatgtggatgagaaaaatcagttaatgacaacaaacgtctggttgaaacaggaatggatagatgtaaaattaagatggaaccctgatgactatggtggaataaaagttatacgtgttccttcagactctgtctggacaccagacatcgttttgtttgataatgcagatggacgttttgaagggaccagtacgaaaacagtcatcaggtacaatggcactgtcacctggactccaccggcaaactacaaaagttcctgtaccatagatgtcacgtttttcccatttgaccttcagaactgttccatgaaatttggttcttggacttatgatggatcacaggttgatataattctagaggaccaagatgtagacaagagagatttttttgataatggagaatgggagattgtgagtgcaacagggagcaaaggaaacagaaccgacagctgttgctggtatccgtatgtcacttactcatttgtaatcaagcgcctgcctctcttttataccttgttccttataataccctgtattgggctctcatttttaactgtacttgtcttctatcttccttcaaatgaaggtgaaaagatttgtctctgcacttcagtacttgtgtctttgactgtcttccttctggttattgaagagatcataccatcatcttcaaaagtcatacctctaattggagagtatctggtatttaccatgatttttgtgacactgtcaattatggtaaccgtcttcgctatcaacattcatcatcgttcttcctcaacacataatgccatggcgcctttggtccgcaagatatttcttcacacgcttcccaaactgctttgcatgagaagtcatgtagacaggtacttcactcagaaagaggaaactgagagtggtagtggaccaaaatcttctagaaacacattggaagctgcgctcgattctattcgctacattacaagacacatcatgaaggaaaatgatgtccgtgaggtctgtgatgtgtatttacaaatgcagatcttcttccattttaagttcagaagttactttcattaattttggcagagtaaacagcatgacccttaagtaagactaagcatagattgagggccagaattgttgacatattttctataaaagatctttactaaggcttgtttcagttaaagcacctgcaaaatggggcatttacacaaatctcacttctccacttcccccatcagcatcttggataactctaaagaaaatttagtgttatattctaaggaataatcctgccatatttcttggctctgacctgatgaattgttttaatttcttggggtgagggcagtgggtgaactgttttaattttgtcttcagtaactttgtttctaaattgtgataatctgtaggcagaactccattataacagttaatggagttatcaaaagttcttttaggctgggcgcagtggcttcatgcctgtaatcccaccactttgggaggccgaggtgggtggatcatttgaggtcaggagtttgagatcagcctggtcaacatggtgaaactccatttctactaaaaatacaaaaattagctgggcatggtggcacatgcctatagtcacagctactcgggaggctggggcaggagaatcgcttgaacccaggaggcggagattgcagtgagccgagatcacgccattgcactccagcctgggcgaccgagcaagactccgtctc

SEQ ID NO: 293535 - DNA, 879 bp, Homo sapiens
ttccccttcctttgtttccctcaagaggccactggagcattacatgactttctttctttaactctgcctgtgataagcaggaggaagaggactctgatgaagaccgtccacagggaagccaacaaccttctttggcagatccagcatctcaccttcctgttggtgaccacctcacctactctaatgagactgagcctgttagggcccttttaccagatgaaaagaaagaagtaaaaccaccagctctctccatgtctaatttacatgaggctaccatgtgagtatgaatcctaagtgtggagtctcctcttaactccttctggtctgataccagtatatgaagtagagctggcctttgaaaatgctggactcaaaggggtgggtcaacagttctcagggcctttatcctagtctcttacatttagatgagatagtttttccactagaaatccacttggtagtaagcaaatgacttgccctttgtctcttaaatagcccttcagatataagccatttggattttcattaatattatcattatcattattattatcattattcagtagctggcattcctcatgataatttggccttctttggtttgtatcttacagcccagattatgagatttaatttaatttaatttaagttgacagaagtgtctgtcagagaaagcaagtagaaaatcatttttttggtggtggttctaaagcagttattcctaacttttcaaggggtgttgggacttttttgaaaccaatagaatcattttaagaaaatgcccatgtataatttcaagttcacagaatctctgaaaccatacatgagtttgggtatgcttgtgtatataccagattcctgctctagagtatatgactt

SEQ ID NO: 293536 - DNA, 545 bp, Homo sapiens
ataatgaatgcttatgatctttatttaggaacatgacagtctcaagccctctgtcacttctaagtcttgatgatttgtctcatttgcccagacccctcaccagtccacaaagatgggcagaatgaggccgacagtgcaccagaagacctccactctgtggggaccagcaggctgctctatcacatcactgatggtgataacccactgctgtcgccacgatgctccatcttcagccaaagccagagattcaacttagaccccgagtcagccccatctccacccagcactcagcagtttatgatgtgagaaaactgttttgttattgtcttcatttcatacagtttttcaaataccacatttataagctacaatgaagtgtgactgaagtagcacaaatgtgcctgcctaacgcaactgcgagactggaacaataaatgacaaaaattagtgtacttgctagttggggatgccattgcaggccttgatacctcaagaggaaatggtcatgagagacaggatagcccagcggctcacatgtttgaaca

SEQ ID NO: 293537 - DNA, 710 bp, Homo sapiens
gccccgccgccgcgccccgcccagctctgtccccgcagcctcgcgggctgccgggctttgtggttcgcccgtgccgctgggcccctgctgggggtgtcgttacgagcatgtgcagacagcagcccaagccttcaggataattccttcagcagcaccactgtaacagagtgtgacgaagatccagtctctctacatgaagaccagactgattgctccagtctcagagatgaaaacaataaagagaactaccccgacgcaggggctctggtagaagagcacgcgccgccctcttgggagccgcagcagcagaatgtagaggcgaccgtgctggtggacagcgtattgcgacccagcatgggcaacttcaagtccaggaagcccaagtccatcttcaaagcggagagcgggaggagccacggagaaagtcaggagacagagcatgtggtatccagccagtcagagtgtcaggtgagagcaggaacaccagctcatgagagtccacaaaacaatgccttcaagtgccaagaaacagtgcgacttcaaccaagaatagaccagaggactgccatttcgccaaaggatgcttttgaaactcggcaggacttaaatgagggggtgaactatatagattgacccacattctttcacacagtttctgttatggccaaaatttgggagaccagaaaagaccttggggaaacttgaaggac

SEQ ID NO: 293538 - DNA, 2832 bp, Homo sapiens
gccccgccgccgcgccccgcccagctctgtccccgcagcctcgcgggctgccgggctttgtggttcgcccgtgccgctgggcccctgctgggggtgtcgttacgagcatgtgcagacagcagcccaagccttcaggataattccttcagcagcaccactgtaacagagtgtgacgaagatccagtctctctacatgaagaccagactgattgctccagtctcagagatgaaaacaataaagagaactaccccgacgcaggggctctggtagaagagcacgcgccgccctcttgggagccgcagcagcagaatgtagaggcgaccgtgctggtggacagcgtattgcgacccagcatgggcaacttcaagtccaggaagcccaagtccatcttcaaagcggagagcgggaggagccacggagaaagtcaggagacagagcatgtggtatccagccagtcagagtgtcaggtgagagcaggaacaccagctcatgagagtccacaaaacaatgccttcaagtgccaagaaacagtgcgacttcaaccaagaatagaccagaggactgccatttcgccaaaggatgcttttgaaactcggcaggacttaaatgaggaagaagctgctcaggtgcatggagtcaaggacccggcgccagcatcaacccagagcgtgcttgccgatgggacagattctgcagacccctcaccagtccacaaagatgggcagaatgaggccgacagtgcaccagaagacctccactctgtggggaccagcaggctgctctatcacatcactgatggtgataacccactgctgtcgccacgatgctccatcttcagccaaagccagagattcaacttagaccccgagtcagccccatctccacccagcactcagcagtttatgatgccgcggagttcttcacgctgcagctgtggagatggcaaggagccacagaccatcacccagctcaccaagcacatccagagcctcaagcggaaaattcggaaatttgaagaaaaatttgaacaagaaaagaaataccggccttcacatggtgacaagacttctaatcctgaagtcctgaaatggatgaatgatttggctaaaggtcgtaaacagctcaaagaactaaagctaaagctgtcagaagaacaagggagtgctcccaaaggtccacctagaaacctgttgtgtgagcaacccacagtccccagagaaaatgggaaaccggaagctgcgggcccggagccaagctcctctggagaagagactccagatgctgccttgacatgcctgaaggagagaagagagcaacttcctccccaggaggattctaaggtaactaagcaagacaagaacctcataaagccgctttatgaccgatacagaattatcaagcaaatcttgtcaacaccttcccttattccaacaattcaggaggaagaggactctgatgaagaccgtccacagggaagccaacaaccttctttggcagatccagcatctcaccttcctgttggtgaccacctcacctactctaatgagactgagcctgttagggcccttttaccagatgaaaagaaagaagtaaaaccaccagctctctccatgtctaatttacatgaggctaccatgcctgtacttcttgaccatctccgagaaactagggctgacaagaagagactgcggaaagccttaagagaatttgaagaacagttttttaaacaaacaggaagaagtccacaaaaggaagataggataccaatggcagatgagtattatgaatataagcacataaaagccaaactgagactattagaggtcctcatcagcaagcaagatgtggccaaaactatttgaggttcaggaaatgttatgatcactttcacccatgatataaagtaaagtttattttcctctgccatccttgctaagtagttttgacacaatgaaaatggaagcactttagtggtagtattagctgtttttaagaaggaatagcaagtttaattatatacaaggagaagggatttaaacggggggaagaatacaacaggtagccatataattgggaaaaaattcagtgtcctccatgccaagcagaaaactcatagtcaatacaagtatttttaaaaatgtctaatattttatcaaatctaaataacatagctaggacacttgttagggaaagtttatttagtatccaaagactgtttatgttgatgtatggaaaagagcatgattttaaaaaatcaatcataggaggaaaagaaattcgcttttcaagtaggaaggaatacagctagcaagaaagcaatttatttgaaacttctaatggatttttgagtgataaaacatttactaccttgtcctttaagtctgctaggctctcagtaccctaaaataaactagattgtgttgctattttttttctttctctataaaaataacacattattttatccgttatttgaaattttacatttctggttaccaaagttcattctgatagcatgtactttgtgaattattatctttgtctataactgacagatgtttatattaaaataaaatattgtattaaaaatttaaaataggtattttggatagatatgtgtctgtagtatataatctaatgtgtccatagtattattgctaatcttttggtttactataagatgatataactattttttcattgggaatatacatttttcttaatgttccaacatctatactttgtaaagtcaaaacatttcccatgagctgtagttattcatccttctgtacaaaatgaaaagtttggaaattgtttgccctgataccttg

SEQ ID NO: 293539 - DNA, 2585 bp, Homo sapiens
acctggtaactagcagaacctaaaacatctgaaaaaggcaagcacaagttctctgatactgcattgtgctccctttatgagtgctttgtccatttatgcccaaggttgcaatgttttgaatttttgcaatcagaccttggcaatgactttgagcagtaggatataaataactcccacatgcttcgcgttccaataatggaacactaggcataaatgggttagagtgagaggataatagcatctctttaatggaaagaatattactgtaactctattctgaagactccattttgagtgctctttgtgtttatagaataaggtagaaatatttttgctgttaattgaccctacagggcattctaaaggaagaagctgctcaggtgcatggagtcaaggacccggcgccagcatcaacccagagcgtgcttgccgatgggacagattctgcagacccctcaccagtccacaaagatgggcagaatgaggccgacagtgcaccagaagacctccactctgtggggaccagcaggctgctctatcacatcactgatggtgataacccactgctgtcgccacgatgctccatcttcagccaaagccagagattcaacttagaccccgagtcagccccatctccacccagcactcagcagtttatgatgccgcggagttcttcacgctgcagctgtggagatggcaaggagccacagaccatcacccagctcaccaagcacatccagagcctcaagcggaaaattcggaaatttgaagaaaaatttgaacaagaaaagaaataccggccttcacatggtgacaagacttctaatcctgaagtcctgaaatggatgaatgatttggctaaaggtcgtaaacagctcaaagaactaaagctaaagctgtcagaagaacaagggagtgctcccaaaggtccacctagaaacctgttgtgtgagcaacccacagtccccagagaaaatgggaaaccggaagctgcgggcccggagccaagctcctctggagaagagactccagatgctgccttgacatgcctgaaggagagaagagagcaacttcctccccaggaggattctaaggtaactaagcaagacaagaacctcataaagccgctttatgaccgatacagaattatcaagcaaatcttgtcaacaccttcccttattccaacaattcaggaggaagaggactctgatgaagaccgtccacagggaagccaacaaccttctttggcagatccagcatctcaccttcctgttggtgaccacctcacctactctaatgagactgagcctgttagggcccttttaccagatgaaaagaaagaagtaaaaccaccagctctctccatgtctaatttacatgaggctaccatgcctgtacttcttgaccatctccgagaaactagggctgacaagaagagactgcggaaagccttaagagaatttgaagaacagttttttaaacaaacaggaagaagtccacaaaaggaagataggataccaatggcagatgagtattatgaatataagcacataaaagccaaactgagactattagaggtcctcatcagcaagcaagatgtggccaaaactatttgaggttcaggaaatgttatgatcactttcacccatgatataaagtaaagtttattttcctctgccatccttgctaagtagttttgacacaatgaaaatggaagcactttagtggtagtattagctgtttttaagaaggaatagcaagtttaattatatacaaggagaagggatttaaacggggggaagaatacaacaggtagccatataattgggaaaaaattcagtgtcctccatgccaagcagaaaactcatagtcaatacaagtatttttaaaaatgtctaatattttatcaaatctaaataacatagctaggacacttgttagggaaagtttatttagtatccaaagactgtttatgttgatgtatggaaaagagcatgattttaaaaaatcaatcataggaggaaaagaaattcgcttttcaagtaggaaggaatacagctagcaagaaagcaatttatttgaaacttctaatggatttttgagtgataaaacatttactaccttgtcctttaagtctgctaggctctcagtaccctaaaataaactagattgtgttgctattttttttctttctctataaaaataacacattattttatccgttatttgaaattttacatttctggttaccaaagttcattctgatagcatgtactttgtgaattattatctttgtctataactgacagatgtttatattaaaataaaatattgtattaaaaatttaaaataggtattttggatagatatgtgtctgtagtatataatctaatgtgtccatagtattattgctaatcttttggtttactataagatgatataactattttttcattgggaatatacatttttcttaatgttccaacatctatactttgtaaagtcaaaacatttcccatgagctgtagttattcatccttctgtacaaaatgaaaagtttggaaattgtttgccctgataccttg

SEQ ID NO: 293540 - DNA, 2066 bp, Homo sapiens
gccccgccgccgcgccccgcccagctctgtccccgcagcctcgcgggctgccgggctttgtggttcgcccgtgccgctgggcccctgctgggggtgtcgttacgagcatgtgcagacagcagcccaagccttcaggataattccttcagcagcaccactgtaacagagtgtgacgaagatccagtctctctacatgaagaccagactgattgctccagtctcagagatgaaaacaataaagagaactaccccgacgcaggggctctggtagaagagcacgcgccgccctcttgggagccgcagcagcagaatgtagaggcgaccgtgctggtggacagcgtattgcgacccagcatgggcaacttcaagtccaggaagcccaagtccatcttcaaagcggagagcgggaggagccacggagaaagtcaggagacagagcatgtggtatccagccagtcagagtgtcaggtgagagcaggaacaccagctcatgagagtccacaaaacaatgccttcaagtgccaagaaacagtgcgacttcaaccaagaatagaccagaggactgccatttcgccaaaggatgcttttgaaactcggcaggacttaaatgaggaagaagctgctcaggtgcatggagtcaaggacccggcgccagcatcaacccagagcgtgcttgccgatgggacagattctgcagacccctcaccagtccacaaagatgggcagaatgaggccgacagtgcaccagaagacctccactctgtggggaccagcaggctgctctatcacatcactgatggtgataacccactgctgtcgccacgatgctccatcttcagccaaagccagagattcaacttagaccccgagtcagccccatctccacccagcactcagcagtttatgatgccgcggagttcttcacgctgcagctgtggagatggcaaggagccacagaccatcacccagctcaccaagcacatccagagcctcaagcggaaaattcggaaatttgaagaaaaatttgaacaagaaaagaaataccggccttcacatggtgacaagacttctaatcctgaagtcctgaaatggatgaatgatttggctaaaggtcgtaaacagctcaaagaactaaagctaaagctgtcagaagaacaagggagtgctcccaaaggtccacctagaaacctgttgtgtgagcaacccacagtccccagagaaaatgggaaaccggaagctgcgggcccggagccaagctcctctggagaagagactccagatgctgccttgacatgcctgaaggagagaagagagcaacttcctccccaggaggattctaaggtaactaagcaagacaagaacctcataaagccgctttatgaccgatacagaattatcaagcaaatcttgtcaacaccttcccttattccaacaattgtaagtcaggatacttgcatgctgttactttgtactgatgtgtagttaacaggatgtcacatagtagtacaagagttataaaagacccttcatggcagtatatactgcaaacaaggctagttgtcatttcaaaaagtgaaaatttggtcttctctaaccccattactatatttaacagtggctgatattagaactattgtaaaataggaacatatagcacttgtatgtctagagccaattttaacatttgctttcattatcttgggtgaaaagaaatgatagatttcagtttggcattttctaatttgtaacacagctagacaaaacagagcctttctgttctgtgtgttggttaattttttcctttaatcagaaaattaacaatatattcttgatataatgcaacatttgtttttggtaccatttgaccatactgtacaagatatgagaagatttatttcaatagaaaatataagtactgaaattgaattaggctacttttaataaagaatgatttatgggaatacagaactagaaaagcatcacaaatcctactccatcaatatcaaaacagttacttgttcaagatatcaatataaaaaggaataaatattaacaaatataaattt

SEQ ID NO: 293541 - DNA, 2188 bp, Homo sapiens
gccccgccgccgcgccccgcccagctctgtccccgcagcctcgcgggctgccgggctttgtggttcgcccgtgccgctgggcccctgctgggggtgtcgttacgagcatgtgcagacagcagcccaagccttcaggataattccttcagcagcaccactgtaacagagtgtgacgaagatccagtctctctacatgaagaccagactgattgctccagtctcagagatgaaaacaataaagagaactaccccgacgcaggggctctggtagaagagcacgcgccgccctcttgggagccgcagcagcagaatgtagaggcgaccgtgctggtggacagcgtattgcgacccagcatgggcaacttcaagtccaggaagcccaagtccatcttcaaagcggagagcgggaggagccacggagaaagtcaggagacagagcatgtggtatccagccagtcagagtgtcaggtgagagcaggaacaccagctcatgagagtccacaaaacaatgccttcaagtgccaagaaacagtgcgacttcaaccaagaatagaccagaggactgccatttcgccaaaggatgcttttgaaactcggcaggacttaaatgaggaagaagctgctcaggtgcatggagtcaaggacccggcgccagcatcaacccagagcgtgcttgccgatgggacagattctgcaggtaactaagcaagacaagaacctcataaagccgctttatgaccgatacagaattatcaagcaaatcttgtcaacaccttcccttattccaacaattcaggaggaagaggactctgatgaagaccgtccacagggaagccaacaaccttctttggcagatccagcatctcaccttcctgttggtgaccacctcacctactctaatgagactgagcctgttagggcccttttaccagatgaaaagaaagaagtaaaaccaccagctctctccatgtctaatttacatgaggctaccatgcctgtacttcttgaccatctccgagaaactagggctgacaagaagagactgcggaaagccttaagagaatttgaagaacagttttttaaacaaacaggaagaagtccacaaaaggaagataggataccaatggcagatgagtattatgaatataagcacataaaagccaaactgagactattagaggtcctcatcagcaagcaagatgtggccaaaactatttgaggttcaggaaatgttatgatcactttcacccatgatataaagtaaagtttattttcctctgccatccttgctaagtagttttgacacaatgaaaatggaagcactttagtggtagtattagctgtttttaagaaggaatagcaagtttaattatatacaaggagaagggatttaaacggggggaagaatacaacaggtagccatataattgggaaaaaattcagtgtcctccatgccaagcagaaaactcatagtcaatacaagtatttttaaaaatgtctaatattttatcaaatctaaataacatagctaggacacttgttagggaaagtttatttagtatccaaagactgtttatgttgatgtatggaaaagagcatgattttaaaaaatcaatcataggaggaaaagaaattcgcttttcaagtaggaaggaatacagctagcaagaaagcaatttatttgaaacttctaatggatttttgagtgataaaacatttactaccttgtcctttaagtctgctaggctctcagtaccctaaaataaactagattgtgttgctattttttttctttctctataaaaataacacattattttatccgttatttgaaattttacatttctggttaccaaagttcattctgatagcatgtactttgtgaattattatctttgtctataactgacagatgtttatattaaaataaaatattgtattaaaaatttaaaataggtattttggatagatatgtgtctgtagtatataatctaatgtgtccatagtattattgctaatcttttggtttactataagatgatataactattttttcattgggaatatacatttttcttaatgttccaacatctatactttgtaaagtcaaaacatttcccatgagctgtagttattcatccttctgtacaaaatgaaaagtttggaaattgtttgccctgataccttg

SEQ ID NO: 293542 - DNA, 2348 bp, Homo sapiens
gccccgccgccgcgccccgcccagctctgtccccgcagcctcgcgggctgccgggctttgtggttcgcccgtgccgctgggcccctgctgggggtgtcgttacgagcatgtgcagacagcagcccaagccttcaggataattccttcagcagcaccactgtaacagagtgtgacgaagatccagtctctctacatgaagaccagactgattgctccagtctcagagatgaaaacaataaagagaactaccccgacgcaggggctctggtagaagagcacgcgccgccctcttgggagccgcagcagcagaatgtagaggcgaccgtgctggtggacagcgtattgcgacccagcatgggcaacttcaagtccaggaagcccaagtccatcttcaaagcggagagcgggaggagccacggagaaagtcaggagacagagcatgtggtatccagccagtcagagtgtcaggtgagagcaggaacaccagctcatgagagtccacaaaacaatgccttcaagtgccaagaaacagtgcgacttcaaccaagaatagaccagaggactgccatttcgccaaaggatgcttttgaaactcggcaggacttaaatgaggaagaagctgctcaggtgcatggagtcaaggacccggcgccagcatcaacccagagcgtgcttgccgatgggacagattctgcagacccctcaccagtccacaaagatgggcagaatgaggccgacagtgcaccagaagacctccactctgtggggaccagcaggctgctctatcacatcactgatggtgataacccactgctgtcgccacgatgctccatcttcagccaaagccagagattcaacttagaccccgagtcagccccatctccacccagcactcagcagtttatgatgccgcggagttcttcacgctgcagctgtggagatggcaaggagccacagaccatcacccagctcaccaagcacatccagagcctcaagcggaaaattcggaaatttgaagaaaaatttgaacaagaaaagaaataccggccttcacatggtgacaagacttctaatcctgaagtcctgaaatggatgaatgatttggctaaaggtcgtaaacagctcaaagaactaaagctaaagctgtcagaagaacaagggagtgctcccaaaggtccacctagaaacctgttgtgtgagcaacccacagtccccagagaaaatgggaaaccggaagctgcgggcccggagccaagctcctctggagaagagactccagatgctgccttgacatgcctgaaggagagaagagagcaacttcctccccaggaggattctaaggtaactaagcaagacaagaacctcataaagccgctttatgaccgatacagaattatcaagcaaatcttgtcaacaccttcccttattccaacaattgtaagtcaggatacttgcatgctgttactttgtactgatgtgtagttaacaggatgtcacatagtagtacaagagttataaaagacccttcatggcagtatatactgcaaacaaggctagttgtcatttcaaaaagtgaaaatttggtcttctctaaccccattactatatttaacagtggctgatattagaactattgtaaaataggaacatatagcacttgtatgtctagagccaattttaacatttgctttcattatcttgggtgaaaagaaatgatagatttcagtttggcattttctaatttgtaacacagctagacaaaacagagcctttctgttctgtgtgttggttaattttttcctttaatcagaaaattaacaatatattcttgatataatgcaacatttgtttttggtaccatttgaccatactgtacaagatatgagaagatttatttcaatagaaaatataagtactgaaattgaattaggctacttttaataaagaatgatttatgggaatacagaactagaaaagcatcacaaatcctactccatcaatatcaaaacagttacttgttcaagatatcaatataaaaaggaataaatattaacaaatataaatttaagtatgcttggggtacatttatacttccatttttttgaggacaaattatacttccacatttttaaagacattaagtgaataataattcatagtctttggaattttccctttatggaagcataatttaaaatgtagtaaggttcttatatttcttgcaagagaatcttctagttgtgataagaattatcagaacagttgaggagtaaccccactttgctttggccttcaaatagctctcccctgaacttgtcaatttactgagtatcctctgtatctgaatg

SEQ ID NO: 293543 - DNA, 2239 bp, Homo sapiens
gccccgccgccgcgccccgcccagctctgtccccgcagcctcgcgggctgccgggctttgtggttcgcccgtgccgctgggcccctgctgggggtgtcgttacgagcatgtgcagacagcagcccaagccttcaggataattccttcagcagcaccactgtaacagagtgtgacgaagatccagtctctctacatgaagaccagactgattgctccagtctcagagatgaaaacaataaagagaactaccccgacgcaggggctctggtagaagagcacgcgccgccctcttgggagccgcagcagcagaatgtagaggcgaccgtgctggtggacagcgtattgcgacccagcatgggcaacttcaagtccaggaagcccaagtccatcttcaaagcggagagcgggaggagccacggagaaagtcaggagacagagcatgtggtatccagccagtcagagtgtcaggtgagagcaggaacaccagctcatgagagtccacaaaacaatgccttcaagtgccaagaaacagtgcgacttcaaccaagaatagaccagaggactgccatttcgccaaaggatgcttttgaaactcggcaggacttaaatgaggaagaagctgctcaggtgcatggagtcaaggacccggcgccagcatcaacccagagcgtgcttgccgatgggacagattctgcagacccctcaccagtccacaaagatgggcagaatgaggccgacagtgcaccagaagacctccactctgtggggaccagcaggctgctctatcacatcactgatggtgataacccactgctgtcgccacgatgctccatcttcagccaaagccagagattcaacttagaccccgagtcagccccatctccacccagcactcagcagtttatgatgccgcggagttcttcacgctgcagctgtggagatggcaaggagccacagaccatcacccagctcaccaagcacatccagagcctcaagcggaaaattcggaaatttgaagaaaaatttgaacaagaaaagaaataccggccttcacatggtgacaagacttctaatcctgaagtcctgaaatggatgaatgatttggctaaaggtcgtaaacagctcaaagaactaaagctaaagctgtcagaagaacaagggagtgctcccaaaggtccacctagaaacctgttgtgtgagcaacccacagtccccagagaaaatgggaaaccggaagctgcgggcccggagccaagctcctctggagaagagactccagatgctgccttgacatgcctgaaggagagaagagagcaacttcctccccaggaggattctaaggtaactaagcaagacaagaacctcataaagccgctttatgaccgatacagaattatcaagcaaatcttgtcaacaccttcccttattccaacaattcaggaggaagaggactctgatgaagaccgtccacagggaagccaacaaccttctttggcagatccagcatctcaccttcctgttggtgaccacctcacctactctaatgagactgagcctgttagggcccttttaccagatgaaaagaaagaagtaaaaccaccagctctctccatgtctaatttacatgaggctaccatgtgagtatgaatcctaagtgtggagtctcctcttaactccttctggtctgataccagtatatgaagtagagctggcctttgaaaatgctggactcaaaggggtgggtcaacagttctcagggcctttatcctagtctcttacatttagatgagatagtttttccactagaaatccacttggtagtaagcaaatgacttgccctttgtctcttaaatagcccttcagatataagccatttggattttcattaatattatcattatcattattattatcattattcagtagctggcattcctcatgataatttggccttctttggtttgtatcttacagcccagattatgagatttaatttaatttaatttaagttgacagaagtgtctgtcagagaaagcaagtagaaaatcatttttttggtggtggttctaaagcagttattcctaacttttcaaggggtgttgggacttttttgaaaccaatagaatcattttaagaaaatgcccatgtataatttcaagttcacagaatctctgaaaccatacatgagtttgggtatgcttgtgtatataccagattcctgctctagagtatatgactt

SEQ ID NO: 293544 - DNA, 1306 bp, Homo sapiens
gccccgccgccgcgccccgcccagctctgtccccgcagcctcgcgggctgccgggctttgtggttcgcccgtgccgctgggcccctgctgggggtgtcgttacgagcatgtgcagacagcagcccaagccttcaggataattccttcagcagcaccactgtaacagagtgtgacgaagatccagtctctctacatgaagaccagactgattgctccagtctcagagatgaaaacaataaagagaactaccccgacgcaggggctctggtagaagagcacgcgccgccctcttgggagccgcagcagcagaatgtagaggcgaccgtgctggtggacagcgtattgcgacccagcatgggcaacttcaagtccaggaagcccaagtccatcttcaaagcggagagcgggaggagccacggagaaagtcaggagacagagcatgtggtatccagccagtcagagtgtcaggtgagagcaggaacaccagctcatgagagtccacaaaacaatgccttcaagtgccaagaaacagtgcgacttcaaccaagaatagaccagaggactgccatttcgccaaaggatgcttttgaaactcggcaggacttaaatgaggaagaagctgctcaggtgcatggagtcaaggacccggcgccagcatcaacccagagcgtgcttgccgatgggacagattctgcagacccctcaccagtccacaaagatgggcagaatgaggccgacagtgcaccagaagacctccactctgtggggaccagcaggctgctctatcacatcactgatggtgataacccactgctgtcgccacgatgctccatcttcagccaaagccagagattcaacttagaccccgagtcagccccatctccacccagcactcagcagtttatgatgccgcggagttcttcacgctgcagctgtggagatggcaaggagccacagaccatcacccagctcaccaagcacatccagagcctcaagcggaaaattcggaaatttgaagaaaaatttgaacaagaaaagaaataccggccttcacatggtgacaagacttctaatcctgaagtcctgaaatggatgaatgatttggctaaaggtcgtaaacagctcaaaggtaaatcccagccaaagatcttttttcctcacaaaggaagcagttaaactagtgataatgtgctccagagcattttagattcatttccacctgtgccctcttgcaccttgttttctgcttagactgtaactcccttttgaaataaagcaccctgtatctctgtcattgtttggcccc

SEQ ID NO: 293545 - DNA, 1138 bp, Homo sapiens
gccccgccgccgcgccccgcccagctctgtccccgcagcctcgcgggctgccgggctttgtggttcgcccgtgccgctgggcccctgctgggggtgtcgttacgagcatgtgcagacagcagcccaagccttcaggataattccttcagcagcaccactgtaacagagtgtgacgaagatccagtctctctacatgaagaccagactgattgctccagtctcagagatgaaaacaataaagagaactaccccgacgcaggggctctggtagaagagcacgcgccgccctcttgggagccgcagcagcagaatgtagaggcgaccgtgctggtggacagcgtattgcgacccagcatgggcaacttcaagtccaggaagcccaagtccatcttcaaagcggagagcgggaggagccacggagaaagtcaggagacagagcatgtggtatccagccagtcagagtgtcaggtgagagcaggaacaccagctcatgagagtccacaaaacaatgccttcaagtgccaagaaacagtgcgacttcaaccaagaatagaccagaggactgccatttcgccaaaggatgcttttgaaactcggcaggacttaaatgaggaagaagctgctcaggtgcatggagtcaaggacccggcgccagcatcaacccagagcgtgcttgccgatgggacagattctgcaggtaagatacagggctgggggttgtcccaaattgtactctcaaggtagttcagtctcttgctggttcacactcagcctgagcccctgagggaaaacagtgcctggggcaacatgaaagcccaagaggtgcttctgagttgcccaggagttgctgagggggagcaggaaggattgggatttgctataacatagacctgtctagatgcggccaagagtcacacttacacaaatgggtgtcatttgtgtaaggtgaaagtacccatcacaacatctagtcttcattttcccatttggtctcctgggacaaatgagtgctatgcttattttatattactggacctagataacctgtgctgtcttgaaattcttctttttgatgtgttgaggatggggaagtttccatactgctacttcctttcctgttaactgcttgtaagatgat

SEQ ID NO: 293546 - DNA, 576 bp, Homo sapiens
ttgattcattgtgaactaacaaatgtatttttgttttgcagaagtccacaaaaggaagataggataccaatggcagatgagtattatgaatataagcacataaaagccaaactgagactattagaggtcctcatcagcaagcaagatgtggccaaaactatttgaggttcaggaaatgttatgatcactttcacccatgatataaagtaaagtttattttcctctgccatccttgctaagtagttttgacacaatgaaaatggaagcactttagtggtagtattagctgtttttaagaaggaatagcaagtttaattatatacaaggagaagggatttaaacggggggaagaatacaacaggtagccatataattgggaaaaaattcagtgtcctccatgccaagcagaaaactcatagtcaatacaagtatttttaaaaatgtctaatattttatcaaatctaaataacatagctaggacacttgttagggaaagtttatttagtatccaaagactgtttatgttgatgtatggaaaagagcatgattttaaaaaatcaatcataggaggaaaag

SEQ ID NO: 293547 - DNA, 6337 bp, Homo sapiens
gtctcctctggatcttaactactgagcgcaatgctgagccatggagccgggttggccttgtggatcacactgagcctgctgcagactggactggcggagccagagagatgtaacttcaccctggcggagtccaaggcctccagccattctgtgtctatccagtggagaattttgggctcaccctgtaactttagcctcatctatagcagtgacaccctgggggccgcgttgtgccctacctttcggatagacaacaccacatacggatgtaaccttcaagatttacaagcaggaaccatctataacttcaagattatttctctggatgaagagagaactgtggtcttgcaaacagatcctttacctcctgctaggtttggagtcagtaaagagaagacgacttcaaccggcttgcatgtttggtggactccttcttccggaaaagtcacctcatatgaggtgcaattatttgatgaaaataaccaaaagatacagggggttcaaattcaagaaagtacttcatggaatgaatacacttttttcaatctcactgctggtagtaaatacaatattgccatcacagctgtttctggaggaaaacgttctttttcagtttataccaatggatcaacagtgccatctccagtgaaagatattggtatttccacaaaagccaattctctcctgatttcctggtcccatggttctgggaatgtggaacgataccggctgatgctaatggataaagggatcctagttcatggcggtgttgtggacaaacatgctacttcctatgcttttcacgggctgtcccctggctacctctacaacctcactgttatgactgaggctgcagggctgcaaaactacaggtggaaactagtcaggacagcccccatggaagtctcaaatctgaaggtgacaaatgatggcagtttgacctctctaaaagtcaaatggcaaagacctcctggaaatgtggattcttacaatatcaccctgtctcacaaagggaccatcaaggaatccagagtattagcaccttggattactgaaactcactttaaagagttagtccccggtcgactttatcaagttactgtcagctgtgtctctggtgaactgtctgctcagaagatggcagtgggcagaacatttccagacaaagttgcaaacctggaggcaaacaataatggcaggatgaggtctcttgtagtgagctggtcgccccctgctggagactgggagcagtatcggatcctactcttcaatgattctgtggtgctgctcaacatcactgtgggaaaggaagaaacacagtatgtcatggatgacacggggctcgtaccgggaagacagtatgaggtggaagtcattgttgagagtggaaatttgaagaattctgagcgttgccaaggcaggacagtccccctggctgtcctccagcttcgtgtcaaacatgccaatgaaacctcactgagtatcatgtggcagacccctgtagcagaatgggagaaatacatcatttccctagctgacagagacctcttactgatccacaagtcactctccaaagatgccaaagaattcacttttactgacctggtgcctggacgaaaatacatggctacagtcaccagtattagtggagacttaaaaaattcctcttcagtaaaaggaagaacagtgcctgcccaagtgactgacttgcatgtggccaaccaaggaatgaccagtagtctgtttactaactggacccaggcacaaggagacgtagaattttaccaagtcttactgatccatgaaaatgtggtcattaaaaatgaaagcatctccagtgagaccagcagatacagcttccactctctcaagtccggcagcctgtactccgtggtggtaacaacagtgagtggagggatctcttcccgacaagtggttgtggagggaagaacagtcccttccagtgtgagtggagtaacggtgaacaattccggtcgtaatgactacctcagcgtttcctggctcgtggcgcccggagatgtggataactatgaggtaacattgtctcatgacggcaaggtggttcagtcccttgtcattgccaagtctgtcagagaatgttccttcagctccctcaccccaggccgcctctacaccgtgaccataactacaaggagtggcaagtatgaaaatcactccttcagccaagagcggacagtgcctgacaaagtccagggagtcagtgttagcaactcagccaggagtgactatttaagggtatcctgggtgcatgccactggagactttgatcactatgaagtcaccattaaaaacaaaaacaacttcattcaaactaaaagcattcccaagtcagaaaacgaatgtgtatttgttcagctagtccctggacggttgtacagtgtcactgttactacaaaaagtggacaatatgaagccaatgaacaagggaatgggagaacaattccagagcctgttaaggatctaacattgcgcaacaggagcactgaggacttgcatgtgacttggtcaggagctaatggggatgtcgaccaatatgagatccagctgctcttcaatgacatgaaagtatttcctccttttcaccttgtaaataccgcaaccgagtatcgatttacttccctaacaccaggccgccaatacaaaattcttgtcttgacgattagcggggatgtacagcagtcagccttcattgagggcttcacagttcctagtgctgtcaaaaatattcacatttctcccaatggagcaacagatagcctgacggtgaactggactcctggtgggggagacgttgattcctacacggtgtcggcattcaggcacagtcaaaaggttgactctcagactattcccaagcacgtctttgagcacacgttccacagactggaggccggggagcagtaccagatcatgattgcctcagtcagcgggtccctgaagaatcagataaatgtggttgggcggacagttccagcatctgtccaaggagtaattgcagacaatgcatacagcagttattccttaatagtaagttggcaaaaagctgctggtgtggcagaaagatatgatatcctgcttctaactgaaaatggaatccttctgcgcaacacatcagagccagccaccactaagcaacacaaatttgaagatctaacaccaggcaagaaatacaagatacagatcctaactgtcagtggaggcctctttagcaaggaagcccagactgaaggccgaacagtcccagcagctgtcaccgacctgaggatcacagagaactccaccaggcacctgtccttccgctggaccgcctcagagggggagctcagctggtacaacatctttttgtacaacccagatgggaatctccaggagagagctcaagttgacccactagtccagagcttctctttccagaacttgctacaaggcagaatgtacaagatggtgattgtaactcacagtggggagctgtctaatgagtctttcatatttggtagaacagtcccagcctctgtgagtcatctcagggggtccaatcggaacacgacagacagcctttggttcaactggagtccagcctctggggactttgacttttatgagctgattctctataatcccaatggcacaaagaaggaaaactggaaagacaaggacctgacggagtggcggtttcaaggccttgttcctggaaggaagtacgtgctgtgggtggtaactcacagtggagatctcagcaataaagtcacagcggagagcagaacagctccaagtcctcccagtcttatgtcatttgctgacattgcaaacacatccttggccatcacgtggaaagggcccccagactggacagactacaacgactttgagctgcagtggttgcccagagatgcacttactgtcttcaacccctacaacaacagaaaatcagaaggacgcattgtgtatggtcttcgtccagggagatcctatcaattcaacgtcaagactgtcagtggtgattcctggaaaacttacagcaaaccaatttttggatctgtgaggacaaagcctgacaagatacaaaacctgcattgccggcctcagaactccacggccattgcctgttcttggatccctcctgattctgactttgatggttatagtattgaatgccggaaaatggacacccaagaagttgagttttccagaaagctggagaaagaaaaatctctgctcaacatcatgatgctagtgccccataagaggtacctggtgtccatcaaagtgcagtcggccggcatgaccagcgaggtggttgaagacagcactatcacaatgatagaccgcccccctcctccacccccacacattcgtgtgaatgaaaaggatgtgctaattagcaagtcttccatcaactttactgtcaactgcagctggttcagcgacaccaatggagctgtgaaatacttcacagtggtggtgagagaggctgatggcagtgatgagctgaagccagaacagcagcaccctctcccttcctacctggagtacaggcacaatgcctccattcgggtgtatcagactaattattttgccagcaaatgtgccgaaaatcctaacagcaactccaagagttttaacattaagcttggagcagagatggagagcttaggtggaaaacgcgatcccactcagcaaaaattctgtgatggaccactgaagccacacactgcctacagaatcagcattcgagcttttacacagctctttgatgaggacctgaaggaattcacaaagccactctattcagacacatttttttctttacccatcactactgaatcagagcccttgtttggagctattgaaggtgtgagtgctggtctgtttttaattggcatgctagtggctgttgttgccttattgatctgcagacagaaagtgagccatggtcgagaaagaccctctgcccgtctgagcattcgtagggatcgaccattatctgtccacttaaacctgggccagaaagggtaaccggaaaacttcttgctccaataaaaataaatcagtttgaagggcatttcatgaagctacaggctgactccaactaccttctatccaaggaatacgaggagttaaaagacgtgggccgaaaccagtcatgtgacattgcactcttgccggagaatagagggaaaaatcgatacaacaatatattgccctatgatgccacgcgagtgaagctctccaatgtagatgatgatccttgctctgactacatcaatgccagctacatccctggcaacaacttcagaagagaatacattgtcactcagggaccgcttcctggcaccaaggatgacttctggaaaatggtgtgggaacaaaacgttcacaacatcgtcatggtgacccagtgtgttgagaagggccgagtaaagtgtgaccattactggccagcggaccaggattccctctactatggggacctcatcctgcagatgctctcagagtccgtcctgcctgagtggaccatccgggagtttaagatatgcggtgaggaacagcttgatgcacacagactcatccgccactttcactatacggtgtggccagaccatggagtcccagaaaccacccagtctctgatccagtttgtgagaactgtcagggactacatcaacagaagcccgggtgctgggcccactgtggtgcactgcagtgctggtgtgggtaggactggaacctttattgcattggaccgaatcctccagcagttagactccaaagactctgtggacatttatggagcagtgcacgacctaagacttcacagggttcacatggtccagactgagtgtcagtatgtctacctacatcagtgtgtaagagatgtcctcagagcaagaaagctacggagtgaacaagaaaaccccttgtttccaatctatgaaaatgtgaatccagagtatcacagagatccagtctattcaaggcattgagaatgtacctgaagagctcctggataaaaattattcactgtgtgatttgtttttaaaaacttgcttcatgccctacagaggtgccagctatttctgttgatactatgtataatttattaatctggagaatgtttaaaattttatataatttaaaggtaacagatattattgtacatagttgtattttgtagtttcttctgtaaatatgtatttttcataatgtttaatattaagctttatataatactatttttccacactaaagtgttcatgacttgttctacataaaactaattcaacctgtaaaacag

SEQ ID NO: 293548 - DNA, 842 bp, Homo sapiens
ttgctgaaagatggtattatgtgaaatttgctaacaaagtcttcctcttttggcttctcttcacagtaaccggaaaacttcttggtaagagagagaacacattaattactatattatctgcctttgaaatatgagtcagaatagttatggcactttcccttttctgcagtaactcttttctgtttgtttcatttttaattacagtccaataaaaataaatcagtttgaagggcatttcatgaagctacaggctgactccaactaccttctatccaaggaatacgaggtacaactcaggcagaatgaagcttcagcatccctagttcttagcagaatttccttcctaatgtttactgtgtcatcataggctgattgagctcagaagttaggaggctgcttagaatctcagctgagcactcttttatgcctaaactatgccctgaatagaatataccatctaatcttagaggccagcttgagctccagaataacacagcaaaccaagggctacctggatcagatagtaaggaagaattaacaaatctcaaatgcagacctaatgctgtcagatattcagcctggccatttgcttggctggaagatgccgtggtttcgcaaaaagcacgtagcttttggaactgattctcaggtttgccacttgggtgacctggggcacatcagttatcctgactgagcctcacctgtaaaatagtgagaccaccacctcccttgtggggctgttgtggggatcagggctaatgcatgttgagtactaggcattcataaacaatagctagtgtatatattttcatgttattatgttatctccaggactgtatgat

SEQ ID NO: 293549 - DNA, 1385 bp, Homo sapiens
ggctgtgttgccttatgatctgcagacagaaagtgagccatggtcgagaaagaccctctgcccgtctgagcattatctgtccacttaaacctgggccagaaaggtaaccggaaaacttcttgtccaataaaaataaatcagtttgaagggcatttcatgaagctacaggctgactccaactaccttctatccaaggaatacgaggagttaaaagacgtgggccgaaaccagtcatgtgacattgcactcttgccggagaatagagggaaaaatcgatacaacaatatattgccctatgatgccacgcgagtgaagctctccaatgtagatgatgatccttgctctgactacatcaatgccagctacatccctggcaacaacttcagaagagaatacattgtcactcagggaccgcttcctggcaccaaggatgacttctggaaaatggtgtgggaacaaaacgttcacaacatcgtcatggtgacccagtgtgttgagaagggccgagtaaagtgtgaccattactggccagcggaccaggattccctctactatggggacctcatcctgcagatgctctcagagtccgtcctgcctgagtggaccatccgggagtttaagatatgcggtgaggaacagcttgatgcacacagactcatccgccactttcactatacggtgtggccagaccatggagtcccagaaaccacccagtctctgatccagtttgtgagaactgtcagggactacatcaacagaagcccgggtgctgggcccactgtggtgcactgcagtgctggtgtgggtaggactggaacctttattgcattggaccgaatcctccagcagttagactccaaagactctgtggacatttatggagcagtgcacgacctaagacttcacagggttcacatggtccagactgagtgtcagtatgtctacctacatcagtgtgtaagagatgtcctcagagcaagaaagctacggagtgaacaagaaaaccccttgtttccaatctatgaaaatgtgaatccagagtatcacagagatccagtctattcaaggcattgagaatgtacctgaagagctcctggataaaaattattcactgtgtgatttgtttttaaaaacttgcttcatgccctacagaggtgccagctatttctgttgatactatgtataatttattaatctggagaatgtttaaaattttatataatttaaaggtaacagatattattgtacatagttgtattttgtagtttcttctgtaaatatgtatttttcataatgtttaatattaagctttatataatactatttttccacactaaagtgttcatgacttgttctacataaaactaattcaacctgtaaaacag

SEQ ID NO: 293550 - DNA, 3462 bp, Homo sapiens
gtctcctctggatcttaactactgagcgcaatgctgagccatggagccgggttggccttgtggatcacactgagcctgctgcagactggactggcggagccagagagatgtaacttcaccctggcggagtccaaggcctccagccattctgtgtctatccagtggagaattttgggctcaccctgtaactttagcctcatctatagcagtgacaccctgggggccgcgttgtgccctacctttcggatagacaacaccacatacggatgtaaccttcaagatttacaagcaggaaccatctataacttcaagattatttctctggatgaagagagaactgtggtcttgcaaacagatcctttacctcctgctaggtttggagtcagtaaagagaagacgacttcaaccggcttgcatgtttggtggactccttcttccggaaaagtcacctcatatgaggtgcaattatttgatgaaaataaccaaaagatacagggggttcaaattcaagaaagtacttcatggaatgaatacacttttttcaatctcactgctggtagtaaatacaatattgccatcacagctgtttctggaggaaaacgttctttttcagtttataccaatggatcaacagtgccatctccagtgaaagatattggtatttccacaaaagccaattctctcctgatttcctggtcccatggttctgggaatgtggaacgataccggctgatgctaatggataaagggatcctagttcatggcggtgttgtggacaaacatgctacttcctatgcttttcacgggctgtcccctggctacctctacaacctcactgttatgactgaggctgcagggctgcaaaactacaggtggaaactagtcaggacagcccccatggaagtctcaaatctgaaggtgacaaatgatggcagtttgacctctctaaaagtcaaatggcaaagacctcctggaaatgtggattcttacaatatcaccctgtctcacaaagggaccatcaaggaatccagagtattagcaccttggattactgaaactcactttaaagagttagtccccggtcgactttatcaagttactgtcagctgtgtctctggtgaactgtctgctcagaagatggcagtgggcagaacatttccagacaaagttgcaaacctggaggcaaacaataatggcaggatgaggtctcttgtagtgagctggtcgccccctgctggagactgggagcagtatcggatcctactcttcaatgattctgtggtgctgctcaacatcactgtgggaaaggaagaaacacagtatgtcatggatgacacggggctcgtaccgggaagacagtatgaggtggaagtcattgttgagagtggaaatttgaagaattctgagcgttgccaaggcaggacagtccccctggctgtcctccagcttcgtgtcaaacatgccaatgaaacctcactgagtatcatgtggcagacccctgtagcagaatgggagaaatacatcatttccctagctgacagagacctcttactgatccacaagtcactctccaaagatgccaaagaattcacttttactgacctggtgcctggacgaaaatacatggctacagtcaccagtattagtggagacttaaaaaattcctcttcagtaaaaggaagaacagtgcctgcccaagtgactgacttgcatgtggccaaccaaggaatgaccagtagtctgtttactaactggacccaggcacaaggagacgtagaattttaccaagtcttactgatccatgaaaatgtggtcattaaaaatgaaagcatctccagtgagaccagcagatacagcttccactctctcaagtccggcagcctgtactccgtggtggtaacaacagtgagtggagggatctcttcccgacaagtggttgtggagggaagaacagtcccttccagtgtgagtggagtaacggtgaacaattccggtcgtaatgactacctcagcgtttcctggctcgtggcgcccggagatgtggataactatgaggtaacattgtctcatgacggcaaggtggttcagtcccttgtcattgccaagtctgtcagagaatgttccttcagctccctcaccccaggccgcctctacaccgtgaccataactacaaggagtggcaagtatgaaaatcactccttcagccaagagcggacagtgcctgacaaagtccagggagtcagtgttagcaactcagccaggagtgactatttaagggtatcctgggtgcatgccactggagactttgatcactatgaagtcaccattaaaaacaaaaacaacttcattcaaactaaaagcattcccaagtcagaaaacgaatgtgtatttgttcagctagtccctggacggttgtacagtgtcactgttactacaaaaagtggacaatatgaagccaatgaacaagggaatgggagaacaattccagagcctgttaaggatctaacattgcgcaacaggagcactgaggacttgcatgtgacttggtcaggagctaatggggatgtcgaccaatatgagatccagctgctcttcaatgacatgaaagtatttcctccttttcaccttgtaaataccgcaaccgagtatcgatttacttccctaacaccaggccgccaatacaaaattcttgtcttgacgattagcggggatgtacagcagtcagccttcattgagggcttcacaggtaatgtgaaatactgttcttgaacctgaatagatgcagtggtgcatttaactttcgggtagttcaggtatttcgattgagcatttggagggataaaagggagacagcaagaagggacaaagtcatgttgatagtgacaatgatgttgtccaacttttcatgtgagttctctcagtgggtgccaaaacatcagaagcattcaaaactttgtttgaaaatttcaacagttcattctctaagtgatgacttttaaatttattttctgttttagttcctagtgctgtcaaaaatattcacatttctcccaatggagcaacagatagcctgacggtgaactggactcctggtgggggagacgttgattcctacacggtgtcggcattcaggcacagtcaaaaggttgactctcagactattcccaagcacgtctttgagcacacgttccacagactggaggccggggagcagtaccagatcatgattgcctcagtcagcgggtccctgaagaatcagataaatgtggttgggcggacaggtaagcatccacctggagaagggctagattgtagaatgcctcatggttctccaaaatgggacagtgaacgggctcagctattcacaaatccagatttaaaaccaccaaagtttgtacaattcaatggtttcaagagccttactcatttattctttgtatttttctcttaatagagatctgc

SEQ ID NO: 293551 - DNA, 1295 bp, Homo sapiens
gtctcctctggatcttaactactgagcgcaatgctgagccatggagccgggttggccttgtggatcacactgagcctgctgcagactggactggcggagccagagagatgtaacttcaccctggcggagtccaaggcctccagccattctgtgtctatccagtggagaattttgggctcaccctgtaactttagcctcatctatagcagtgacaccctgggggccgcgttgtgccctacctttcggatagacaacaccacatacggatgtaaccttcaagatttacaagcaggaaccatctataacttcaagattatttctctggatgaagagagaactgtggtcttgcaaacagatcctttacctcctgctaggtttggagtcagtaaagagaagacgacttcaaccggcttgcatgtttggtggactccttcttccggaaaagtcacctcatatgaggtgcaattatttgatgaaaataaccaaaagatacagggggttcaaattcaagaaagtacttcatggaatgaatacacttttttcaatctcactgctggtagtaaatacaatattgccatcacagctgtttctggaggaaaacgttctttttcagtttataccaatggatcaacagtgccatctccagtgaaagatattggtatttccacaaaagccaattctctcctgatttcctggtcccatggttctgggaatgtggaacgataccggctgatgctaatggataaagggatcctagttcatggcggtgttgtggacaaacatgctacttcctatgcttttcacgggctgtcccctggctacctctacaacctcactgttatgactgaggctgcagggctgcaaaactacaggtggaaactagtcaggacaggtaagttccccctagctagctgaagaagaataaagtgaaatcaagggaatgtttaataagtcaagtttattatatgaataactgtaatataggacaaattgaaattcttataaggtatagaagacccatatccacttttctactcagaaaaagaaggattctcttttattctaaagtttaggctagcccttggcaacattttgaagtaggcaaagttaattactgatatggacctagcttctcttcttctctttttaatactctatctccttgctaaggattcctacttccttttcttaaacaggcaactgctgtctttatgacatcactcacagtgaaccagagttactttctccatgctatacataccctactcctgtgtgacagtcatttccaaaatttt

SEQ ID NO: 293552 - DNA, 343 bp, Homo sapiens
cctgagtaaaagtctcctttctgttctttcctgattagcccccatggaagtctcaaatctgaaggtgacaaatgatggcagtttgacctctctaaaagtcaaatggcaaagacctcctggaaatgtggattcttacaatatcaccctgtctcacaaagggaccatcaaggaatccagagtattagcaccttggattactgaaactcactttaaagagttagtccccggtcgactttatcaagttactgtcagctgtgtctctggtgaactgtctgctcagaagatggcagtgggcagaacatgtgagtcttgggctccagaatgttccttggttgctcaaatc

SEQ ID NO: 293553 - DNA, 468 bp, Homo sapiens
tcttgtttaattatgcatgaagtagtgctagtggtttatttggggaagggagatgttgccagttccttgaatgtgattcataaattattatgtaggtaaactctgatcagttcctttcctgaaatgtcttctcatttttctccctagttccagagcctgttaaggatctaacattgcgcaacaggagcactgaggacttgcatgtgacttggtcaggagctaatggggatgtcgaccaatatgagatccagctgctcttcaatgacatgaaagtatttcctccttttcaccttgtaaataccgcaaccgagtatcgatttacttccctaacaccaggccgccaatacaaaattcttgtcttgacgattagcggggatgtacagcagtcagccttcattgagggcttcacaggtaatgtgaaatactgttcttgaacctgaatagatgcagtggtgcatttaactttcg

SEQ ID NO: 293554 - DNA, 801 bp, Homo sapiens
cataaatggaaaaatttgttcaagccaagtatcataatcagaataaaagttatctcccttatgtttcagccatggtcgagaaagaccctctgcccgtctgagcattcgtagggatcgaccattatctgtccacttaaacctgggccagaaagggtaaccggaaaacttcttgccttcgtataatttgctgaaagatggtattatgtgaaatttgctaacaaagtcttcctcttttggcttctcttcacagtaaccggaaaacttcttggtaagagagagaacacattaattactatattatctgcctttgaaatatgagtcagaatagttatggcactttcccttttctgcagtaactcttttctgtttgtttcatttttaattacagtccaataaaaataaatcagtttgaagggcatttcatgaagctacaggctgactccaactaccttctatccaaggaatacgaggtacaactcaggcagaatgaagcttcagcatccctagttcttagcagaatttccttcctaatgtttactgtgtcatcataggctgattgagctcagaagttaggaggctgcttagaatctcagctgagcactcttttatgcctaaactatgccctgaatagaatataccatctaatcttagaggccagcttgagctccagaataacacagcaaaccaagggctacctggatcagatagtaaggaagaattaacaaatctcaaatgcagacctaatgctgtcagatattcagcctggccatttgcttggctggaagatgccgtggtttcgca

SEQ ID NO: 293555 - DNA, 437 bp, Homo sapiens
ccagagaccattagtgaagcgatgttcaagaaatttgctaactatataatcccatcattgtcaacagtttgtgagtttctcatctttcttatgcatgagaacaggccctcctctgacatgtttctgcttttccacagtgtcagtatgtctacctacatcagtgtgtaagagatgtcctcagagcaagaaagctacggagtgaacaagaaaaccccttgtttccaatctatgaaaatgtgaatccagagtatcacagaggtgggcacttacttcacttacttccccaagtttcttcatcaagatatggtcaatctggccaggcatagaggcttacacctgtaatcccagcactttgggaggctgaggcaggaggatcacttgagcctaagagtttgaaaccagcctgggcaacatagggagatcctatctctacaaaa

SEQ ID NO: 293556 - DNA, 366 bp, Homo sapiens
gggaaaagcagcaggcactgttaaatgaaagcggtgttggccacgtcccctcccagtttagtctaggatactgaacccagagatggacagtatttctctcaaggtcacacagccaggcaggagtggagaggagcccaagtccagggcccagagtccctctgtaccccagtgggtagggtggggaaggctggggcctgctggggcctggagccctggcctcaccatggtaaatctcctgcagggagccccctccgcagaactccatgcagatccacagcggtcattcctagggacaaagagctggggtgggcacaaagcaggtcacatgggggctgcctggggccaggaggataaggcagcctcacc

SEQ ID NO: 293557 - DNA, 548 bp, Homo sapiens
taccctaataccctcattcttcatctcacatctcagtggcttctactattgctaactgcctccatcttaaaactcttggatatcatgacaccatattattctatttttcctcctttctctcttttcctccactgtatttttactacagtctgtccctaagccctccctatatactacattccacagagttcaaatcctgtttcaagtatcacctttatgctaacaaataactttctaataagatacatatataaagtttctagaagggaaggcaaatggttacaaatctgccttactttctttccattccaattgctacaagattcattgttcacactagattattccaagaattttttttttctttttgagtcagggcctcactctgttgctcaggatagagtgcagttgtgtaatcatagctcactgcagcctcaaattcctgggctcaagcgatcttcccacctcaacctcccaagtagctgggactacaggcatgcaccaccacgcccagcttgcttatcccaagaatcttattttatcttccc

SEQ ID NO: 293558 - DNA, 437 bp, Homo sapiens
accatttaacttgttttaatgtttcttcacaaatggtgaaaaatactaaagtacagacaaggaataatcataatgttgtggccaacattataaatatggaattataaatttaaaacattttctggtttaaaaaataaatctggtagtcaatgcagctctgcggggtctctgcatctagtagggccgatctctgcgctcctgacggtgctcgcctctgcaaggtaaagagggcccttcggttagaatgggaaggggtgaggaagcccttccagagcccccaggtgccccttcctggctcctcccaaccactatcacaagcttcctagagacatgaggacttgcgccaaccaagctgggaagggctgtcctcttactgtgcctggcggcccacagctgcttttcaccagcacttacttatccatttttccaggtcctcc

SEQ ID NO: 293559 - DNA, 962 bp, Homo sapiens
aattcggcacagggttgtcattgtccctccgctgtcaccttttcaagccccaggctggctgcttcagaagcccctgaccccatggaggagtgggacgtgccacagatgaagaaagaggtggagagccttaagtaccagctggccttccagcgggagatggcgtccaagaccatccccgagctgctgaagtggatcgaggacgggatccccaaggaccccttcctgaaccccgacctgatgaagaacaacccatgggtggaaaagggcaaatgcaccatcctgtgagccccgcacccggcccctctcacaccatcctgtgagaccacgcccggccccactcccaccatcttgtaagactgtgcccagccccactcactccatcctgtgagtcccactcccagccccactcccaccatcctgtgagcccatgcccggccccactcacaccaacctgtgagccccactcccggccccactcactccatcttgtaagactatgcccagccccattcactccatcctgtgagtcccactcccagccccactcccaccatcctgtgagccccacttccagccccactcccaccatcctgtgagccccactcccagccccactcccaccatcctgtgagccccactcccggccccactcactccatcctgtgagccccactcccagccccactcacaccaacctgtgagccccactcccggccccactcacaacatcttgtaagactgtgcccggccccattcactccatcctgtgagaccacgcccggccccactcactctatcctgtgagaccacgcctggccccactcccaccatcctgtgagccccactcctggccccactcacaccatcctatgagcccacgcccggccccactcccaccatcctgtgaaccccactccactcgcacgtgattacagtctgtaaaggtgtgactttataaagac

SEQ ID NO: 293560 - DNA, 447 bp, Homo sapiens
tctggggtgcggttctttacacacccgtctccttccttcaaccagtggaaggcagcgaactggcccgctcagcacaccgcggcccagggccacggcaggcgctcacaatcgagcacacgcgtgtgcacacacatgtgcacagatcagtgtcagaagcatcgacctgcgagctcacagagctgggagcagagcacccacgcacaccccgaatggctatggaagctgcagggcgccagggacactgggagtccctgctctcatggcaaagcagggacgggggacttaaaagccaccaacaggaaaatcggggaaaaaagggagatggtggtaacagttggacactatttcttggcaaaaccgtggaaaaacacgttctacaccagcaggtggcaaattgtggccgccatctgtgtttgcaaataaagtttaactggagtttgaaaaaaa

SEQ ID NO: 293561 - DNA, 428 bp, Homo sapiens
tgaggagacaggacccggcccagcagtggaaggcagcgaactggcccgctcagcacaccgcggcccagggccacggcaggcgctcacaatcgagcacacgcgtgtgcacacacatgtgcacagatcagtgtcagaagcatcgacctgcgagctcacagagctgggagcagagcacccacgcacaccccgaatggctatggaagctgcagggcgccagggacactgggagtccctgctctcatggcaaagcagggacgggggacttaaaagccaccaacaggaaaatcggggaaaaaagggagatggtggtaacagttggacactatttcttggcaaaaccgtggaaaaacacgttctacaccagcaggtggcaaattgtggccgccatctgtgtttgcaaataaagtttaactggagtttgaaaaaaa

SEQ ID NO: 293562 - DNA, 313 bp, Homo sapiens
tgagggggcgagtcatccacagtagactctggcctcccaggaaacctgggagcagagcacccacgcacaccccgaatggctatggaagctgcagggcgccagggacactgggagtccctgctctcatggcaaagcagggacgggggacttaaaagccaccaacaggaaaatcggggaaaaaagggagatggtggtaacagttggacactatttcttggcaaaaccgtggaaaaacacgttctacaccagcaggtggcaaattgtggccgccatctgtgtttgcaaataaagtttaactggagtttgaaaaaaa

SEQ ID NO: 293563 - DNA, 317 bp, Homo sapiens
ggcatataatgccttggaaacgtgagtagtatagaatttgggaatttgggggctttagtaaaataattgcatgtgtgacatttcgtaaaagaaatgtggctgggcacagtggctcatgcctgtaataccagcacttcgggagaccagggcaggttgcttgagcccaggagtttgagaccagcctagacaatatggtgagaccctgtctctacaaaaaaattttaaaaattagctgggtgtggtggtgcatgcctgtgatcccagctacacaggaggctgaggtgggatgatcacttgagcctaggaggttgagactg

SEQ ID NO: 293564 - DNA, 942 bp, Homo sapiens
ggtccctttcacctcccacagtacgtgtgtcagctgcagttcgtcaagataaatgagcaggagacaacttcgtgtaaaaagtgtgtgaacctaggacaggacttttcgacccttatgaagaaagaaaggaaagaatattgcagctagatgtgttgggtccggactgaggtcagagttgcacagctttggacagatagcctggacacaggaaaccatgttctctcaattttaaacaaaaatgcaattatgtattccctcccctatccccccaccaccccccatacacacattaaaattcttaaccatgggtcagcttatatcgaccttttgggtaaaagacattattcctttgaaacttcagaagcacgagtttgttttctgaaaaacacatgccattgcataccttttaacttgacatatgactgaaacttttgtcttaacaatccattttctacaaagactgcccttatatttattaaagatgacaaaaccaaaaccacttcttctttcatacattttctgctttcatgttctgtcattctgagatctttttttctttccctctctctgtcttcttttcccccccagctgtcggcagcatccagcccctccagtcacagtcctcacagagcttcaggaaaggacccctttgcagagctctctttggaggatttcttataaatcactttaggtattgctacttgttgtgggagatggggacttaaatacttaaaaacaattaccaaacattaaacacaattcacgcttctctttcatttctttaaaggactctaggctccctctcctcctcctcctcttcctctattctttaggtgcagaatgaaaagataggacataaggaaaaacaacttttggaaaatatctgtaacataattatttaaagtaatctcatccactgctcacagtaaatggatgagatcg

SEQ ID NO: 293565 - DNA, 867 bp, Homo sapiens
tgttcctcttaccctgcccggctccagctgaccagggaaggggtgggctgaactgaggcgggggcaagggagtgcccgacatcttgtccgactccgcgggtgacacgagccggttctctctggactggtggcagcgcgcggccccgaaccgcgccccaggccggcaggcggggaaggagccggtgggggtagggggtgcggtggggggtggggaccctccggctcttgggggtcccagtccccgccggctgctgagcgggtggggtggtggaggagctgcagagatgtccggccagagcctgacggaccgaatcactgccgcccagcacagtgtcaccggctctgccgtatccaagacagtatgcaaggccacgacccacgagatcatggggcccaagaaaaagcacctggactacttaattcagtgcacaaatgagatgaatgtgaacatcccacagttggcagacagtttatttgaaagaactactaatagtagttgggtggtggtcttcaaatctctcattacaactcatcatttgatggtgtatggaaatgagcgttttattcagtatttggcttcaagaaacacgttgtttaacttaagcaattttttggataaaagtggattgcaaggatatgacatgtctacatttattaggcggtatagtagatatttaaatgagaaagcagtttcatacagacaagttgcatttgatttcacaaaagtgaagagaggggctgatggagttatgagaacaatgaacacagaaaaactcctaaaaactgtaccaattattcagaatcagatggatgcacttcttgattttaatgtgagttatgcttttgtaatttaagattttaaaaaat

SEQ ID NO: 293566 - DNA, 672 bp, Homo sapiens
ggaacttttttcaaagttccagagagctattttttaacctatattgctttagatataagtgagtcttcagaaaattttgctgggctagcaggagaattacatttgttttttttctcttttataatacttctctcttatcccctttaaccctaatgtaattttgtcatgagataagagatgatttctgtcaaagcaaatacagccttctcagtcaattcagtatgaagtggtgactttcttcattttccatttaaagacatttactaatgtctattttttggataacttttccagtgaataaacaaggagaaaaggcaaagacctcctttagaaaaccatagcgtcataaagttccttacaaattctatttcgtctgtttgtaactttaaggcgctttgatgaactaggtggacttctcaaaccaacagtggcctctcagaaccagaaccttcctgttgccaaactcccacctagcaagttagtatctgatgacttggattcatctttagccaaccttgtgggcaatcttggcatcggaaatggaaccactaagaatgatgtaaattggagtcaaccaggtgaaaaaaagaaaaaactggggggaaaaagaccaggtctacagtgatagagcaaagcatcaaagaatctttaagggaggtttaaaaaaaaaaa

SEQ ID NO: 293567 - DNA, 361 bp, Homo sapiens
agagatgaggccaaagactacaattcccttgtcaaccttgatagtgttttagtatagatgttctttcattagatactggaaatacaagggattttaggtagttagtgaatgtacatgtgaactaaaatgctctctgtgtattttctgttgtgtaagtacttgttctaatccagtgttattgcattatgtaattgttctccctgggaaaaacagaatggcatgcattttccacaatacgtaagtgaccaaaaacgagcctttttgcaataaattggcatgctattaaccactgctgtagcagaatctcataacctttcagctattacttgttttcacattcagattttcaatgtgccagaaa

SEQ ID NO: 293568 - DNA, 3481 bp, Homo sapiens
tgttcctcttaccctgcccggctccagctgaccagggaaggggtgggctgaactgaggcgggggcaagggagtgcccgacatcttgtccgactccgcgggtgacacgagccggttctctctggactggtggcagcgcgcggccccgaaccgcgccccaggccggcaggcggggaaggagccggtgggggtagggggtgcggtggggggtggggaccctccggctcttgggggtcccagtccccgccggctgctgagcgggtggggtggtggaggagctgcagagatgtccggccagagcctgacggaccgaatcactgccgcccagcacagtgtcaccggctctgccgtatccaagacagtatgcaaggccacgacccacgagatcatggggcccaagaaaaagcacctggactacttaattcagtgcacaaatgagatgaatgtgaacatcccacagttggcagacagtttatttgaaagaactactaatagtagttgggtggtggtcttcaaatctctcattacaactcatcatttgatggtgtatggaaatgagcgttttattcagtatttggcttcaagaaacacgttgtttaacttaagcaattttttggataaaagtggattgcaaggatatgacatgtctacatttattaggcggtatagtagatatttaaatgagaaagcagtttcatacagacaagttgcatttgatttcacaaaagtgaagagaggggctgatggagttatgagaacaatgaacacagaaaaactcctaaaaactgtaccaattattcagaatcagatggatgcacttcttgattttaatgttaatagcaatgaacttacaaatggggtaataaatgctgccttcatgctcctgttcaaagatgccattagactgtttgcagcatacaatgaaggaattattaatttgttggaaaaatattttgatatgaaaaagaaccaatgcaaagaaggtcttgacatctataagaagttcctaactaggatgacaagaatctcagagttcctcaaagttgcagagcaagttggaattgacagaggtgatataccagacctttcacaggcccctagcagtcttcttgatgctttggaacaacatttagcttccttggaaggaaagaaaatcaaagattctacagctgcaagcagggcaactacactttccaatgcagtgtcttccctggcaagcactggtctatctctgaccaaagtggatgaaagggaaaagcaggcagcattagaggaagaacaggcacgtttgaaagctttaaaggaacagcgcctaaaagaacttgcaaagaaacctcatacctctttaacaactgcagcctctcctgtatccacctcagcaggagggataatgactgcaccagccattgacatattttctacccctagttcttctaacagcacatcaaagctgcccaatgatctgcttgatttgcagcagccaacttttcacccatctgtacatcctatgtcaactgcttctcaggtagcaagtacatggggaggattcactccttctccagttgcacagccacacccttcagctggccttaatgttgactttgaatctgtgtttggaaataaatctacaaatgttattgtagattctgggggctttgatgaactaggtggacttctcaaaccaacagtggcctctcagaaccagaaccttcctgttgccaaactcccacctagcaagttagtatctgatgacttggattcatctttagccaaccttgtgggcaatcttggcatcggaaatggaaccactaagaatgatgtaaattggagtcaaccaggtgaaaagaagttaactgggggatctaactggcaaccaaaggttgcaccaacaaccgcttggaatgcggcaacaatgaatggcatgcattttccacaatacgcaccccctgtaatggcctatcctgctactacaccaacaggcatgataggatatggaattcctccacaaatgggaagtgttcctgtaatgacgcaaccaaccttaatatacagccagcctgtcatgagacctccaaacccctttggccctgtatcaggagcacagatacagtttatgtaacttgatggaagaaaatggaattactccaaaaagacaagtgctcaagcagcaaaatccttacttccagcaaaatccaaactgctgtctcttaaatctcttaaactctcttcttccattagaatgctacaagtaactcagtgaaggcccatgaaggaaattgggactagtttataggagaacgtatcaatacagtttataaagccaagaattgctatgatttaagactaagatctgtctttttggtgactaacccttcaattctttcaactcctgttaatacccataatcagtaacctatcaagaaaagcccttatttggaaagtgtgaaatttgtatttggaaaagctgcctggagagaagaactgtgtcctttactgtatttcaacaggactcttttgggggatcaaaattaaaattcctaattatgcattatctttcttttctccagtcctcacaaatacagaaacaataactgaaattaacttttctttttttaaaaaaaattatattcagtttgcagtagacattccttaagtatttgtatttatttatgattatcaattttacataacattaatattgtatcagacctccttatgaaaatgagtatggatgtgcacagtatgtttgatttttatccacaagaatgaatctgattcagaatgcttttctcagctgacatacagagcactaaatattttaaggcaagtccataggtctgaatctcttaagaattctcggcctctgtgggatttagggaagcattataaatgcattaatccttatagtcaattctgtgcctaggattttgccagggaacagttcactgactaggaaaagcactacattttaaattcagcattagtgcattgggaaggatctttactgctttgtgcttggcatgtcattattttccatttgacattagggcctttccaaaatgaatgtgaggaattgctttcacttcaagactttccttcttttcactaaaactctagaaggtgttacaagggggagggaaggggggcaaagtccttgaacattttctttggctcgtgccatgttatgatcatataccttttaaataaggggaaatagtatctttaaagttaatgtctagccaagagtttagtaaacgaagaattaaactgcactgttgatcggtgctttgtgtaaatacatctttaacatttgggtggagaggggccttaagaaggacagttcattgtaggaaagcaattctgtacatgagtttaagcattcttgttgcattgtctctgcagattctatttttgtttacaatattaaaatgtatgttagcaaaatgggtggattttcaaataaaatgcagcttccacaaaaag

SEQ ID NO: 293569 - DNA, 3207 bp, Homo sapiens
tgggcggacgcgtgggcgacccacgcgtccgcggacgcgtggtgccgcccagcacagtgtcaccggctctgccgtatccaagacagtatgcaaggccacgacccacgagatcatggggcccaagaaaaagcacctggactacttaattcagtgcacaaatgagatgaatgtgaacatcccacagttggcagacagtttatttgaaagaactactaatagtagttgggtggtggtcttcaaatctctcattacaactcatcatttgatggtgtatggaaatgagcgttttattcagtatttggcttcaagaaacacgttgtttaacttaagcaattttttggataaaagtggattgcaaggatatgacatgtctacatttattaggcggtatagtagatatttaaatgagaaagcagtttcatacagacaagttgcatttgatttcacaaaagtgaagagaggggctgatggagttatgagaacaatgaacacagaaaaactcctaaaaactgtaccaattattcagaatcagatggatgcacttcttgattttaatgttaatagcaatgaacttacaaatggggtaataaatgctgccttcatgctcctgttcaaagatgccattagactgtttgcagcatacaatgaaggaattattaatttgttggaaaaatattttgatatgaaaaagaaccaatgcaaagaaggtcttgacatctataagaagttcctaactaggatgacaagaatctcagagttcctcaaagttgcagagcaagttggaattgacagaggtgatataccagacctttcacaggcccctagcagtcttcttgatgctttggaacaacatttagcttccttggaaggaaagaaaatcaaagattctacagctgcaagcagggcaactacactttccaatgcagtgtcttccctggcaagcactggtctatctctgaccaaagtggatgaaagggaaaagcaggcagcattagaggaagaacaggcacgtttgaaagctttaaaggaacagcgcctaaaagaacttgcaaagaaacctcatacctctttaacaactgcagcctctcctgtatccacctcagcaggagggataatgactgcaccagccattgacatattttctacccctagttcttctaacagcacatcaaagctgcccaatgatctgcttgatttgcagcagccaacttttcacccatctgtacatcctatgtcaactgcttctcaggtagcaagtacatggggaggattcactccttctccagttgcacagccacacccttcagctggccttaatgttgactttgaatctgtgtttggaaataaatctacaaatgttattgtagattctgggggctttgatgaactaggtggacttctcaaaccaacagtggcctctcagaaccagaaccttcctgttgccaaactcccacctagcaagttagtatctgatgacttggattcatctttagccaaccttgtgggcaatcttggcatcggaaatggaaccactaagaatgatgtaaattggagtcaaccaggtgaaaagaagttaactgggggatctaactggcaaccaaaggttgcaccaacaaccgcttggaatgcggcaacaatgaatggcatgcattttccacaatacgcaccccctgtaatggcctatcctgctactacaccaacaggcatgataggatatggaattcctccacaaatgggaagtgttcctgtaatgacgcaaccaaccttaatatacagccagcctgtcatgagacctccaaacccctttggccctgtatcaggagcacagatacagtttatgtaacttgatggaagaaaatggaattactccaaaaagacaagtgctcaagcagcaaaatccttacttccagcaaaatccaaactgctgtctcttaaatctcttaaactctcttcttccattagaatgctacaagtaactcagtgaaggcccatgaaggaaattgggactagtttataggagaacgtatcaatacagtttataaagccaagaattgctatgatttaagactaagatctgtctttttggtgactaacccttcaattctttcaactcctgttaatacccataatcagtaacctatcaagaaaagcccttatttggaaagtgtgaaatttgtatttggaaaagctgcctggagagaagaactgtgtcctttactgtatttcaacaggactcttttgggggatcaaaattaaaattcctaattatgcattatctttcttttctccagtcctcacaaatacagaaacaataactgaaattaacttttctttttttaaaaaaaattatattcagtttgcagtagacattccttaagtatttgtatttatttatgattatcaattttacataacattaatattgtatcagacctccttatgaaaatgagtatggatgtgcacagtatgtttgatttttatccacaagaatgaatctgattcagaatgcttttctcagctgacatacagagcactaaatattttaaggcaagtccataggtctgaatctcttaagaattctcggcctctgtgggatttagggaagcattataaatgcattaatccttatagtcaattctgtgcctaggattttgccagggaacagttcactgactaggaaaagcactacattttaaattcagcattagtgcattgggaaggatctttactgctttgtgcttggcatgtcattattttccatttgacattagggcctttccaaaatgaatgtgaggaattgctttcacttcaagactttccttcttttcactaaaactctagaaggtgttacaagggggagggaaggggggcaaagtccttgaacattttctttggctcgtgccatgttatgatcatataccttttaaataaggggaaatagtatctttaaagttaatgtctagccaagagtttagtaaacgaagaattaaactgcactgttgatcggtgctttgtgtaaatacatctttaacatttgggtggagaggggccttaagaaggacagttcattgtaggaaagcaattctgtacatgagtttaagcattcttgttgcattgtctctgcagattctatttttgtttacaatattaaaatgtatgttagcaaaatgggtggattttcaaataaaatgcagcttccacaaaaag

SEQ ID NO: 293570 - DNA, 3405 bp, Homo sapiens
tgttcctcttaccctgcccggctccagctgaccagggaaggggtgggctgaactgaggcgggggcaagggagtgcccgacatcttgtccgactccgcgggtgacacgagccggttctctctggactggtggcagcgcgcggccccgaaccgcgccccaggccggcaggcggggaaggagccggtgggggtagggggtgcggtggggggtggggaccctccggctcttgggggtcccagtccccgccggctgctgagcgggtggggtggtggaggagctgcagagatgtccggccagagcctgacggaccgaatcactgccgcccagcacagtgtcaccggctctgccgtatccaagacagtatgcaaggccacgacccacgagatcatggggcccaagaaaaagcacctggactacttaattcagtgcacaaatgagatgaatgtgaacatcccacagttggcagacagtttatttgaaagaactactaatagtagttgggtggtggtcttcaaatctctcattacaactcatcatttgatggtgtatggaaatgaggatatgacatgtctacatttattaggcggtatagtagatatttaaatgagaaagcagtttcatacagacaagttgcatttgatttcacaaaagtgaagagaggggctgatggagttatgagaacaatgaacacagaaaaactcctaaaaactgtaccaattattcagaatcagatggatgcacttcttgattttaatgttaatagcaatgaacttacaaatggggtaataaatgctgccttcatgctcctgttcaaagatgccattagactgtttgcagcatacaatgaaggaattattaatttgttggaaaaatattttgatatgaaaaagaaccaatgcaaagaaggtcttgacatctataagaagttcctaactaggatgacaagaatctcagagttcctcaaagttgcagagcaagttggaattgacagaggtgatataccagacctttcacaggcccctagcagtcttcttgatgctttggaacaacatttagcttccttggaaggaaagaaaatcaaagattctacagctgcaagcagggcaactacactttccaatgcagtgtcttccctggcaagcactggtctatctctgaccaaagtggatgaaagggaaaagcaggcagcattagaggaagaacaggcacgtttgaaagctttaaaggaacagcgcctaaaagaacttgcaaagaaacctcatacctctttaacaactgcagcctctcctgtatccacctcagcaggagggataatgactgcaccagccattgacatattttctacccctagttcttctaacagcacatcaaagctgcccaatgatctgcttgatttgcagcagccaacttttcacccatctgtacatcctatgtcaactgcttctcaggtagcaagtacatggggaggattcactccttctccagttgcacagccacacccttcagctggccttaatgttgactttgaatctgtgtttggaaataaatctacaaatgttattgtagattctgggggctttgatgaactaggtggacttctcaaaccaacagtggcctctcagaaccagaaccttcctgttgccaaactcccacctagcaagttagtatctgatgacttggattcatctttagccaaccttgtgggcaatcttggcatcggaaatggaaccactaagaatgatgtaaattggagtcaaccaggtgaaaagaagttaactgggggatctaactggcaaccaaaggttgcaccaacaaccgcttggaatgcggcaacaatgaatggcatgcattttccacaatacgcaccccctgtaatggcctatcctgctactacaccaacaggcatgataggatatggaattcctccacaaatgggaagtgttcctgtaatgacgcaaccaaccttaatatacagccagcctgtcatgagacctccaaacccctttggccctgtatcaggagcacagatacagtttatgtaacttgatggaagaaaatggaattactccaaaaagacaagtgctcaagcagcaaaatccttacttccagcaaaatccaaactgctgtctcttaaatctcttaaactctcttcttccattagaatgctacaagtaactcagtgaaggcccatgaaggaaattgggactagtttataggagaacgtatcaatacagtttataaagccaagaattgctatgatttaagactaagatctgtctttttggtgactaacccttcaattctttcaactcctgttaatacccataatcagtaacctatcaagaaaagcccttatttggaaagtgtgaaatttgtatttggaaaagctgcctggagagaagaactgtgtcctttactgtatttcaacaggactcttttgggggatcaaaattaaaattcctaattatgcattatctttcttttctccagtcctcacaaatacagaaacaataactgaaattaacttttctttttttaaaaaaaattatattcagtttgcagtagacattccttaagtatttgtatttatttatgattatcaattttacataacattaatattgtatcagacctccttatgaaaatgagtatggatgtgcacagtatgtttgatttttatccacaagaatgaatctgattcagaatgcttttctcagctgacatacagagcactaaatattttaaggcaagtccataggtctgaatctcttaagaattctcggcctctgtgggatttagggaagcattataaatgcattaatccttatagtcaattctgtgcctaggattttgccagggaacagttcactgactaggaaaagcactacattttaaattcagcattagtgcattgggaaggatctttactgctttgtgcttggcatgtcattattttccatttgacattagggcctttccaaaatgaatgtgaggaattgctttcacttcaagactttccttcttttcactaaaactctagaaggtgttacaagggggagggaaggggggcaaagtccttgaacattttctttggctcgtgccatgttatgatcatataccttttaaataaggggaaatagtatctttaaagttaatgtctagccaagagtttagtaaacgaagaattaaactgcactgttgatcggtgctttgtgtaaatacatctttaacatttgggtggagaggggccttaagaaggacagttcattgtaggaaagcaattctgtacatgagtttaagcattcttgttgcattgtctctgcagattctatttttgtttacaatattaaaatgtatgttagcaaaatgggtggattttcaaataaaatgcagcttccacaaaaag

SEQ ID NO: 293571 - DNA, 3127 bp, Homo sapiens
cacctctgacgagttcccatcctatgtcaactgcttctcaggtagcaagtacatggggagacttaattcagtgcacaaatgagatgaatgtgaacatcccacagttggcagacagtttatttgaaagaactactaatagtagttgggtggtggtcttcaaatctctcattacaactcatcatttgatggtgtatggaaatgagcgttttattcagtatttggcttcaagaaacacgttgtttaacttaagcaattttttggataaaagtggattgcaaggatatgacatgtctacatttattaggcggtatagtagatatttaaatgagaaagcagtttcatacagacaagttgcatttgatttcacaaaagtgaagagaggggctgatggagttatgagaacaatgaacacagaaaaactcctaaaaactgtaccaattattcagaatcagatggatgcacttcttgattttaatgttaatagcaatgaacttacaaatggggtaataaatgctgccttcatgctcctgttcaaagatgccattagactgtttgcagcatacaatgaaggaattattaatttgttggaaaaatattttgatatgaaaaagaaccaatgcaaagaaggtcttgacatctataagaagttcctaactaggatgacaagaatctcagagttcctcaaagttgcagagcaagttggaattgacagaggtgatataccagacctttcacaggcccctagcagtcttcttgatgctttggaacaacatttagcttccttggaaggaaagaaaatcaaagattctacagctgcaagcagggcaactacactttccaatgcagtgtcttccctggcaagcactggtctatctctgaccaaagtggatgaaagggaaaagcaggcagcattagaggaagaacaggcacgtttgaaagctttaaaggaacagcgcctaaaagaacttgcaaagaaacctcatacctctttaacaactgcagcctctcctgtatccacctcagcaggagggataatgactgcaccagccattgacatattttctacccctagttcttctaacagcacatcaaagctgcccaatgatctgcttgatttgcagcagccaacttttcacccatctgtacatcctatgtcaactgcttctcaggtagcaagtacatggggaggattcactccttctccagttgcacagccacacccttcagctggccttaatgttgactttgaatctgtgtttggaaataaatctacaaatgttattgtagattctgggggctttgatgaactaggtggacttctcaaaccaacagtggcctctcagaaccagaaccttcctgttgccaaactcccacctagcaagttagtatctgatgacttggattcatctttagccaaccttgtgggcaatcttggcatcggaaatggaaccactaagaatgatgtaaattggagtcaaccaggtgaaaagaagttaactgggggatctaactggcaaccaaaggttgcaccaacaaccgcttggaatgcggcaacaatgaatggcatgcattttccacaatacgcaccccctgtaatggcctatcctgctactacaccaacaggcatgataggatatggaattcctccacaaatgggaagtgttcctgtaatgacgcaaccaaccttaatatacagccagcctgtcatgagacctccaaacccctttggccctgtatcaggagcacagatacagtttatgtaacttgatggaagaaaatggaattactccaaaaagacaagtgctcaagcagcaaaatccttacttccagcaaaatccaaactgctgtctcttaaatctcttaaactctcttcttccattagaatgctacaagtaactcagtgaaggcccatgaaggaaattgggactagtttataggagaacgtatcaatacagtttataaagccaagaattgctatgatttaagactaagatctgtctttttggtgactaacccttcaattctttcaactcctgttaatacccataatcagtaacctatcaagaaaagcccttatttggaaagtgtgaaatttgtatttggaaaagctgcctggagagaagaactgtgtcctttactgtatttcaacaggactcttttgggggatcaaaattaaaattcctaattatgcattatctttcttttctccagtcctcacaaatacagaaacaataactgaaattaacttttctttttttaaaaaaaattatattcagtttgcagtagacattccttaagtatttgtatttatttatgattatcaattttacataacattaatattgtatcagacctccttatgaaaatgagtatggatgtgcacagtatgtttgatttttatccacaagaatgaatctgattcagaatgcttttctcagctgacatacagagcactaaatattttaaggcaagtccataggtctgaatctcttaagaattctcggcctctgtgggatttagggaagcattataaatgcattaatccttatagtcaattctgtgcctaggattttgccagggaacagttcactgactaggaaaagcactacattttaaattcagcattagtgcattgggaaggatctttactgctttgtgcttggcatgtcattattttccatttgacattagggcctttccaaaatgaatgtgaggaattgctttcacttcaagactttccttcttttcactaaaactctagaaggtgttacaagggggagggaaggggggcaaagtccttgaacattttctttggctcgtgccatgttatgatcatataccttttaaataaggggaaatagtatctttaaagttaatgtctagccaagagtttagtaaacgaagaattaaactgcactgttgatcggtgctttgtgtaaatacatctttaacatttgggtggagaggggccttaagaaggacagttcattgtaggaaagcaattctgtacatgagtttaagcattcttgttgcattgtctctgcagattctatttttgtttacaatattaaaatgtatgttagcaaaatgggtggattttcaaataaaatgcagcttccacaaaaag

SEQ ID NO: 293572 - DNA, 3631 bp, Homo sapiens
tgttcctcttaccctgcccggctccagctgaccagggaaggggtgggctgaactgaggcgggggcaagggagtgcccgacatcttgtccgactccgcgggtgacacgagccggttctctctggactggtggcagcgcgcggccccgaaccgcgccccaggccggcaggcggggaaggagccggtgggggtagggggtgcggtggggggtggggaccctccggctcttgggggtcccagtccccgccggctgctgagcgggtggggtggtggaggagctgcagagatgtccggccagagcctgacggaccgaatcactgccgcccagcacagtgtcaccggctctgccgtatccaagacagtatgcaaggccacgacccacgagatcatggggcccaagaaaaagcacctggactacttaattcagtgcacaaatgagatgaatgtgaacatcccacagttggcagacagtttatttgaaagaactactaatagtagttgggtggtggtcttcaaatctctcattacaactcatcatttgatggtgtatggaaatgagcgttttattcagtatttggcttcaagaaacacgttgtttaacttaagcaattttttggataaaagtggattgcaaggatatgacatgtctacatttattaggcggtatagtagatatttaaatgagaaagcagtttcatacagacaagttgcatttgatttcacaaaagtgaagagaggggctgatggagttatgagaacaatgaacacagaaaaactcctaaaaactgtaccaattattcagaatcagatggatgcacttcttgattttaatgttaatagcaatgaacttacaaatggggtaataaatgctgccttcatgctcctgttcaaagatgccattagactgtttgcagcatacaatgaaggaattattaatttgttggaaaaatattttgatatgaaaaagaaccaatgcaaagaaggtcttgacatctataagaagttcctaactaggatgacaagaatctcagagttcctcaaagttgcagagcaagttggaattgacagaggtgatataccagacctttcacaggcccctagcagtcttcttgatgctttggaacaacatttagcttccttggaaggaaagaaaatcaaagattctacagctgcaagcagggcaactacactttccaatgcagtgtcttccctggcaagcactggtctatctctgaccaaagtggatgaaagggaaaagcaggcagcattagaggaagaacaggcacgtttgaaagctttaaaggaacagcgcctaaaagaacttgcaaagaaacctcatacctctttaacaactgcagcctctcctgtatccacctcagcaggagggataatgactgcaccagccattgacatattttctacccctagttcttctaacagcacatcaaagctgcccaatgatctgcttgatttgcagcagccaacttttcacccatctgtacatcctatgtcaactgcttctcaggtagcaagtacatggggagatcctttctctgctactgtagatgctgttgatgatgccattccaagcttaaatcctttcctcacaaaaagtagtggtgatgttcacctttccatttcttcagatgtatctacttttactactaggacacctactcatgaaatgtttgttggattcactccttctccagttgcacagccacacccttcagctggccttaatgttgactttgaatctgtgtttggaaataaatctacaaatgttattgtagattctgggggctttgatgaactaggtggacttctcaaaccaacagtggcctctcagaaccagaaccttcctgttgccaaactcccacctagcaagttagtatctgatgacttggattcatctttagccaaccttgtgggcaatcttggcatcggaaatggaaccactaagaatgatgtaaattggagtcaaccaggtgaaaagaagttaactgggggatctaactggcaaccaaaggttgcaccaacaaccgcttggaatgcggcaacaatgaatggcatgcattttccacaatacgcaccccctgtaatggcctatcctgctactacaccaacaggcatgataggatatggaattcctccacaaatgggaagtgttcctgtaatgacgcaaccaaccttaatatacagccagcctgtcatgagacctccaaacccctttggccctgtatcaggagcacagatacagtttatgtaacttgatggaagaaaatggaattactccaaaaagacaagtgctcaagcagcaaaatccttacttccagcaaaatccaaactgctgtctcttaaatctcttaaactctcttcttccattagaatgctacaagtaactcagtgaaggcccatgaaggaaattgggactagtttataggagaacgtatcaatacagtttataaagccaagaattgctatgatttaagactaagatctgtctttttggtgactaacccttcaattctttcaactcctgttaatacccataatcagtaacctatcaagaaaagcccttatttggaaagtgtgaaatttgtatttggaaaagctgcctggagagaagaactgtgtcctttactgtatttcaacaggactcttttgggggatcaaaattaaaattcctaattatgcattatctttcttttctccagtcctcacaaatacagaaacaataactgaaattaacttttctttttttaaaaaaaattatattcagtttgcagtagacattccttaagtatttgtatttatttatgattatcaattttacataacattaatattgtatcagacctccttatgaaaatgagtatggatgtgcacagtatgtttgatttttatccacaagaatgaatctgattcagaatgcttttctcagctgacatacagagcactaaatattttaaggcaagtccataggtctgaatctcttaagaattctcggcctctgtgggatttagggaagcattataaatgcattaatccttatagtcaattctgtgcctaggattttgccagggaacagttcactgactaggaaaagcactacattttaaattcagcattagtgcattgggaaggatctttactgctttgtgcttggcatgtcattattttccatttgacattagggcctttccaaaatgaatgtgaggaattgctttcacttcaagactttccttcttttcactaaaactctagaaggtgttacaagggggagggaaggggggcaaagtccttgaacattttctttggctcgtgccatgttatgatcatataccttttaaataaggggaaatagtatctttaaagttaatgtctagccaagagtttagtaaacgaagaattaaactgcactgttgatcggtgctttgtgtaaatacatctttaacatttgggtggagaggggccttaagaaggacagttcattgtaggaaagcaattctgtacatgagtttaagcattcttgttgcattgtctctgcagattctatttttgtttacaatattaaaatgtatgttagcaaaatgggtggattttcaaataaaatgcagcttccacaaaaag

SEQ ID NO: 293573 - DNA, 3607 bp, Homo sapiens
tgttcctcttaccctgcccggctccagctgaccagggaaggggtgggctgaactgaggcgggggcaagggagtgcccgacatcttgtccgactccgcgggtgacacgagccggttctctctggactggtggcagcgcgcggccccgaaccgcgccccaggccggcaggcggggaaggagccggtgggggtagggggtgcggtggggggtggggaccctccggctcttgggggtcccagtccccgccggctgctgagcgggtggggtggtggaggagctgcagagatgtccggccagagcctgacggaccgaatcactgccgcccagcacagtgtcaccggctctgccgtatccaagacagtatgcaaggccacgacccacgagatcatggggcccaagaaaaagcacctggactacttaattcagtgcacaaatgagatgaatgtgaacatcccacagttggcagacagtttatttgaaagaactactaatagtagttgggtggtggtcttcaaatctctcattacaactcatcatttgatggtgtatggaaatgagcgttttattcagtatttggcttcaagaaacacgttgtttaacttaagcaattttttggataaaagtggattgcaaggatatgacatgtctacatttattaggcggtatagtagatatttaaatgagaaagcagtttcatacagacaagttgcatttgatttcacaaaagtgaagagaggggctgatggagttatgagaacaatgaacacagaaaaactcctaaaaactgtaccaattattcagaatcagatggatgcacttcttgattttaatgttaatagcaatgaacttacaaatggggtaataaatgctgccttcatgctcctgttcaaagatgccattagactgtttgcagcatacaatgaaggaattattaatttgttggaaaaatattttgatatgaaaaagaaccaatgcaaagaaggtcttgacatctataagaagttcctaactaggatgacaagaatctcagagttcctcaaagttgcagagcaagttggaattgacagaggtgatataccagacctttcacaggcccctagcagtcttcttgatgctttggaacaacatttagcttccttggaaggaaagaaaatcaaagattctacagctgcaagcagggcaactacactttccaatgcagtgtcttccctggcaagcactggtctatctctgaccaaagtggatgaaagggaaaagcaggcagcattagaggaagaacaggcacgtttgaaagctttaaaggaacagcgcctaaaagaacttgcaaagaaacctcatacctctttaacaactgcagcctctcctgtatccacctcagcaggagggataatgactgcaccagccattgacatattttctacccctagttcttctaacagcacatcaaagctgcccaatgatctgcttgatttgcagcagccaacttttcacccatctgtacatcctatgtcaactgcttctcaggtagcaagtacatggggagatcctttctctgctactgtagatgctgttgatgatgccattccaagcttaaatcctttcctcacaaaaagtagtggtgatgttcacctttccatttcttcagatgtatctacttttactactaggacacctactcatgaaatgtttgttggattcactccttctccagttgcacagccacacccttcagctggccttaatgttgactttgaatctgtgtttggaaataaatctacaaatgttattgtagattctgggggctttgatgaactaggtggacttctcaaaccaacagtggcctctcagaaccagaaccttcctgttgccaaactcccacctagcaagttagtatctgatgacttggattcatctttagccaaccttgtgggcaatcttggcatcggaaatggaaccactaagaatgatgtaaattggagtcaaccaggtgaaaagaagttaactgggggatctaactggcaaccaaaggttgcaccaacaaccgcttggaatgcggcaacaatggcaccccctgtaatggcctatcctgctactacaccaacaggcatgataggatatggaattcctccacaaatgggaagtgttcctgtaatgacgcaaccaaccttaatatacagccagcctgtcatgagacctccaaacccctttggccctgtatcaggagcacagatacagtttatgtaacttgatggaagaaaatggaattactccaaaaagacaagtgctcaagcagcaaaatccttacttccagcaaaatccaaactgctgtctcttaaatctcttaaactctcttcttccattagaatgctacaagtaactcagtgaaggcccatgaaggaaattgggactagtttataggagaacgtatcaatacagtttataaagccaagaattgctatgatttaagactaagatctgtctttttggtgactaacccttcaattctttcaactcctgttaatacccataatcagtaacctatcaagaaaagcccttatttggaaagtgtgaaatttgtatttggaaaagctgcctggagagaagaactgtgtcctttactgtatttcaacaggactcttttgggggatcaaaattaaaattcctaattatgcattatctttcttttctccagtcctcacaaatacagaaacaataactgaaattaacttttctttttttaaaaaaaattatattcagtttgcagtagacattccttaagtatttgtatttatttatgattatcaattttacataacattaatattgtatcagacctccttatgaaaatgagtatggatgtgcacagtatgtttgatttttatccacaagaatgaatctgattcagaatgcttttctcagctgacatacagagcactaaatattttaaggcaagtccataggtctgaatctcttaagaattctcggcctctgtgggatttagggaagcattataaatgcattaatccttatagtcaattctgtgcctaggattttgccagggaacagttcactgactaggaaaagcactacattttaaattcagcattagtgcattgggaaggatctttactgctttgtgcttggcatgtcattattttccatttgacattagggcctttccaaaatgaatgtgaggaattgctttcacttcaagactttccttcttttcactaaaactctagaaggtgttacaagggggagggaaggggggcaaagtccttgaacattttctttggctcgtgccatgttatgatcatataccttttaaataaggggaaatagtatctttaaagttaatgtctagccaagagtttagtaaacgaagaattaaactgcactgttgatcggtgctttgtgtaaatacatctttaacatttgggtggagaggggccttaagaaggacagttcattgtaggaaagcaattctgtacatgagtttaagcattcttgttgcattgtctctgcagattctatttttgtttacaatattaaaatgtatgttagcaaaatgggtggattttcaaataaaatgcagcttccacaaaaag

SEQ ID NO: 293574 - DNA, 3291 bp, Homo sapiens
gttaaatgtggtagagaatatccagtatcagtgcaggtttctttccagtgagacagctggagccatagttcaaaatgttttcgttggctgggcaccgtggctcagacctgtaatcccaaagtgctgggattacagacatgagccaccatatctggcctttatcagattttctgctgacatcattctgagaccagcccctgagaggtcacaaaaggaagggagactgattagaaaatgaaacacagccacgggacagtttgctggaaattgcctagggcctgagcatcatgaaggtatattggaattggtttgagaagacagttatatcctgattagatatcacttgacatttatgtaaacctggcctacctgacagagcatgagtttttaaagtgttatctgtggtgatttccagggaaagcatgttttatggagaaagacaaagtcgatgtcttcaggtttgtttcttaaatttttttttttttttgcatcaaagagcttgttcatggtcaggctttctcattcttaccatagtgtttttatcatattacacatagaagagaggggagttttcagattgtgacaaggtagcttacatacaggtgttcagaagacagggatggtaacttagatttgttgactttccaactctagtttccctactgttaacaacttttagggccaccaaataatatctaagccattggaaatgttgagtatttttggagattaaatattttcctgattcttaagaagtctgtttaaaatattactggtactagccgtgatgtcatttttccaaattttatttataaaatatttttattataatttattaaatacaatgcttttcttacagcaagttggaattgacagaggtgatataccagacctttcacaggcccctagcagtcttcttgatgctttggaacaacatttagcttccttggaaggaaagaaaatcaaagattctacagctgcaagcagggcaactacactttccaatgcagtgtcttccctggcaagcactggtctatctctgaccaaagtggatgaaagggaaaagcaggcagcattagaggaagaacaggcacgtttgaaagctttaaaggaacagcgcctaaaagaacttgcaaagaaacctcatacctctttaacaactgcagcctctcctgtatccacctcagcaggagggataatgactgcaccagccattgacatattttctacccctagttcttctaacagcacatcaaagctgcccaatgatctgcttgatttgcagcagccaacttttcacccatctgtacatcctatgtcaactgcttctcaggtagcaagtacatggggaggattcactccttctccagttgcacagccacacccttcagctggccttaatgttgactttgaatctgtgtttggaaataaatctacaaatgttattgtagattctgggggctttgatgaactaggtggacttctcaaaccaacagtggcctctcagaaccagaaccttcctgttgccaaactcccacctagcaagttagtatctgatgacttggattcatctttagccaaccttgtgggcaatcttggcatcggaaatggaaccactaagaatgatgtaaattggagtcaaccaggtgaaaagaagttaactgggggatctaactggcaaccaaaggttgcaccaacaaccgcttggaatgcggcaacaatgaatggcatgcattttccacaatacgcaccccctgtaatggcctatcctgctactacaccaacaggcatgataggatatggaattcctccacaaatgggaagtgttcctgtaatgacgcaaccaaccttaatatacagccagcctgtcatgagacctccaaacccctttggccctgtatcaggagcacagatacagtttatgtaacttgatggaagaaaatggaattactccaaaaagacaagtgctcaagcagcaaaatccttacttccagcaaaatccaaactgctgtctcttaaatctcttaaactctcttcttccattagaatgctacaagtaactcagtgaaggcccatgaaggaaattgggactagtttataggagaacgtatcaatacagtttataaagccaagaattgctatgatttaagactaagatctgtctttttggtgactaacccttcaattctttcaactcctgttaatacccataatcagtaacctatcaagaaaagcccttatttggaaagtgtgaaatttgtatttggaaaagctgcctggagagaagaactgtgtcctttactgtatttcaacaggactcttttgggggatcaaaattaaaattcctaattatgcattatctttcttttctccagtcctcacaaatacagaaacaataactgaaattaacttttctttttttaaaaaaaattatattcagtttgcagtagacattccttaagtatttgtatttatttatgattatcaattttacataacattaatattgtatcagacctccttatgaaaatgagtatggatgtgcacagtatgtttgatttttatccacaagaatgaatctgattcagaatgcttttctcagctgacatacagagcactaaatattttaaggcaagtccataggtctgaatctcttaagaattctcggcctctgtgggatttagggaagcattataaatgcattaatccttatagtcaattctgtgcctaggattttgccagggaacagttcactgactaggaaaagcactacattttaaattcagcattagtgcattgggaaggatctttactgctttgtgcttggcatgtcattattttccatttgacattagggcctttccaaaatgaatgtgaggaattgctttcacttcaagactttccttcttttcactaaaactctagaaggtgttacaagggggagggaaggggggcaaagtccttgaacattttctttggctcgtgccatgttatgatcatataccttttaaataaggggaaatagtatctttaaagttaatgtctagccaagagtttagtaaacgaagaattaaactgcactgttgatcggtgctttgtgtaaatacatctttaacatttgggtggagaggggccttaagaaggacagttcattgtaggaaagcaattctgtacatgagtttaagcattcttgttgcattgtctctgcagattctatttttgtttacaatattaaaatgtatgttagcaaaatgggtggattttcaaataaaatgcagcttccacaaaaag

SEQ ID NO: 293575 - DNA, 2747 bp, Homo sapiens
gttgctcatcaggtgcttattaagtaccttctgcatgctcagtagtatgtcgagcttttaggagtatggttttactttaaaatttaagtacttgcaagatttttaaaaaatgtttcatgtttacatagttttcagttcttaacgtttttgataatgtttcttaatatctccaactaggtcacgtttgtataacaaaagtaagattgtcattcttattaagtagctaaaactccactgttaattagtacatgaagaacatacctgtttatttttgttgctctctaattagatgatacttgatttaatttgaccagtggcctaattatcatgaaattcttaatatttgtacaattgcaggcccctagcagtcttcttgatgctttggaacaacatttagcttccttggaaggaaagaaaatcaaagattctacagctgcaagcagggcaactacactttccaatgcagtgtcttccctggcaagcactggtctatctctgaccaaagtggatgaaagggaaaagcaggcagcattagaggaagaacaggcacgtttgaaagctttaaaggaacagcgcctaaaagaacttgcaaagaaacctcatacctctttaacaactgcagcctctcctgtatccacctcagcaggagggataatgactgcaccagccattgacatattttctacccctagttcttctaacagcacatcaaagctgcccaatgatctgcttgatttgcagcagccaacttttcacccatctgtacatcctatgtcaactgcttctcaggtagcaagtacatggggaggattcactccttctccagttgcacagccacacccttcagctggccttaatgttgactttgaatctgtgtttggaaataaatctacaaatgttattgtagattctgggggctttgatgaactaggtggacttctcaaaccaacagtggcctctcagaaccagaaccttcctgttgccaaactcccacctagcaagttagtatctgatgacttggattcatctttagccaaccttgtgggcaatcttggcatcggaaatggaaccactaagaatgatgtaaattggagtcaaccaggtgaaaagaagttaactgggggatctaactggcaaccaaaggttgcaccaacaaccgcttggaatgcggcaacaatgaatggcatgcattttccacaatacgcaccccctgtaatggcctatcctgctactacaccaacaggcatgataggatatggaattcctccacaaatgggaagtgttcctgtaatgacgcaaccaaccttaatatacagccagcctgtcatgagacctccaaacccctttggccctgtatcaggagcacagatacagtttatgtaacttgatggaagaaaatggaattactccaaaaagacaagtgctcaagcagcaaaatccttacttccagcaaaatccaaactgctgtctcttaaatctcttaaactctcttcttccattagaatgctacaagtaactcagtgaaggcccatgaaggaaattgggactagtttataggagaacgtatcaatacagtttataaagccaagaattgctatgatttaagactaagatctgtctttttggtgactaacccttcaattctttcaactcctgttaatacccataatcagtaacctatcaagaaaagcccttatttggaaagtgtgaaatttgtatttggaaaagctgcctggagagaagaactgtgtcctttactgtatttcaacaggactcttttgggggatcaaaattaaaattcctaattatgcattatctttcttttctccagtcctcacaaatacagaaacaataactgaaattaacttttctttttttaaaaaaaattatattcagtttgcagtagacattccttaagtatttgtatttatttatgattatcaattttacataacattaatattgtatcagacctccttatgaaaatgagtatggatgtgcacagtatgtttgatttttatccacaagaatgaatctgattcagaatgcttttctcagctgacatacagagcactaaatattttaaggcaagtccataggtctgaatctcttaagaattctcggcctctgtgggatttagggaagcattataaatgcattaatccttatagtcaattctgtgcctaggattttgccagggaacagttcactgactaggaaaagcactacattttaaattcagcattagtgcattgggaaggatctttactgctttgtgcttggcatgtcattattttccatttgacattagggcctttccaaaatgaatgtgaggaattgctttcacttcaagactttccttcttttcactaaaactctagaaggtgttacaagggggagggaaggggggcaaagtccttgaacattttctttggctcgtgccatgttatgatcatataccttttaaataaggggaaatagtatctttaaagttaatgtctagccaagagtttagtaaacgaagaattaaactgcactgttgatcggtgctttgtgtaaatacatctttaacatttgggtggagaggggccttaagaaggacagttcattgtaggaaagcaattctgtacatgagtttaagcattcttgttgcattgtctctgcagattctatttttgtttacaatattaaaatgtatgttagcaaaatgggtggattttcaaataaaatgcagcttccacaaaaag

SEQ ID NO: 293576 - DNA, 3547 bp, Homo sapiens
tgttcctcttaccctgcccggctccagctgaccagggaaggggtgggctgaactgaggcgggggcaagggagtgcccgacatcttgtccgactccgcgggtgacacgagccggttctctctggactggtggcagcgcgcggccccgaaccgcgccccaggccggcaggcggggaaggagccggtgggggtagggggtgcggtggggggtggggaccctccggctcttgggggtcccagtccccgccggctgctgagcgggtggggtggtggaggagctgcagagatgtccggccagagcctgacggaccgaatcactgccgcccagcacagtgtcaccggctctgccgtatccaagacagtatgcaaggccacgacccacgagatcatggggcccaagaaaaagcacctggactacttaattcagtgcacaaatgagatgaatgtgaacatcccacagttggcagacagtttatttgaaagaactactaatagtagttgggtggtggtcttcaaatctctcattacaactcatcatttgatggtgtatggaaatgagcgttttattcagtatttggcttcaagaaacacgttgtttaacttaagcaattttttggataaaagtggattgcaaggatatgacatgtctacatttattaggcggtatagtagatatttaaatgagaaagcagtttcatacagacaagttgcatttgatttcacaaaagtgaagagaggggctgatggagttatgagaacaatgaacacagaaaaactcctaaaaactgtaccaattattcagaatcagatggatgcacttcttgattttaatgttaatagcaatgaacttacaaatggggtaataaatgctgccttcatgctcctgttcaaagatgccattagactgtttgcagcatacaatgaaggaattattaatttgttggaaaaatattttgatatgaaaaagaaccaatgcaaagaaggtcttgacatctataagaagttcctaactaggatgacaagaatctcagagttcctcaaagttgcagagcaagttggaattgacagaggtgatataccagacctttcacaggcccctagcagtcttcttgatgctttggaacaacatttagcttccttggaaggaaagaaaatcaaagattctacagctgcaagcagggcaactacactttccaatgcagtgtcttccctggcaagcactggtctatctctgaccaaagtggatgaaagggaaaagcaggcagcattagaggaagaacaggcacgtttgaaagctttaaaggaacagcgcctaaaagaacttgcaaagaaacctcatacctctttaacaactgcagcctctcctgtatccacctcagcaggagggataatgactgcaccagccattgacatattttctacccctagttcttctaacagcacatcaaagctgcccaatgatctgcttgatttgcagcagccaacttttcacccatctgtacatcctatgtcaactgcttctcaggtagcaagtacatggggagatcctttctctgctactgtagatgctgttgatgatgccattccaagcttaaatcctttcctcacaaaaagtagtggtgatgttcacctttccatttcttcagatgtatctacttttactactaggacacctactcatgaaatgtttgttggattcactccttctccagttgcacagccacacccttcagctggccttaatgttgactttgaatctgtgtttggaaataaatctacaaatgttattgtagattctgggggctttgatgaactaggtggacttctcaaaccaacagtggcctctcagaaccagaaccttcctgttgccaaactcccacctagcaagttagtatctgatgacttggattcatctttagccaaccttgtgggcaatcttggcatcggaaatggaaccactaagaatgatgtaaattggagtcaaccaggtgaaaagaagttaactgggggatctaactggcaaccaaaggttgcaccaacaaccgcttggaatgcggcaacaatgcctccacaaatgggaagtgttcctgtaatgacgcaaccaaccttaatatacagccagcctgtcatgagacctccaaacccctttggccctgtatcaggagcacagatacagtttatgtaacttgatggaagaaaatggaattactccaaaaagacaagtgctcaagcagcaaaatccttacttccagcaaaatccaaactgctgtctcttaaatctcttaaactctcttcttccattagaatgctacaagtaactcagtgaaggcccatgaaggaaattgggactagtttataggagaacgtatcaatacagtttataaagccaagaattgctatgatttaagactaagatctgtctttttggtgactaacccttcaattctttcaactcctgttaatacccataatcagtaacctatcaagaaaagcccttatttggaaagtgtgaaatttgtatttggaaaagctgcctggagagaagaactgtgtcctttactgtatttcaacaggactcttttgggggatcaaaattaaaattcctaattatgcattatctttcttttctccagtcctcacaaatacagaaacaataactgaaattaacttttctttttttaaaaaaaattatattcagtttgcagtagacattccttaagtatttgtatttatttatgattatcaattttacataacattaatattgtatcagacctccttatgaaaatgagtatggatgtgcacagtatgtttgatttttatccacaagaatgaatctgattcagaatgcttttctcagctgacatacagagcactaaatattttaaggcaagtccataggtctgaatctcttaagaattctcggcctctgtgggatttagggaagcattataaatgcattaatccttatagtcaattctgtgcctaggattttgccagggaacagttcactgactaggaaaagcactacattttaaattcagcattagtgcattgggaaggatctttactgctttgtgcttggcatgtcattattttccatttgacattagggcctttccaaaatgaatgtgaggaattgctttcacttcaagactttccttcttttcactaaaactctagaaggtgttacaagggggagggaaggggggcaaagtccttgaacattttctttggctcgtgccatgttatgatcatataccttttaaataaggggaaatagtatctttaaagttaatgtctagccaagagtttagtaaacgaagaattaaactgcactgttgatcggtgctttgtgtaaatacatctttaacatttgggtggagaggggccttaagaaggacagttcattgtaggaaagcaattctgtacatgagtttaagcattcttgttgcattgtctctgcagattctatttttgtttacaatattaaaatgtatgttagcaaaatgggtggattttcaaataaaatgcagcttccacaaaaag

SEQ ID NO: 293577 - DNA, 2823 bp, Homo sapiens
taataattatctgactctagaataactttagataaaggatttgatataatacatatttatatcattctagtaggcaaacaacacttttgttgttcctttagcaattcatttaaagactaaagctcttagatagacattcaaaggtgttcgcagtctattaagtggacattctttcatctctgttcttaattatctaaaattctttcccccatccttagatttttttcttcatctttattttttattttgaatctatgcaggaattatctgcacatgccaaaaacagcttcttagccctaatttgtcattaccctctttttttctttgaaagtttactcacaacacacataccaattgtcaatatcaattattcaagtaaacacagctataccaccacgaccagcacactcacctaggacagggaagattggtgcaggatgggtggctctttatagaaacatcttggttattattccattttttaactacctgactgttggctttgtggtgttaacaaataaaaggattttttctaaggattcacttaaaaatatgttaaatgcaattcttctatcttgatgattaggtattttttgtttttgataatttagatatttaagattaataaacaataatatagttactacttttcactttgcatcttttgactaattacaatactaatttatttacttcctttcttcattttgctataatacatttggactgcacagatcctttctctgctactgtagatgctgttgatgatgccattccaagcttaaatcctttcctcacaaaaagtagtggtgatgttcacctttccatttcttcagatgtatctacttttactactaggacacctactcatgaaatgtttgttggattcactccttctccagttgcacagccacacccttcagctggccttaatgttgactttgaatctgtgtttggaaataaatctacaaatgttattgtagattctgggggctttgatgaactaggtggacttctcaaaccaacagtggcctctcagaaccagaaccttcctgttgccaaactcccacctagcaagttagtatctgatgacttggattcatctttagccaaccttgtgggcaatcttggcatcggaaatggaaccactaagaatgatgtaaattggagtcaaccaggtgaaaagaagttaactgggggatctaactggcaaccaaaggttgcaccaacaaccgcttggaatgcggcaacaatgaatggcatgcattttccacaatacgcaccccctgtaatggcctatcctgctactacaccaacaggcatgataggatatggaattcctccacaaatgggaagtgttcctgtaatgacgcaaccaaccttaatatacagccagcctgtcatgagacctccaaacccctttggccctgtatcaggagcacagatacagtttatgtaacttgatggaagaaaatggaattactccaaaaagacaagtgctcaagcagcaaaatccttacttccagcaaaatccaaactgctgtctcttaaatctcttaaactctcttcttccattagaatgctacaagtaactcagtgaaggcccatgaaggaaattgggactagtttataggagaacgtatcaatacagtttataaagccaagaattgctatgatttaagactaagatctgtctttttggtgactaacccttcaattctttcaactcctgttaatacccataatcagtaacctatcaagaaaagcccttatttggaaagtgtgaaatttgtatttggaaaagctgcctggagagaagaactgtgtcctttactgtatttcaacaggactcttttgggggatcaaaattaaaattcctaattatgcattatctttcttttctccagtcctcacaaatacagaaacaataactgaaattaacttttctttttttaaaaaaaattatattcagtttgcagtagacattccttaagtatttgtatttatttatgattatcaattttacataacattaatattgtatcagacctccttatgaaaatgagtatggatgtgcacagtatgtttgatttttatccacaagaatgaatctgattcagaatgcttttctcagctgacatacagagcactaaatattttaaggcaagtccataggtctgaatctcttaagaattctcggcctctgtgggatttagggaagcattataaatgcattaatccttatagtcaattctgtgcctaggattttgccagggaacagttcactgactaggaaaagcactacattttaaattcagcattagtgcattgggaaggatctttactgctttgtgcttggcatgtcattattttccatttgacattagggcctttccaaaatgaatgtgaggaattgctttcacttcaagactttccttcttttcactaaaactctagaaggtgttacaagggggagggaaggggggcaaagtccttgaacattttctttggctcgtgccatgttatgatcatataccttttaaataaggggaaatagtatctttaaagttaatgtctagccaagagtttagtaaacgaagaattaaactgcactgttgatcggtgctttgtgtaaatacatctttaacatttgggtggagaggggccttaagaaggacagttcattgtaggaaagcaattctgtacatgagtttaagcattcttgttgcattgtctctgcagattctatttttgtttacaatattaaaatgtatgttagcaaaatgggtggattttcaaataaaatgcagcttccacaaaaag

SEQ ID NO: 293578 - DNA, 2059 bp, Homo sapiens
tgggcggacgcgtgggcgacccacgcgtccgcggacgcgtggcctctcctgtatccacctcagcaggagggataatgactgcaccagccattgacatattttctacccctagttcttctaacagcacatcaaagctgcccaatgatctgcttgatttgcagcagccaacttttcacccatctgtacatcctatgtcaactgcttctcaggtagcaagtacatggggaggctttgatgaactaggtggacttctcaaaccaacagtggcctctcagaaccagaaccttcctgttgccaaactcccacctagcaagttagtatctgatgacttggattcatctttagccaaccttgtgggcaatcttggcatcggaaatggaaccactaagaatgatgtaaattggagtcaaccaggtgaaaagaagttaactgggggatctaactggcaaccaaaggttgcaccaacaaccgcttggaatgcggcaacaatgaatggcatgcattttccacaatacgcaccccctgtaatggcctatcctgctactacaccaacaggcatgataggatatggaattcctccacaaatgggaagtgttcctgtaatgacgcaaccaaccttaatatacagccagcctgtcatgagacctccaaacccctttggccctgtatcaggagcacagatacagtttatgtaacttgatggaagaaaatggaattactccaaaaagacaagtgctcaagcagcaaaatccttacttccagcaaaatccaaactgctgtctcttaaatctcttaaactctcttcttccattagaatgctacaagtaactcagtgaaggcccatgaaggaaattgggactagtttataggagaacgtatcaatacagtttataaagccaagaattgctatgatttaagactaagatctgtctttttggtgactaacccttcaattctttcaactcctgttaatacccataatcagtaacctatcaagaaaagcccttatttggaaagtgtgaaatttgtatttggaaaagctgcctggagagaagaactgtgtcctttactgtatttcaacaggactcttttgggggatcaaaattaaaattcctaattatgcattatctttcttttctccagtcctcacaaatacagaaacaataactgaaattaacttttctttttttaaaaaaaattatattcagtttgcagtagacattccttaagtatttgtatttatttatgattatcaattttacataacattaatattgtatcagacctccttatgaaaatgagtatggatgtgcacagtatgtttgatttttatccacaagaatgaatctgattcagaatgcttttctcagctgacatacagagcactaaatattttaaggcaagtccataggtctgaatctcttaagaattctcggcctctgtgggatttagggaagcattataaatgcattaatccttatagtcaattctgtgcctaggattttgccagggaacagttcactgactaggaaaagcactacattttaaattcagcattagtgcattgggaaggatctttactgctttgtgcttggcatgtcattattttccatttgacattagggcctttccaaaatgaatgtgaggaattgctttcacttcaagactttccttcttttcactaaaactctagaaggtgttacaagggggagggaaggggggcaaagtccttgaacattttctttggctcgtgccatgttatgatcatataccttttaaataaggggaaatagtatctttaaagttaatgtctagccaagagtttagtaaacgaagaattaaactgcactgttgatcggtgctttgtgtaaatacatctttaacatttgggtggagaggggccttaagaaggacagttcattgtaggaaagcaattctgtacatgagtttaagcattcttgttgcattgtctctgcagattctatttttgtttacaatattaaaatgtatgttagcaaaatgggtggattttcaaataaaatgcagcttccacaaaaag

SEQ ID NO: 293579 - DNA, 2223 bp, Homo sapiens
ggaacttttttcaaagttccagagagctattttttaacctatattgctttagatataagtgagtcttcagaaaattttgctgggctagcaggagaattacatttgttttttttctcttttataatacttctctcttatcccctttaaccctaatgtaattttgtcatgagataagagatgatttctgtcaaagcaaatacagccttctcagtcaattcagtatgaagtggtgactttcttcattttccatttaaagacatttactaatgtctattttttggataacttttccagtgaataaacaaggagaaaaggcaaagacctcctttagaaaaccatagcgtcataaagttccttacaaattctatttcgtctgtttgtaactttaaggcgctttgatgaactaggtggacttctcaaaccaacagtggcctctcagaaccagaaccttcctgttgccaaactcccacctagcaagttagtatctgatgacttggattcatctttagccaaccttgtgggcaatcttggcatcggaaatggaaccactaagaatgatgtaaattggagtcaaccaggtgaaaagaagttaactgggggatctaactggcaaccaaaggttgcaccaacaaccgcttggaatgcggcaacaatgaatggcatgcattttccacaatacgcaccccctgtaatggcctatcctgctactacaccaacaggcatgataggatatggaattcctccacaaatgggaagtgttcctgtaatgacgcaaccaaccttaatatacagccagcctgtcatgagacctccaaacccctttggccctgtatcaggagcacagatacagtttatgtaacttgatggaagaaaatggaattactccaaaaagacaagtgctcaagcagcaaaatccttacttccagcaaaatccaaactgctgtctcttaaatctcttaaactctcttcttccattagaatgctacaagtaactcagtgaaggcccatgaaggaaattgggactagtttataggagaacgtatcaatacagtttataaagccaagaattgctatgatttaagactaagatctgtctttttggtgactaacccttcaattctttcaactcctgttaatacccataatcagtaacctatcaagaaaagcccttatttggaaagtgtgaaatttgtatttggaaaagctgcctggagagaagaactgtgtcctttactgtatttcaacaggactcttttgggggatcaaaattaaaattcctaattatgcattatctttcttttctccagtcctcacaaatacagaaacaataactgaaattaacttttctttttttaaaaaaaattatattcagtttgcagtagacattccttaagtatttgtatttatttatgattatcaattttacataacattaatattgtatcagacctccttatgaaaatgagtatggatgtgcacagtatgtttgatttttatccacaagaatgaatctgattcagaatgcttttctcagctgacatacagagcactaaatattttaaggcaagtccataggtctgaatctcttaagaattctcggcctctgtgggatttagggaagcattataaatgcattaatccttatagtcaattctgtgcctaggattttgccagggaacagttcactgactaggaaaagcactacattttaaattcagcattagtgcattgggaaggatctttactgctttgtgcttggcatgtcattattttccatttgacattagggcctttccaaaatgaatgtgaggaattgctttcacttcaagactttccttcttttcactaaaactctagaaggtgttacaagggggagggaaggggggcaaagtccttgaacattttctttggctcgtgccatgttatgatcatataccttttaaataaggggaaatagtatctttaaagttaatgtctagccaagagtttagtaaacgaagaattaaactgcactgttgatcggtgctttgtgtaaatacatctttaacatttgggtggagaggggccttaagaaggacagttcattgtaggaaagcaattctgtacatgagtttaagcattcttgttgcattgtctctgcagattctatttttgtttacaatattaaaatgtatgttagcaaaatgggtggattttcaaataaaatgcagcttccacaaaaag

SEQ ID NO: 293580 - DNA, 3442 bp, Homo sapiens
tgttcctcttaccctgcccggctccagctgaccagggaaggggtgggctgaactgaggcgggggcaagggagtgcccgacatcttgtccgactccgcgggtgacacgagccggttctctctggactggtggcagcgcgcggccccgaaccgcgccccaggccggcaggcggggaaggagccggtgggggtagggggtgcggtggggggtggggaccctccggctcttgggggtcccagtccccgccggctgctgagcgggtggggtggtggaggagctgcagagatgtccggccagagcctgacggaccgaatcactgccgcccagcacagtgtcaccggctctgccgtatccaagacagtatgcaaggccacgacccacgagatcatggggcccaagaaaaagcacctggactacttaattcagtgcacaaatgagatgaatgtgaacatcccacagttggcagacagtttatttgaaagaactactaatagtagttgggtggtggtcttcaaatctctcattacaactcatcatttgatggtgtatggaaatgagcgttttattcagtatttggcttcaagaaacacgttgtttaacttaagcaattttttggataaaagtggattgcaaggatatgacatgtctacatttattaggcggtatagtagatatttaaatgagaaagcagtttcatacagacaagttgcatttgatttcacaaaagtgaagagaggggctgatggagttatgagaacaatgaacacagaaaaactcctaaaaactgtaccaattattcagaatcagatggatgcacttcttgattttaatgttaatagcaatgaacttacaaatggggtaataaatgctgccttcatgctcctgttcaaagatgccattagactgtttgcagcatacaatgaaggaattattaatttgttggaaaaatattttgatatgaaaaagaaccaatgcaaagaaggtcttgacatctataagaagttcctaactaggatgacaagaatctcagagttcctcaaagttgcagagcaagttggaattgacagaggtgatataccagacctttcacaggcccctagcagtcttcttgatgctttggaacaacatttagcttccttggaaggaaagaaaatcaaagattctacagctgcaagcagggcaactacactttccaatgcagtgtcttccctggcaagcactggtctatctctgaccaaagtggatgaaagggaaaagcaggcagcattagaggaagaacaggcacgtttgaaagctttaaaggaacagcgcctaaaagaacttgcaaagaaacctcatacctctttaacaactgcagcctctcctgtatccacctcagcaggagggataatgactgcaccagccattgacatattttctacccctagttcttctaacagcacatcaaagctgcccaatgatctgcttgatttgcagcagccaacttttcacccatctgtacatcctatgtcaactgcttctcaggtagcaagtacatggggagatcctttctctgctactgtagatgctgttgatgatgccattccaagcttaaatcctttcctcacaaaaagtagtggtgatgttcacctttccatttcttcagatgtatctacttttactactaggacacctactcatgaaatgtttgttggattcactccttctccagttgcacagccacacccttcagctggccttaatgttgactttgaatctgtgtttggaaataaatctacaaatgttattgtagattctgggggctttgatgaactaggtggacttctcaaaccaacagtggcctctcagaaccagaaccttcctgttgccaaactcccacctagcaagttagtatctgatgacttggattcatctttagccaaccttgtgggcaatcttggcatcggaaatggaaccactaagaatgatgtaaattggagtcaaccaggtgaaaagaagttaactgggggatctaactggcaaccaaaggttgcaccaacaaccgcttggaatgcggcaacaatgatacagtttatgtaacttgatggaagaaaatggaattactccaaaaagacaagtgctcaagcagcaaaatccttacttccagcaaaatccaaactgctgtctcttaaatctcttaaactctcttcttccattagaatgctacaagtaactcagtgaaggcccatgaaggaaattgggactagtttataggagaacgtatcaatacagtttataaagccaagaattgctatgatttaagactaagatctgtctttttggtgactaacccttcaattctttcaactcctgttaatacccataatcagtaacctatcaagaaaagcccttatttggaaagtgtgaaatttgtatttggaaaagctgcctggagagaagaactgtgtcctttactgtatttcaacaggactcttttgggggatcaaaattaaaattcctaattatgcattatctttcttttctccagtcctcacaaatacagaaacaataactgaaattaacttttctttttttaaaaaaaattatattcagtttgcagtagacattccttaagtatttgtatttatttatgattatcaattttacataacattaatattgtatcagacctccttatgaaaatgagtatggatgtgcacagtatgtttgatttttatccacaagaatgaatctgattcagaatgcttttctcagctgacatacagagcactaaatattttaaggcaagtccataggtctgaatctcttaagaattctcggcctctgtgggatttagggaagcattataaatgcattaatccttatagtcaattctgtgcctaggattttgccagggaacagttcactgactaggaaaagcactacattttaaattcagcattagtgcattgggaaggatctttactgctttgtgcttggcatgtcattattttccatttgacattagggcctttccaaaatgaatgtgaggaattgctttcacttcaagactttccttcttttcactaaaactctagaaggtgttacaagggggagggaaggggggcaaagtccttgaacattttctttggctcgtgccatgttatgatcatataccttttaaataaggggaaatagtatctttaaagttaatgtctagccaagagtttagtaaacgaagaattaaactgcactgttgatcggtgctttgtgtaaatacatctttaacatttgggtggagaggggccttaagaaggacagttcattgtaggaaagcaattctgtacatgagtttaagcattcttgttgcattgtctctgcagattctatttttgtttacaatattaaaatgtatgttagcaaaatgggtggattttcaaataaaatgcagcttccacaaaaag

SEQ ID NO: 293581 - DNA, 1681 bp, Homo sapiens
ccgagaacccgctggtttattgcgacgggcacggctgcagcgtcgcggtgcatcaagcttgctatggcattgttcaagtacccactggaccgtggttttgcaggaaatgtgaatctcaggagagagcagccagagtggcaccccctgtaatggcctatcctgctactacaccaacaggcatgataggatatggaattcctccacaaatgggaagtgttcctgtaatgacgcaaccaaccttaatatacagccagcctgtcatgagacctccaaacccctttggccctgtatcaggagcacagatacagtttatgtaacttgatggaagaaaatggaattactccaaaaagacaagtgctcaagcagcaaaatccttacttccagcaaaatccaaactgctgtctcttaaatctcttaaactctcttcttccattagaatgctacaagtaactcagtgaaggcccatgaaggaaattgggactagtttataggagaacgtatcaatacagtttataaagccaagaattgctatgatttaagactaagatctgtctttttggtgactaacccttcaattctttcaactcctgttaatacccataatcagtaacctatcaagaaaagcccttatttggaaagtgtgaaatttgtatttggaaaagctgcctggagagaagaactgtgtcctttactgtatttcaacaggactcttttgggggatcaaaattaaaattcctaattatgcattatctttcttttctccagtcctcacaaatacagaaacaataactgaaattaacttttctttttttaaaaaaaattatattcagtttgcagtagacattccttaagtatttgtatttatttatgattatcaattttacataacattaatattgtatcagacctccttatgaaaatgagtatggatgtgcacagtatgtttgatttttatccacaagaatgaatctgattcagaatgcttttctcagctgacatacagagcactaaatattttaaggcaagtccataggtctgaatctcttaagaattctcggcctctgtgggatttagggaagcattataaatgcattaatccttatagtcaattctgtgcctaggattttgccagggaacagttcactgactaggaaaagcactacattttaaattcagcattagtgcattgggaaggatctttactgctttgtgcttggcatgtcattattttccatttgacattagggcctttccaaaatgaatgtgaggaattgctttcacttcaagactttccttcttttcactaaaactctagaaggtgttacaagggggagggaaggggggcaaagtccttgaacattttctttggctcgtgccatgttatgatcatataccttttaaataaggggaaatagtatctttaaagttaatgtctagccaagagtttagtaaacgaagaattaaactgcactgttgatcggtgctttgtgtaaatacatctttaacatttgggtggagaggggccttaagaaggacagttcattgtaggaaagcaattctgtacatgagtttaagcattcttgttgcattgtctctgcagattctatttttgtttacaatattaaaatgtatgttagcaaaatgggtggattttcaaataaaatgcagcttccacaaaaag

SEQ ID NO: 293582 - DNA, 1864 bp, Homo sapiens
agaactatttagaactatttaagatacttttttaaatctaaagatttttaaagctgtaaaaagcatgatgaaatcttagatcactgctgtatctaagtttaagtggtatagttatccttctaataagtctgcttttctgctaatttcaaaacactttttttcactgaccattaatcgacagttcttaatgatcacaagtgtcacttactcacagctgtcttagcaattctttttagtggaactacagctactaattccttgaactcagttgacacacatgagttatactttcttgttcatttttcctttcactatgttaggcaccccctgtaatggcctatcctgctactacaccaacaggcatgataggatatggaattcctccacaaatgggaagtgttcctgtaatgacgcaaccaaccttaatatacagccagcctgtcatgagacctccaaacccctttggccctgtatcaggagcacagatacagtttatgtaacttgatggaagaaaatggaattactccaaaaagacaagtgctcaagcagcaaaatccttacttccagcaaaatccaaactgctgtctcttaaatctcttaaactctcttcttccattagaatgctacaagtaactcagtgaaggcccatgaaggaaattgggactagtttataggagaacgtatcaatacagtttataaagccaagaattgctatgatttaagactaagatctgtctttttggtgactaacccttcaattctttcaactcctgttaatacccataatcagtaacctatcaagaaaagcccttatttggaaagtgtgaaatttgtatttggaaaagctgcctggagagaagaactgtgtcctttactgtatttcaacaggactcttttgggggatcaaaattaaaattcctaattatgcattatctttcttttctccagtcctcacaaatacagaaacaataactgaaattaacttttctttttttaaaaaaaattatattcagtttgcagtagacattccttaagtatttgtatttatttatgattatcaattttacataacattaatattgtatcagacctccttatgaaaatgagtatggatgtgcacagtatgtttgatttttatccacaagaatgaatctgattcagaatgcttttctcagctgacatacagagcactaaatattttaaggcaagtccataggtctgaatctcttaagaattctcggcctctgtgggatttagggaagcattataaatgcattaatccttatagtcaattctgtgcctaggattttgccagggaacagttcactgactaggaaaagcactacattttaaattcagcattagtgcattgggaaggatctttactgctttgtgcttggcatgtcattattttccatttgacattagggcctttccaaaatgaatgtgaggaattgctttcacttcaagactttccttcttttcactaaaactctagaaggtgttacaagggggagggaaggggggcaaagtccttgaacattttctttggctcgtgccatgttatgatcatataccttttaaataaggggaaatagtatctttaaagttaatgtctagccaagagtttagtaaacgaagaattaaactgcactgttgatcggtgctttgtgtaaatacatctttaacatttgggtggagaggggccttaagaaggacagttcattgtaggaaagcaattctgtacatgagtttaagcattcttgttgcattgtctctgcagattctatttttgtttacaatattaaaatgtatgttagcaaaatgggtggattttcaaataaaatgcagcttccacaaaaag

SEQ ID NO: 293583 - DNA, 1621 bp, Homo sapiens
ccgagaacccgctggtttattgcgacgggcacggctgcagcgtcgcggtgcatcaagcttgctatggcattgttcaagtacccactggaccgtggttttgcaggaaatgtgaatctcaggagagagcagccagagtgcctccacaaatgggaagtgttcctgtaatgacgcaaccaaccttaatatacagccagcctgtcatgagacctccaaacccctttggccctgtatcaggagcacagatacagtttatgtaacttgatggaagaaaatggaattactccaaaaagacaagtgctcaagcagcaaaatccttacttccagcaaaatccaaactgctgtctcttaaatctcttaaactctcttcttccattagaatgctacaagtaactcagtgaaggcccatgaaggaaattgggactagtttataggagaacgtatcaatacagtttataaagccaagaattgctatgatttaagactaagatctgtctttttggtgactaacccttcaattctttcaactcctgttaatacccataatcagtaacctatcaagaaaagcccttatttggaaagtgtgaaatttgtatttggaaaagctgcctggagagaagaactgtgtcctttactgtatttcaacaggactcttttgggggatcaaaattaaaattcctaattatgcattatctttcttttctccagtcctcacaaatacagaaacaataactgaaattaacttttctttttttaaaaaaaattatattcagtttgcagtagacattccttaagtatttgtatttatttatgattatcaattttacataacattaatattgtatcagacctccttatgaaaatgagtatggatgtgcacagtatgtttgatttttatccacaagaatgaatctgattcagaatgcttttctcagctgacatacagagcactaaatattttaaggcaagtccataggtctgaatctcttaagaattctcggcctctgtgggatttagggaagcattataaatgcattaatccttatagtcaattctgtgcctaggattttgccagggaacagttcactgactaggaaaagcactacattttaaattcagcattagtgcattgggaaggatctttactgctttgtgcttggcatgtcattattttccatttgacattagggcctttccaaaatgaatgtgaggaattgctttcacttcaagactttccttcttttcactaaaactctagaaggtgttacaagggggagggaaggggggcaaagtccttgaacattttctttggctcgtgccatgttatgatcatataccttttaaataaggggaaatagtatctttaaagttaatgtctagccaagagtttagtaaacgaagaattaaactgcactgttgatcggtgctttgtgtaaatacatctttaacatttgggtggagaggggccttaagaaggacagttcattgtaggaaagcaattctgtacatgagtttaagcattcttgttgcattgtctctgcagattctatttttgtttacaatattaaaatgtatgttagcaaaatgggtggattttcaaataaaatgcagcttccacaaaaag

SEQ ID NO: 293584 - DNA, 1590 bp, Homo sapiens
tccactaagagtatcaggatcagtgacacatgagttacttctgtcatttcttactatgtaggcaccctgtatgctatctgtatacacacagcatgatagatatggacctccacaaatgggaagtgttcctgtaatgacgcaaccaaccttaatatacagccagcctgtcatgagacctccaaacccctttggccctgtatcaggagcacagatacagtttatgtaacttgatggaagaaaatggaattactccaaaaagacaagtgctcaagcagcaaaatccttacttccagcaaaatccaaactgctgtctcttaaatctcttaaactctcttcttccattagaatgctacaagtaactcagtgaaggcccatgaaggaaattgggactagtttataggagaacgtatcaatacagtttataaagccaagaattgctatgatttaagactaagatctgtctttttggtgactaacccttcaattctttcaactcctgttaatacccataatcagtaacctatcaagaaaagcccttatttggaaagtgtgaaatttgtatttggaaaagctgcctggagagaagaactgtgtcctttactgtatttcaacaggactcttttgggggatcaaaattaaaattcctaattatgcattatctttcttttctccagtcctcacaaatacagaaacaataactgaaattaacttttctttttttaaaaaaaattatattcagtttgcagtagacattccttaagtatttgtatttatttatgattatcaattttacataacattaatattgtatcagacctccttatgaaaatgagtatggatgtgcacagtatgtttgatttttatccacaagaatgaatctgattcagaatgcttttctcagctgacatacagagcactaaatattttaaggcaagtccataggtctgaatctcttaagaattctcggcctctgtgggatttagggaagcattataaatgcattaatccttatagtcaattctgtgcctaggattttgccagggaacagttcactgactaggaaaagcactacattttaaattcagcattagtgcattgggaaggatctttactgctttgtgcttggcatgtcattattttccatttgacattagggcctttccaaaatgaatgtgaggaattgctttcacttcaagactttccttcttttcactaaaactctagaaggtgttacaagggggagggaaggggggcaaagtccttgaacattttctttggctcgtgccatgttatgatcatataccttttaaataaggggaaatagtatctttaaagttaatgtctagccaagagtttagtaaacgaagaattaaactgcactgttgatcggtgctttgtgtaaatacatctttaacatttgggtggagaggggccttaagaaggacagttcattgtaggaaagcaattctgtacatgagtttaagcattcttgttgcattgtctctgcagattctatttttgtttacaatattaaaatgtatgttagcaaaatgggtggattttcaaataaaatgcagcttccacaaaaag

SEQ ID NO: 293585 - DNA, 1516 bp, Homo sapiens
ccgagaacccgctggtttattgcgacgggcacggctgcagcgtcgcggtgcatcaagcttgctatggcattgttcaagtacccactggaccgtggttttgcaggaaatgtgaatctcaggagagagcagccagagtgatacagtttatgtaacttgatggaagaaaatggaattactccaaaaagacaagtgctcaagcagcaaaatccttacttccagcaaaatccaaactgctgtctcttaaatctcttaaactctcttcttccattagaatgctacaagtaactcagtgaaggcccatgaaggaaattgggactagtttataggagaacgtatcaatacagtttataaagccaagaattgctatgatttaagactaagatctgtctttttggtgactaacccttcaattctttcaactcctgttaatacccataatcagtaacctatcaagaaaagcccttatttggaaagtgtgaaatttgtatttggaaaagctgcctggagagaagaactgtgtcctttactgtatttcaacaggactcttttgggggatcaaaattaaaattcctaattatgcattatctttcttttctccagtcctcacaaatacagaaacaataactgaaattaacttttctttttttaaaaaaaattatattcagtttgcagtagacattccttaagtatttgtatttatttatgattatcaattttacataacattaatattgtatcagacctccttatgaaaatgagtatggatgtgcacagtatgtttgatttttatccacaagaatgaatctgattcagaatgcttttctcagctgacatacagagcactaaatattttaaggcaagtccataggtctgaatctcttaagaattctcggcctctgtgggatttagggaagcattataaatgcattaatccttatagtcaattctgtgcctaggattttgccagggaacagttcactgactaggaaaagcactacattttaaattcagcattagtgcattgggaaggatctttactgctttgtgcttggcatgtcattattttccatttgacattagggcctttccaaaatgaatgtgaggaattgctttcacttcaagactttccttcttttcactaaaactctagaaggtgttacaagggggagggaaggggggcaaagtccttgaacattttctttggctcgtgccatgttatgatcatataccttttaaataaggggaaatagtatctttaaagttaatgtctagccaagagtttagtaaacgaagaattaaactgcactgttgatcggtgctttgtgtaaatacatctttaacatttgggtggagaggggccttaagaaggacagttcattgtaggaaagcaattctgtacatgagtttaagcattcttgttgcattgtctctgcagattctatttttgtttacaatattaaaatgtatgttagcaaaatgggtggattttcaaataaaatgcagcttccacaaaaag

SEQ ID NO: 293586 - DNA, 2070 bp, Homo sapiens
ggtccctttcacctcccacagtacgtgtgtcagctgcagttcgtcaagataaatgagcaggagacaacttcgtgtaaaaagtgtgtgaacctaggacaggacttttcgacccttatgaagaaagaaaggaaagaatattgcagctagatgtgttgggtccggactgaggtcagagttgcacagctttggacagatagcctggacacaggaaaccatgttctctcaattttaaacaaaaatgcaattatgtattccctcccctatccccccaccaccccccatacacacattaaaattcttaaccatgggtcagcttatatcgaccttttgggtaaaagacattattcctttgaaacttcagaagcacgagtttgttttctgaaaaacacatgccattgcataccttttaacttgacatatgactgaaacttttgtcttaacaatccattttctacaaagactgcccttatatttattaaagatgacaaaaccaaaaccacttcttctttcatacattttctgctttcatgttctgtcattctgagatctttttttctttccctctctctgtcttcttttcccccccagctgtcggcagcatccagcccctccagtcacagtcctcacagagcttcaggaaaggacccctttgcagagctctctttggaggatttcttataaatcactttagatacagtttatgtaacttgatggaagaaaatggaattactccaaaaagacaagtgctcaagcagcaaaatccttacttccagcaaaatccaaactgctgtctcttaaatctcttaaactctcttcttccattagaatgctacaagtaactcagtgaaggcccatgaaggaaattgggactagtttataggagaacgtatcaatacagtttataaagccaagaattgctatgatttaagactaagatctgtctttttggtgactaacccttcaattctttcaactcctgttaatacccataatcagtaacctatcaagaaaagcccttatttggaaagtgtgaaatttgtatttggaaaagctgcctggagagaagaactgtgtcctttactgtatttcaacaggactcttttgggggatcaaaattaaaattcctaattatgcattatctttcttttctccagtcctcacaaatacagaaacaataactgaaattaacttttctttttttaaaaaaaattatattcagtttgcagtagacattccttaagtatttgtatttatttatgattatcaattttacataacattaatattgtatcagacctccttatgaaaatgagtatggatgtgcacagtatgtttgatttttatccacaagaatgaatctgattcagaatgcttttctcagctgacatacagagcactaaatattttaaggcaagtccataggtctgaatctcttaagaattctcggcctctgtgggatttagggaagcattataaatgcattaatccttatagtcaattctgtgcctaggattttgccagggaacagttcactgactaggaaaagcactacattttaaattcagcattagtgcattgggaaggatctttactgctttgtgcttggcatgtcattattttccatttgacattagggcctttccaaaatgaatgtgaggaattgctttcacttcaagactttccttcttttcactaaaactctagaaggtgttacaagggggagggaaggggggcaaagtccttgaacattttctttggctcgtgccatgttatgatcatataccttttaaataaggggaaatagtatctttaaagttaatgtctagccaagagtttagtaaacgaagaattaaactgcactgttgatcggtgctttgtgtaaatacatctttaacatttgggtggagaggggccttaagaaggacagttcattgtaggaaagcaattctgtacatgagtttaagcattcttgttgcattgtctctgcagattctatttttgtttacaatattaaaatgtatgttagcaaaatgggtggattttcaaataaaatgcagcttccacaaaaag

SEQ ID NO: 293587 - DNA, 4522 bp, Homo sapiens
tgttcctcttaccctgcccggctccagctgaccagggaaggggtgggctgaactgaggcgggggcaagggagtgcccgacatcttgtccgactccgcgggtgacacgagccggttctctctggactggtggcagcgcgcggccccgaaccgcgccccaggccggcaggcggggaaggagccggtgggggtagggggtgcggtggggggtggggaccctccggctcttgggggtcccagtccccgccggctgctgagcgggtggggtggtggaggagctgcagagatgtccggccagagcctgacggaccgaatcactgccgcccagcacagtgtcaccggctctgccgtatccaagacagtatgcaaggccacgacccacgagatcatggggcccaagaaaaagcacctggactacttaattcagtgcacaaatgagatgaatgtgaacatcccacagttggcagacagtttatttgaaagaactactaatagtagttgggtggtggtcttcaaatctctcattacaactcatcatttgatggtgtatggaaatgagcgttttattcagtatttggcttcaagaaacacgttgtttaacttaagcaattttttggataaaagtggattgcaaggatatgacatgtctacatttattaggcggtatagtagatatttaaatgagaaagcagtttcatacagacaagttgcatttgatttcacaaaagtgaagagaggggctgatggagttatgagaacaatgaacacagaaaaactcctaaaaactgtaccaattattcagaatcagatggatgcacttcttgattttaatgttaatagcaatgaacttacaaatggggtaataaatgctgccttcatgctcctgttcaaagatgccattagactgtttgcagcatacaatgaaggaattattaatttgttggaaaaatattttgatatgaaaaagaaccaatgcaaagaaggtcttgacatctataagaagttcctaactaggatgacaagaatctcagagttcctcaaagttgcagagcaagttggaattgacagaggtgatataccagacctttcacaggcccctagcagtcttcttgatgctttggaacaacatttagcttccttggaaggaaagaaaatcaaagattctacagctgcaagcagggcaactacactttccaatgcagtgtcttccctggcaagcactggtctatctctgaccaaagtggatgaaagggaaaagcaggcagcattagaggaagaacaggcacgtttgaaagctttaaaggaacagcgcctaaaagaacttgcaaagaaacctcatacctctttaacaactgcagcctctcctgtatccacctcagcaggagggataatgactgcaccagccattgacatattttctacccctagttcttctaacagcacatcaaagctgcccaatgatctgcttgatttgcagcagccaacttttcacccatctgtacatcctatgtcaactgcttctcaggtagcaagtacatggggaggattcactccttctccagttgcacagccacacccttcagctggccttaatgttgactttgaatctgtgtttggaaataaatctacaaatgttattgtagattctgggggctttgatgaactaggtggacttctcaaaccaacagtggcctctcagaaccagaaccttcctgttgccaaactcccacctagcaagttagtatctgatgacttggattcatctttagccaaccttgtgggcaatcttggcatcggaaatggaaccactaagaatgatgtaaattggagtcaaccaggtgaaaagaagttaactgggggatctaactggcaaccaaaggttgcaccaacaaccgcttggaatgcggcaacaatgaatggcatgcattttccacaatacgcaccccctgtaatggcctatcctgctactacaccaacaggcatgataggatatggaattcctccacaaatgggaagtgttcctgtaatgacgcaaccaaccttaatatacagccagcctgtcatgagacctccaaacccctttggccctgtatcaggagcacagatacagtttatgtaacttgatggaagaaaatggaattactccaaaaagacaagtgctcaagcagcaaaatccttacttccagcaaaatccaaactgctgtctcttaaatctcttaaactctcttcttccattagaatgctacaagtaactcagtgaaggcccatgaaggaaattgggactagtttataggagaacgtatcaatacagtttataaagccaagaattgctatgatttaagactaagatctgtctttttggtgactaacccttcaattctttcaactcctgttaatacccataatcagtaacctatcaagaaaagcccttatttggaaagtgtgaaatttgtatttggaaaagctgcctggagagaagaactgtgtcctttactgtatttcaacaggactcttttgggggatcaaaattaaaattcctaattatgcattatctttcttttctccagtcctcacaaatacagaaacaataactgaaattaacttttctttttttaaaaaaaattatattcagtttgcagtagacattccttaagtatttgtatttatttatgattatcaattttacataacattaatattgtatcagacctccttatgaaaatgagtatggatgtgcacagtatgtttgatttttatccacaagaatgaatctgattcagaatgcttttctcagctgacatacagagcactaaatattttaaggcaagtccataggtctgaatctcttaagaattctcggcctctgtgggatttagggaagcattataaatgcattaatccttatagtcaattctgtgcctaggattttgccagggaacagttcactgactaggaaaagcactacattttaaattcagcattagtgcattgggaaggatctttactgctttgtgcttggcatgtcattattttccatttgacattagggcctttccaaaatgaatgtgaggaattgctttcacttcaagactttccttcttttcactaaaactctagaaggtgttacaagggggagggaaggggggcaaagtccttgaacattttctttggctcgtgccatgttatgatcatataccttttaaataaggggaaatagtatctttaaagttaatgtctagccaagagtttagtaaacgaagaattaaactgcactgttgatcggtgctttgtgtaaatacatctttaacatttgggtggagaggggccttaagaaggacagttcattgtaggaaagcaattctgtacatgagtttaagcattcttgttgcattgtctctgcagattctatttttgtttacaatattaaaatgtatgttagcaaaatgggtggattttcaaataaaatgcagcttccacaaaaagttttgttatggtattctggtctgagatgcattttcatttttcctttctctttttattatcaatattgtcatttttccctaataaaatatacccaggtgattatatttgttgatctaataacatggaaggtttgttttatatgaattttcaaaaagatgtctctttacactttttgttaccttgtagactcttattgataaatgcaactacttattaaaattgttcactttttgtcttttgatcagatgcctttagtcaggtaagtttaagggaaaatacgcagtttaatgttttggtacatataattatgtctgccaaagaaacctttgattgtatcatattgcctatttagtagtgcatagggttcagagtacatgataaaggatcaaaagctttgcattgataagtgtctcataatatttgctgtgattggagaaaaaatgtagtcgtagccaataaattttatcagcttttaagtttcagtattattaaaccattttcatataaactgggaagttgtacttttataagttaccctccttaactttacaaatttttgtctcttgtggtgtttgaggaggtgtttatatttaaggtctgtggcttgttttctttcatattgcctttttttttttaagtatgtttcagtatgtgacgtgcttcatagccatttttatttcattgtttaaacaacttttgggctatgtttgataagtgttatccatattttacccattttatatgtaggaatcagaaatcagaaaaggagctgggtgcagtggctcacacctgttattccagtaatttgggaggctgaggtacatgatcacttgagcccaggagttcaagaccagcctgggcaacatggtgaaacgctatctgtaccaaaaatacaaaaattagccaggtatatgcctatagtcccagctacttgggagactgaagtggtaggatcacccgagtccaggatgttgaggctgcagtgagctgggatcatgccactgcatactccaccctgggtgacagagtgagaccctgttt

SEQ ID NO: 293588 - DNA, 3424 bp, Homo sapiens
tgttcctcttaccctgcccggctccagctgaccagggaaggggtgggctgaactgaggcgggggcaagggagtgcccgacatcttgtccgactccgcgggtgacacgagccggttctctctggactggtggcagcgcgcggccccgaaccgcgccccaggccggcaggcggggaaggagccggtgggggtagggggtgcggtggggggtggggaccctccggctcttgggggtcccagtccccgccggctgctgagcgggtggggtggtggaggagctgcagagatgtccggccagagcctgacggaccgaatcactgccgcccagcacagtgtcaccggctctgccgtatccaagacagtatgcaaggccacgacccacgagatcatggggcccaagaaaaagcacctggactacttaattcagtgcacaaatgagatgaatgtgaacatcccacagttggcagacagtttatttgaaagaactactaatagtagttgggtggtggtcttcaaatctctcattacaactcatcatttgatggtgtatggaaatgagcgttttattcagtatttggcttcaagaaacacgttgtttaacttaagcaattttttggataaaagtggattgcaaggatatgacatgtctacatttattaggcggtatagtagatatttaaatgagaaagcagtttcatacagacaagttgcatttgatttcacaaaagtgaagagaggggctgatggagttatgagaacaatgaacacagaaaaactcctaaaaactgtaccaattattcagaatcagatggatgcacttcttgattttaatgttaatagcaatgaacttacaaatggggtaataaatgctgccttcatgctcctgttcaaagatgccattagactgtttgcagcatacaatgaaggaattattaatttgttggaaaaatattttgatatgaaaaagaaccaatgcaaagaaggtcttgacatctataagaagttcctaactaggatgacaagaatctcagagttcctcaaagttgcagagcaagttggaattgacagaggtgatataccagacctttcacaggcccctagcagtcttcttgatgctttggaacaacatttagcttccttggaaggaaagaaaatcaaagattctacagctgcaagcagggcaactacactttccaatgcagtgtcttccctggcaagcactggtctatctctgaccaaagtggatgaaagggaaaagcaggcagcattagaggaagaacaggcacgtttgaaagctttaaaggaacagcgcctaaaagaacttgcaaagaaacctcatacctctttaacaactgcagcctctcctgtatccacctcagcaggagggataatgactgcaccagccattgacatattttctacccctagttcttctaacagcacatcaaagctgcccaatgatctgcttgatttgcagcagccaacttttcacccatctgtacatcctatgtcaactgcttctcaggtagcaagtacatggggaggattcactccttctccagttgcacagccacacccttcagctggccttaatgttgactttgaatctgtgtttggaaataaatctacaaatgttattgtagattctgggggctttgatgaactaggtggacttctcaaaccaacagtggcctctcagaaccagaaccttcctgttgccaaactcccacctagcaagttagtatctgatgacttggattcatctttagccaaccttgtgggcaatcttggcatcggaaatggaaccactaagaatgatgtaaattggagtcaaccaggtgaaaagaagttaactgggggatctaactggcaaccaaaggttgcaccaacaaccgcttggaatgcggcaacaatgaatggcatgcattttccacaatacgcaccccctgtaatggcctatcctgctactacaccaacaggcatgataggatatggaattcctccacaaatgggaagtgttcctgtaatgacgcaaccaaccttaatatacagccagcctgtcatgagacctccaaacccctttggccctgtatcaggagcacagatacagtttatgtaacttgatggaagaaaatggaattactccaaaaagacaagtgctcaagcagcaaaatccttacttccagcaaaatccaaactgctgtctcttaaatctcttaaactctcttcttccattagaatgctacaagtaactcagtgaaggcccatgaaggaaattgggactagtttataggagaacgtatcaatacagtttataaagccaagaattgctatgatttaagactaagatctgtctttttggtgactaacccttcaattctttcaactcctgttaatacccataatcagtaacctatcaagaaaagcccttatttggaaagtgtgaaatttgtatttggaaaagctgcctggagagaagaactgtgtcctttactgtatttcaacaggactcttttgggggatcaaaattaaaattcctaattatgcattatctttcttttctccagtcctcacaaatacagaaacaataactgaaattaacttttctttttttaattatcaattttacataacattaatattgtatcagacctccttatgaaaatgagtatggatgtgcacagtatgtttgatttttatccacaagaatgaatctgattcagaatgcttttctcagctgacatacagagcactaaatattttaaggcaagtccataggtctgaatctcttaagaattctcggcctctgtgggatttagggaagcattataaatgcattaatccttatagtcaattctgtgcctaggattttgccagggaacagttcactgactaggaaaagcactacattttaaattcagcattagtgcattgggaaggatctttactgctttgtgcttggcatgtcattattttccatttgacattagggcctttccaaaatgaatgtgaggaattgctttcacttcaagactttccttcttttcactaaaactctagaaggtgttacaagggggagggaaggggggcaaagtccttgaacattttctttggctcgtgccatgttatgatcatataccttttaaataaggggaaatagtatctttaaagttaatgtctagccaagagtttagtaaacgaagaattaaactgcactgttgatcggtgctttgtgtaaatacatctttaacatttgggtggagaggggccttaagaaggacagttcattgtaggaaagcaattctgtacatgagtttaagcattcttgttgcattgtctctgcagattctatttttgtttacaatattaaaatgtatgttagcaaaatgggtggattttcaaataaaatgcagcttccacaaaaag

SEQ ID NO: 293589 - DNA, 3583 bp, Homo sapiens
tgttcctcttaccctgcccggctccagctgaccagggaaggggtgggctgaactgaggcgggggcaagggagtgcccgacatcttgtccgactccgcgggtgacacgagccggttctctctggactggtggcagcgcgcggccccgaaccgcgccccaggccggcaggcggggaaggagccggtgggggtagggggtgcggtggggggtggggaccctccggctcttgggggtcccagtccccgccggctgctgagcgggtggggtggtggaggagctgcagagatgtccggccagagcctgacggaccgaatcactgccgcccagcacagtgtcaccggctctgccgtatccaagacagtatgcaaggccacgacccacgagatcatggggcccaagaaaaagcacctggactacttaattcagtgcacaaatgagatgaatgtgaacatcccacagttggcagacagtttatttgaaagaactactaatagtagttgggtggtggtcttcaaatctctcattacaactcatcatttgatggtgtatggaaatgagcgttttattcagtatttggcttcaagaaacacgttgtttaacttaagcaattttttggataaaagtggattgcaaggatatgacatgtctacatttattaggcggtatagtagatatttaaatgagaaagcagtttcatacagacaagttgcatttgatttcacaaaagtgaagagaggggctgatggagttatgagaacaatgaacacagaaaaactcctaaaaactgtaccaattattcagaatcagatggatgcacttcttgattttaatgttaatagcaatgaacttacaaatggggtaataaatgctgccttcatgctcctgttcaaagatgccattagactgtttgcagcatacaatgaaggaattattaatttgttggaaaaatattttgatatgaaaaagaaccaatgcaaagaaggtcttgacatctataagaagttcctaactaggatgacaagaatctcagagttcctcaaagttgcagagcaagttggaattgacagaggtgatataccagacctttcacaggcccctagcagtcttcttgatgctttggaacaacatttagcttccttggaaggaaagaaaatcaaagattctacagctgcaagcagggcaactacactttccaatgcagtgtcttccctggcaagcactggtctatctctgaccaaagtggatgaaagggaaaagcaggcagcattagaggaagaacaggcacgtttgaaagctttaaaggaacagcgcctaaaagaacttgcaaagaaacctcatacctctttaacaactgcagcctctcctgtatccacctcagcaggagggataatgactgcaccagccattgacatattttctacccctagttcttctaacagcacatcaaagctgcccaatgatctgcttgatttgcagcagccaacttttcacccatctgtacatcctatgtcaactgcttctcaggtagcaagtacatggggaggattcactccttctccagttgcacagccacacccttcagctggccttaatgttgactttgaatctgtgtttggaaataaatctacaaatgttattgtagattctgggggctttgatgaactaggtggacttctcaaaccaacagtggcctctcagaaccagaaccttcctgttgccaaactcccacctagcaagttagtatctgatgacttggattcatctttagccaaccttgtgggcaatcttggcatcggaaatggaaccactaagaatgatgtaaattggagtcaaccaggtgaaaagaagttaactgggggatctaactggcaaccaaaggttgcaccaacaaccgcttggaatgcggcaacaatgaatggcatgcattttccacaatacgcaccccctgtaatggcctatcctgctactacaccaacaggcatgataggatatggaattcctccacaaatgggaagtgttcctgtaatgacgcaaccaaccttaatatacagccagcctgtcatgagacctccaaacccctttggccctgtatcaggagcacagatacagtttatgtaacttgatggaagaaaatggaattactccaaaaagacaagtgctcaagcagcaaaatccttacttccagcaaaatccaaactgctgtctcttaaatctcttaaactctcttcttccattagaatgctacaagtaactcagtgaaggcccatgaaggaaattgggactagtttataggagaacgtatcaatacagtttataaagccaagaattgctatgatttaagactaagatctgtctttttggtgactaacccttcaattctttcaactcctgttaatacccataatcagtaacctatcaagaaaagcccttatttggaaagtgtgaaatttgtatttggaaaagctgcctggagagaagaactgtgtcctttactgtatttcaacaggactcttttgggggatcaaaattaaaattcctaattatgcattatctttcttttctccagtcctcacaaatacagaaacaataactgaaattaacttttctttttttaaaaaaaattatattcagtttgcagtagacattccttaagtatttgtatttatttatgattatcaattttacataacattaatattgtatcagacctccttatgaaaatgagtatggatgtgcacagtatgtttgatttttatccacaagaatgaatctgattcagaatgcttttctcagctgacatacagagcactaaatattttaaggcaagtccataggtctgaatctcttaagaattctcggcctctgtgggatttagggaagcattataaatgcattaatccttatagtcaattctgtgcctaggattttgccagggaacagttcactgactaggaaaagcactacattttaaattcagcattagtgcattgggaaggatctttactgctttgtgcttggcatgtcattattttccatttgacattagggcctttccaaaatgaatgtgaggaattgctttcacttcaagactttccttcttttcactaaaactctagaaggtgttacaagggggagggaaggggggcaaagtccttgaacattttctttggctcgtgccatgttatgatcatataccttttaaataaggggaaatagtatctttaaagttaatgtctagccaagagtttagtaaacgaagaattaaactgcactgttgatcggtgctttgtgtaaatacatctttaacatttgggtggagaggggccttaagaaggacagttcattgtaggaaagcaattctgtacatgagtttaagcattcttgttgcattgtctctgcagattctatttttgtttacaatattaaaatgtatgttagcaaaatgggtggattttcaaataaaatgcagcttccacaaaaagttttgttatggtattctggtctgagatgcattttcatttttcctttctctttttattatcaatattgtcatttttccctaataaaatatacccaggtgatta

SEQ ID NO: 293590 - DNA, 4468 bp, Homo sapiens
tgttcctcttaccctgcccggctccagctgaccagggaaggggtgggctgaactgaggcgggggcaagggagtgcccgacatcttgtccgactccgcgggtgacacgagccggttctctctggactggtggcagcgcgcggccccgaaccgcgccccaggccggcaggcggggaaggagccggtgggggtagggggtgcggtggggggtggggaccctccggctcttgggggtcccagtccccgccggctgctgagcgggtggggtggtggaggagctgcagagatgtccggccagagcctgacggaccgaatcactgccgcccagcacagtgtcaccggctctgccgtatccaagacagtatgcaaggccacgacccacgagatcatggggcccaagaaaaagcacctggactacttaattcagtgcacaaatgagatgaatgtgaacatcccacagttggcagacagtttatttgaaagaactactaatagtagttgggtggtggtcttcaaatctctcattacaactcatcatttgatggtgtatggaaatgagcgttttattcagtatttggcttcaagaaacacgttgtttaacttaagcaattttttggataaaagtggattgcaaggatatgacatgtctacatttattaggcggtatagtagatatttaaatgagaaagcagtttcatacagacaagttgcatttgatttcacaaaagtgaagagaggggctgatggagttatgagaacaatgaacacagaaaaactcctaaaaactgtaccaattattcagaatcagatggatgcacttcttgattttaatgttaatagcaatgaacttacaaatggggtaataaatgctgccttcatgctcctgttcaaagatgccattagactgtttgcagcatacaatgaaggaattattaatttgttggaaaaatattttgatatgaaaaagaaccaatgcaaagaaggtcttgacatctataagaagttcctaactaggatgacaagaatctcagagttcctcaaagttgcagagcaagttggaattgacagaggtgatataccagacctttcacaggcccctagcagtcttcttgatgctttggaacaacatttagcttccttggaaggaaagaaaatcaaagattctacagctgcaagcagggcaactacactttccaatgcagtgtcttccctggcaagcactggtctatctctgaccaaagtggatgaaagggaaaagcaggcagcattagaggaagaacaggcacgtttgaaagctttaaaggaacagcgcctaaaagaacttgcaaagaaacctcatacctctttaacaactgcagcctctcctgtatccacctcagcaggagggataatgactgcaccagccattgacatattttctacccctagttcttctaacagcacatcaaagctgcccaatgatctgcttgatttgcagcagccaacttttcacccatctgtacatcctatgtcaactgcttctcaggtagcaagtacatggggaggattcactccttctccagttgcacagccacacccttcagctggccttaatgttgactttgaatctgtgtttggaaataaatctacaaatgttattgtagattctgggggctttgatgaactaggtggacttctcaaaccaacagtggcctctcagaaccagaaccttcctgttgccaaactcccacctagcaagttagtatctgatgacttggattcatctttagccaaccttgtgggcaatcttggcatcggaaatggaaccactaagaatgatgtaaattggagtcaaccaggtgaaaagaagttaactgggggatctaactggcaaccaaaggttgcaccaacaaccgcttggaatgcggcaacaatgaatggcatgcattttccacaatacgcaccccctgtaatggcctatcctgctactacaccaacaggcatgataggatatggaattcctccacaaatgggaagtgttcctgtaatgacgcaaccaaccttaatatacagccagcctgtcatgagacctccaaacccctttggccctgtatcaggagcacagatacagtttatgtaacttgatggaagaaaatggaattactccaaaaagacaagtgctcaagcagcaaaatccttacttccagcaaaatccaaactgctgtctcttaaatctcttaaactctcttcttccattagaatgctacaagtaactcagtgaaggcccatgaaggaaattgggactagtttataggagaacgtatcaatacagtttataaagccaagaattgctatgatttaagactaagatctgtctttttggtgactaacccttcaattctttcaactcctgttaatacccataatcagtaacctatcaagaaaagcccttatttggaaagtgtgaaatttgtatttggaaaagctgcctggagagaagaactgtgtcctttactgtatttcaacaggactcttttgggggatcaaaattaaaattcctaattatgcattatctttcttttctccagtcctcacaaatacagaaacaataactgaaattaacttttctttttttaaaaaaaattatattcagtttgcagtagacattccttaagtatttgtatttatttatgattatcaattttacataacattaatattgtatcagacctccttatgaaaatgagtatggatgtgcacagtatgtttgatttttatccacaagaatgaatctgattcagaatgcttttctcagctgacatacagagcactaaatattttaaggcaagtccataggtctgaatctcttaagaattctcggcctctgtgggatttagggaagcattataaatgcattaatccttatagtcaattctgtgcctaggattttgccagggaacagttcactgactaggaaaagcactacattttaaattcagcattagtgcattgggaaggatctttactgctttgtgcttggcatgtcattattttccatttgacattagggcctttccaaaatgaatgtgaggaattgctttcacttcaagactttccttcttttcacattttctttggctcgtgccatgttatgatcatataccttttaaataaggggaaatagtatctttaaagttaatgtctagccaagagtttagtaaacgaagaattaaactgcactgttgatcggtgctttgtgtaaatacatctttaacatttgggtggagaggggccttaagaaggacagttcattgtaggaaagcaattctgtacatgagtttaagcattcttgttgcattgtctctgcagattctatttttgtttacaatattaaaatgtatgttagcaaaatgggtggattttcaaataaaatgcagcttccacaaaaagttttgttatggtattctggtctgagatgcattttcatttttcctttctctttttattatcaatattgtcatttttccctaataaaatatacccaggtgattatatttgttgatctaataacatggaaggtttgttttatatgaattttcaaaaagatgtctctttacactttttgttaccttgtagactcttattgataaatgcaactacttattaaaattgttcactttttgtcttttgatcagatgcctttagtcaggtaagtttaagggaaaatacgcagtttaatgttttggtacatataattatgtctgccaaagaaacctttgattgtatcatattgcctatttagtagtgcatagggttcagagtacatgataaaggatcaaaagctttgcattgataagtgtctcataatatttgctgtgattggagaaaaaatgtagtcgtagccaataaattttatcagcttttaagtttcagtattattaaaccattttcatataaactgggaagttgtacttttataagttaccctccttaactttacaaatttttgtctcttgtggtgtttgaggaggtgtttatatttaaggtctgtggcttgttttctttcatattgcctttttttttttaagtatgtttcagtatgtgacgtgcttcatagccatttttatttcattgtttaaacaacttttgggctatgtttgataagtgttatccatattttacccattttatatgtaggaatcagaaatcagaaaaggagctgggtgcagtggctcacacctgttattccagtaatttgggaggctgaggtacatgatcacttgagcccaggagttcaagaccagcctgggcaacatggtgaaacgctatctgtaccaaaaatacaaaaattagccaggtatatgcctatagtcccagctacttgggagactgaagtggtaggatcacccgagtccaggatgttgaggctgcagtgagctgggatcatgccactgcatactccaccctgggtgacagagtgagaccctgttt

SEQ ID NO: 293591 - DNA, 3784 bp, Homo sapiens
tgttcctcttaccctgcccggctccagctgaccagggaaggggtgggctgaactgaggcgggggcaagggagtgcccgacatcttgtccgactccgcgggtgacacgagccggttctctctggactggtggcagcgcgcggccccgaaccgcgccccaggccggcaggcggggaaggagccggtgggggtagggggtgcggtggggggtggggaccctccggctcttgggggtcccagtccccgccggctgctgagcgggtggggtggtggaggagctgcagagatgtccggccagagcctgacggaccgaatcactgccgcccagcacagtgtcaccggctctgccgtatccaagacagtatgcaaggccacgacccacgagatcatggggcccaagaaaaagcacctggactacttaattcagtgcacaaatgagatgaatgtgaacatcccacagttggcagacagtttatttgaaagaactactaatagtagttgggtggtggtcttcaaatctctcattacaactcatcatttgatggtgtatggaaatgagcgttttattcagtatttggcttcaagaaacacgttgtttaacttaagcaattttttggataaaagtggattgcaaggatatgacatgtctacatttattaggcggtatagtagatatttaaatgagaaagcagtttcatacagacaagttgcatttgatttcacaaaagtgaagagaggggctgatggagttatgagaacaatgaacacagaaaaactcctaaaaactgtaccaattattcagaatcagatggatgcacttcttgattttaatgttaatagcaatgaacttacaaatggggtaataaatgctgccttcatgctcctgttcaaagatgccattagactgtttgcagcatacaatgaaggaattattaatttgttggaaaaatattttgatatgaaaaagaaccaatgcaaagaaggtcttgacatctataagaagttcctaactaggatgacaagaatctcagagttcctcaaagttgcagagcaagttggaattgacagaggtgatataccagacctttcacaggcccctagcagtcttcttgatgctttggaacaacatttagcttccttggaaggaaagaaaatcaaagattctacagctgcaagcagggcaactacactttccaatgcagtgtcttccctggcaagcactggtctatctctgaccaaagtggatgaaagggaaaagcaggcagcattagaggaagaacaggcacgtttgaaagctttaaaggaacagcgcctaaaagaacttgcaaagaaacctcatacctctttaacaactgcagcctctcctgtatccacctcagcaggagggataatgactgcaccagccattgacatattttctacccctagttcttctaacagcacatcaaagctgcccaatgatctgcttgatttgcagcagccaacttttcacccatctgtacatcctatgtcaactgcttctcaggtagcaagtacatggggaggattcactccttctccagttgcacagccacacccttcagctggccttaatgttgactttgaatctgtgtttggaaataaatctacaaatgttattgtagattctgggggctttgatgaactaggtggacttctcaaaccaacagtggcctctcagaaccagaaccttcctgttgccaaactcccacctagcaagttagtatctgatgacttggattcatctttagccaaccttgtgggcaatcttggcatcggaaatggaaccactaagaatgatgtaaattggagtcaaccaggtgaaaagaagttaactgggggatctaactggcaaccaaaggttgcaccaacaaccgcttggaatgcggcaacaatgaatggcatgcattttccacaatacgcaccccctgtaatggcctatcctgctactacaccaacaggcatgataggatatggaattcctccacaaatgggaagtgttcctgtaatgacgcaaccaaccttaatatacagccagcctgtcatgagacctccaaacccctttggccctgtatcaggagcacagatacagtttatgtaacttgatggaagaaaatggaattactccaaaaagacaagtgctcaagcagcaaaatccttacttccagcaaaatccaaactgctgtctcttaaatctcttaaactctcttcttccattagaatgctacaagtaactcagtgaaggcccatgaaggaaattgggactagtttataggagaacgtatcaatacagtttataaagccaagaattgctatgatttaagactaagatctgtctttttggtgactaacccttcaattctttcaactcctgttaatacccataatcagtaacctatcaagaaaagcccttatttggaaagtgtgaaatttgtatttggaaaagctgcctggagagaagaactgtgtcctttactgtatttcaacaggactcttttgggggatcaaaattaaaattcctaattatgcattatctttcttttctccagtcctcacaaatacagaaacaataactgaaattaacttttctttttttaaaaaaaattatattcagtttgcagtagacattccttaagtatttgtatttatttatgattatcaattttacataacattaatattgtatcagacctccttatgaaaatgagtatggatgtgcacagtatgtttgatttttatccacaagaatgaatctgattcagaatgcttttctcagctgacatacagagcactaaatattttaaggcaagtccataggtctgaatctcttaagaattctcggcctctgtgggatttagggaagcattataaatgcattaatccttatagtcaattctgtgcctaggattttgccagggaacagttcactgactaggaaaagcactacattttaaattcagcattagtgcattgggaaggatctttactgctttgtgcttggcatgtcattattttccatttgacattagggcctttccaaaatgaatgtgaggaattgctttcacttcaagactttccttcttttcactaaaactctagaaggtgttacaagggggagggaaggggggcaaagtccttgaacattttctttggctcgtgccatgttatgatcatataccttttaaataaggggaaatagtatctttaaagttaatgtctagccaagagtttagtaaacgaagaattaaactgcactgttgatcggtgctttgtgtaaatacatctttaacatttgggtggagaggggccttaagaaggacagttcattgtaggaaagcaattctgtacatgagtttaagcattcttgttgcattgtctctgcagattctatttttgtttacaatattaaaatgtatgttagcaaaatgggtggattttcaaataaaatgcagcttccacaaaaagaaaaaaaaaccaaaaaaaagggggggggcgcccaaagtttccccccgcggaggggccccggagttgttacggccttccccgcgctttgtcttggtcacagaggggggcccccctatgaggagagacgcggattatttaatagacgctgaggcccgtgggccggcgcgtctttcacccaggggtcgtctgcgctgcggacacaaccgtgctggtagcttcgggggacatctttgggggagaggggacacccctatcctcttcgtggggggcgtcggcacctcatgtgggcgaccaccctacctg

SEQ ID NO: 293592 - DNA, 3532 bp, Homo sapiens
tgttcctcttaccctgcccggctccagctgaccagggaaggggtgggctgaactgaggcgggggcaagggagtgcccgacatcttgtccgactccgcgggtgacacgagccggttctctctggactggtggcagcgcgcggccccgaaccgcgccccaggccggcaggcggggaaggagccggtgggggtagggggtgcggtggggggtggggaccctccggctcttgggggtcccagtccccgccggctgctgagcgggtggggtggtggaggagctgcagagatgtccggccagagcctgacggaccgaatcactgccgcccagcacagtgtcaccggctctgccgtatccaagacagtatgcaaggccacgacccacgagatcatggggcccaagaaaaagcacctggactacttaattcagtgcacaaatgagatgaatgtgaacatcccacagttggcagacagtttatttgaaagaactactaatagtagttgggtggtggtcttcaaatctctcattacaactcatcatttgatggtgtatggaaatgagcgttttattcagtatttggcttcaagaaacacgttgtttaacttaagcaattttttggataaaagtggattgcaaggatatgacatgtctacatttattaggcggtatagtagatatttaaatgagaaagcagtttcatacagacaagttgcatttgatttcacaaaagtgaagagaggggctgatggagttatgagaacaatgaacacagaaaaactcctaaaaactgtaccaattattcagaatcagatggatgcacttcttgattttaatgttaatagcaatgaacttacaaatggggtaataaatgctgccttcatgctcctgttcaaagatgccattagactgtttgcagcatacaatgaaggaattattaatttgttggaaaaatattttgatatgaaaaagaaccaatgcaaagaaggtcttgacatctataagaagttcctaactaggatgacaagaatctcagagttcctcaaagttgcagagcaagttggaattgacagaggtgatataccagacctttcacaggcccctagcagtcttcttgatgctttggaacaacatttagcttccttggaaggaaagaaaatcaaagattctacagctgcaagcagggcaactacactttccaatgcagtgtcttccctggcaagcactggtctatctctgaccaaagtggatgaaagggaaaagcaggcagcattagaggaagaacaggcacgtttgaaagctttaaaggaacagcgcctaaaagaacttgcaaagaaacctcatacctctttaacaactgcagcctctcctgtatccacctcagcaggagggataatgactgcaccagccattgacatattttctacccctagttcttctaacagcacatcaaagctgcccaatgatctgcttgatttgcagcagccaacttttcacccatctgtacatcctatgtcaactgcttctcaggtagcaagtacatggggaggattcactccttctccagttgcacagccacacccttcagctggccttaatgttgactttgaatctgtgtttggaaataaatctacaaatgttattgtagattctgggggctttgatgaactaggtggacttctcaaaccaacagtggcctctcagaaccagaaccttcctgttgccaaactcccacctagcaagttagtatctgatgacttggattcatctttagccaaccttgtgggcaatcttggcatcggaaatggaaccactaagaatgatgtaaattggagtcaaccaggtgaaaagaagttaactgggggatctaactggcaaccaaaggttgcaccaacaaccgcttggaatgcggcaacaatgaatggcatgcattttccacaatacgcaccccctgtaatggcctatcctgctactacaccaacaggcatgataggatatggaattcctccacaaatgggaagtgttcctgtaatgacgcaaccaaccttaatatacagccagcctgtcatgagacctccaaacccctttggccctgtatcaggagcacagatacagtttatgtaacttgatggaagaaaatggaattactccaaaaagacaagtgctcaagcagcaaaatccttacttccagcaaaatccaaactgctgtctcttaaatctcttaaactctcttcttccattagaatgctacaagtaactcagtgaaggcccatgaaggaaattgggactagtttataggagaacgtatcaatacagtttataaagccaagaattgctatgatttaagactaagatctgtctttttggtgactaacccttcaattctttcaactcctgttaatacccataatcagtaacctatcaagaaaagcccttatttggaaagtgtgaaatttgtatttggaaaagctgcctggagagaagaactgtgtcctttactgtatttcaacaggactcttttgggggatcaaaattaaaattcctaattatgcattatctttcttttctccagtcctcacaaatacagaaacaataactgaaattaacttttctttttttaaaaaaaattatattcagtttgcagtagacattccttaagtatttgtatttatttatgattatcaattttacataacattaatattgtatcagacctccttatgaaaatgagtatggatgtgcacagtatgtttgatttttatccacaagaatgaatctgattcagaatgcttttctcagctgacatacagagcactaaatattttaaggcaagtccataggtctgaatctcttaagaattctcggcctctgtgggatttagggaagcattataaatgcattaatccttatagtcaattctgtgcctaggattttgccagggaacagttcactgactaggaaaagcactacattttaaattcagcattagtgcattgggaaggatctttactgctttgtgcttggcatgtcattattttccatttgacattagggcctttccaaaatgaatgtgaggaattgctttcacttcaagactttccttcttttcactaaaactctagaaggtgttacaagggggagggaaggggggcaaagtccttgaacattttctttggctcgtgccatgttatgatcatataccttttaaataaggggaaatagtatctttaaagttaatgtctagccaagagtttagtaaacgaagaattaaactgcactgttgatcggtgctttgtgtaaatacatctttaacatttgggtggagaggggccttaagaaggacagttcattgtaggaaagcaattctgtacatgagtttaagcattcttgttgcattgtctctgcagattctatttttgtttacaatattaaaatgtatgttagcaaaatgggtggattttcaaataaaatgcagcttccacaaaaaggtgaaacgaagaattaaactgcactgttgatcgggtgctttgtgtaaatac

SEQ ID NO: 293593 - DNA, 3220 bp, Homo sapiens
  misc_feature (3148)..(3148): n is a, c, g, or t
tgttcctcttaccctgcccggctccagctgaccagggaaggggtgggctgaactgaggcgggggcaagggagtgcccgacatcttgtccgactccgcgggtgacacgagccggttctctctggactggtggcagcgcgcggccccgaaccgcgccccaggccggcaggcggggaaggagccggtgggggtagggggtgcggtggggggtggggaccctccggctcttgggggtcccagtccccgccggctgctgagcgggtggggtggtggaggagctgcagagatgtccggccagagcctgacggaccgaatcactgccgcccagcacagtgtcaccggctctgccgtatccaagacagtatgcaaggccacgacccacgagatcatggggcccaagaaaaagcacctggactacttaattcagtgcacaaatgagatgaatgtgaacatcccacagttggcagacagtttatttgaaagaactactaatagtagttgggtggtggtcttcaaatctctcattacaactcatcatttgatggtgtatggaaatgagcgttttattcagtatttggcttcaagaaacacgttgtttaacttaagcaattttttggataaaagtggattgcaaggatatgacatgtctacatttattaggcggtatagtagatatttaaatgagaaagcagtttcatacagacaagttgcatttgatttcacaaaagtgaagagaggggctgatggagttatgagaacaatgaacacagaaaaactcctaaaaactgtaccaattattcagaatcagatggatgcacttcttgattttaatgttaatagcaatgaacttacaaatggggtaataaatgctgccttcatgctcctgttcaaagatgccattagactgtttgcagcatacaatgaaggaattattaatttgttggaaaaatattttgatatgaaaaagaaccaatgcaaagaaggtcttgacatctataagaagttcctaactaggatgacaagaatctcagagttcctcaaagttgcagagcaagttggaattgacagaggtgatataccagacctttcacaggcccctagcagtcttcttgatgctttggaacaacatttagcttccttggaaggaaagaaaatcaaagattctacagctgcaagcagggcaactacactttccaatgcagtgtcttccctggcaagcactggtctatctctgaccaaagtggatgaaagggaaaagcaggcagcattagaggaagaacaggcacgtttgaaagctttaaaggaacagcgcctaaaagaacttgcaaagaaacctcatacctctttaacaactgcagcctctcctgtatccacctcagcaggagggataatgactgcaccagccattgacatattttctacccctagttcttctaacagcacatcaaagctgcccaatgatctgcttgatttgcagcagccaacttttcacccatctgtacatcctatgtcaactgcttctcaggtagcaagtacatggggaggattcactccttctccagttgcacagccacacccttcagctggccttaatgttgactttgaatctgtgtttggaaataaatctacaaatgttattgtagattctgggggctttgatgaactaggtggacttctcaaaccaacagtggcctctcagaaccagaaccttcctgttgccaaactcccacctagcaagttagtatctgatgacttggattcatctttagccaaccttgtgggcaatcttggcatcggaaatggaaccactaagaatgatgtaaattggagtcaaccaggtgaaaagaagttaactgggggatctaactggcaaccaaaggttgcaccaacaaccgcttggaatgcggcaacaatgaatggcatgcattttccacaatacgcaccccctgtaatggcctatcctgctactacaccaacaggcatgataggatatggaattcctccacaaatgggaagtgttcctgtaatgacgcaaccaaccttaatatacagccagcctgtcatgagacctccaaacccctttggccctgtatcaggagcacagatacagtttatgtaacttgatggaagaaaatggaattactccaaaaagacaagtgctcaagcagcaaaatccttacttccagcaaaatccaaactgctgtctcttaaatctcttaaactctcttcttccattagaatgctacaagtaactcagtgaaggcccatgaaggaaattgggactagtttataggagaacgtatcaatacagtttataaagccaagaattgctatgatttaagactaagatctgtctttttggtgactaacccttcaattctttcaactcctgttaatacccataatcagtaacctatcaagaaaagcccttatttggaaagtgtgaaatttgtatttggaaaagctgcctggagagaagaactgtgtcctttactgtatttcaacaggactcttttgggggatcaaaattaaaattcctaattatgcattatctttcttttctccagtcctcacaaatacagaaacaataactgaaattaacttttctttttttaaaaaaaattatattcagtttgcagtagacattccttaagtatttgtatttatttatgattatcaattttacataacattaatattgtatcagacctccttatgaaaatgagtatggatgtgcacagtatgtttgatttttatccacaagaatgaatctgattcagaatgcttttctcagctgacatacagagcactaaatattttaaggcaagtccataggtctgaatctcttaagaattctcggcctctgtgggatttagggaagcattataaatgcattaatccttatagtcaattctgtgcctaggattttgccagggaacagttcactgactaggaaaagcactacattttaaattcagcattagtgcattgggaaggatctttactgctttgtgcttggcatgtcattattttccatttgacattagggcctttccaaaatgaatgtgaggaattgctttcacttcaagactttccttcttttcactaaaactctagaaggtgttacaagggggagggaggaaggggctntcctttcccttctttatttgtctccttttatttctcaatgattgccacttacaaaaggccctaatttttgtt

SEQ ID NO: 293594 - DNA, 2706 bp, Homo sapiens
tgttcctcttaccctgcccggctccagctgaccagggaaggggtgggctgaactgaggcgggggcaagggagtgcccgacatcttgtccgactccgcgggtgacacgagccggttctctctggactggtggcagcgcgcggccccgaaccgcgccccaggccggcaggcggggaaggagccggtgggggtagggggtgcggtggggggtggggaccctccggctcttgggggtcccagtccccgccggctgctgagcgggtggggtggtggaggagctgcagagatgtccggccagagcctgacggaccgaatcactgccgcccagcacagtgtcaccggctctgccgtatccaagacagtatgcaaggccacgacccacgagatcatggggcccaagaaaaagcacctggactacttaattcagtgcacaaatgagatgaatgtgaacatcccacagttggcagacagtttatttgaaagaactactaatagtagttgggtggtggtcttcaaatctctcattacaactcatcatttgatggtgtatggaaatgagcgttttattcagtatttggcttcaagaaacacgttgtttaacttaagcaattttttggataaaagtggattgcaaggatatgacatgtctacatttattaggcggtatagtagatatttaaatgagaaagcagtttcatacagacaagttgcatttgatttcacaaaagtgaagagaggggctgatggagttatgagaacaatgaacacagaaaaactcctaaaaactgtaccaattattcagaatcagatggatgcacttcttgattttaatgttaatagcaatgaacttacaaatggggtaataaatgctgccttcatgctcctgttcaaagatgccattagactgtttgcagcatacaatgaaggaattattaatttgttggaaaaatattttgatatgaaaaagaaccaatgcaaagaaggtcttgacatctataagaagttcctaactaggatgacaagaatctcagagttcctcaaagttgcagagcaagttggaattgacagaggtgatataccagacctttcacaggcccctagcagtcttcttgatgctttggaacaacatttagcttccttggaaggaaagaaaatcaaagattctacagctgcaagcagggcaactacactttccaatgcagtgtcttccctggcaagcactggtctatctctgaccaaagtggatgaaagggaaaagcaggcagcattagaggaagaacaggcacgtttgaaagctttaaaggaacagcgcctaaaagaacttgcaaagaaacctcatacctctttaacaactgcagcctctcctgtatccacctcagcaggagggataatgactgcaccagccattgacatattttctacccctagttcttctaacagcacatcaaagctgcccaatgatctgcttgatttgcagcagccaacttttcacccatctgtacatcctatgtcaactgcttctcaggtagcaagtacatggggaggattcactccttctccagttgcacagccacacccttcagctggccttaatgttgactttgaatctgtgtttggaaataaatctacaaatgttattgtagattctgggggctttgatgaactaggtggacttctcaaaccaacagtggcctctcagaaccagaaccttcctgttgccaaactcccacctagcaagttagtatctgatgacttggattcatctttagccaaccttgtgggcaatcttggcatcggaaatggaaccactaagaatgatgtaaattggagtcaaccaggtgaaaagaagttaactgggggatctaactggcaaccaaaggttgcaccaacaaccgcttggaatgcggcaacaatgaatggcatgcattttccacaatacgcaccccctgtaatggcctatcctgctactacaccaacaggcatgataggatatggaattcctccacaaatgggaagtgttcctgtaatgacgcaaccaaccttaatatacagccagcctgtcatgagacctccaaacccctttggccctgtatcaggagcacagatacagtttatgtaacttgatggaagaaaatggaattactccaaaaagacaagtgctcaagcagcaaaatccttacttccagcaaaatccaaactgctgtctcttaaatctcttaaactctcttcttccattagaatgctacaagtaactcagtgaaggcccatgaaggaaattgggactagtttataggagaacgtatcaatacagtttataaagccaagaattgctatgatttaagactaagatctgtctttttggtgactaacccttcaattctttcaactcctgttaatacccataatcagtaacctatcaagaaaagcccttatttggaaagtgtgaaatttgtatttggaaaagctgcctggagagaagaactgtgtcctttactgtatttcaacaggactcttttgggggatcaaaattaaaattcctaattatgcattatctttcttttctccagtcctcacaaatacagaaacaataactgaaattaacttttctttttttattatcaattttacataaccttattttgtgtcaaacttcttttgtgagttgggtgtgccggatgttgatttttccacagatgattggttcgggt

SEQ ID NO: 293595 - DNA, 839 bp, Homo sapiens
tgggcggacgcgtgggcgacccacgcgtccgcggacgcgtggtgccgcccagcacagtgtcaccggctctgccgtatccaagacagtatgcaaggccacgacccacgagatcatggggcccaagaaaaagcacctggactacttaattcagtgcacaaatgagatgaatgtgaacatcccacagttggcagacagtttatttgaaagaactactaatagtagttgggtggtggtcttcaaatctctcattacaactcatcatttgatggtgtatggaaatgagcgttttattcagtatttggcttcaagaaacacgttgtttaacttaagcaattttttggataaaagtggattgcaaggatatgacatgtctacatttattaggcggtatagtagatatttaaatgagaaagcagtttcatacagacaagttgcatttgatttcacaaaagtgaagagaggtaaaactctagaaggtgttacaagggggagggaaggggggcaaagtccttgaacattttctttggctcgtgccatgttatgatcatataccttttaaataaggggaaatagtatctttaaagttaatgtctagccaagagtttagtaaacgaagaattaaactgcactgttgatcggtgctttgtgtaaatacatctttaacatttgggtggagaggggccttaagaaggacagttcattgtaggaaagcaattctgtacatgagtttaagcattcttgttgcattgtctctgcagattctatttttgtttacaatattaaaatgtatgttagcaaaatgggtggattttcaaataaaatgcagcttccacaaaaag

SEQ ID NO: 293596 - DNA, 1429 bp, Homo sapiens
cattcatgagagggagccttaagaaggacagttcattgtaggaaagctattctgtacatgagtttaagcattcttgttgcattgtctctgcagattctatttttgtttacaatattaaatagtatctttaaagttaatgtctagccaagagtttagtaaacgaagaattaaactgcactgttgatcggtgctttgtgtaaatacatctttaacatttgggtggagaggggccttaagaaggacagttcattgtaggaaagcaattctgtacatgagtttaagcattcttgttgcattgtctctgcagattctatttttgtttacaatattaaaatgtatgttagcaaaatgggtggattttcaaataaaatgcagcttccacaaaaagttttgttatggtattctggtctgagatgcattttcatttttcctttctctttttattatcaatattgtcatttttccctaataaaatatacccaggtgattatatttgttgatctaataacatggaaggtttgttttatatgaattttcaaaaagatgtctctttacactttttgttaccttgtagactcttattgataaatgcaactacttattaaaattgttcactttttgtcttttgatcagatgcctttagtcaggtaagtttaagggaaaatacgcagtttaatgttttggtacatataattatgtctgccaaagaaacctttgattgtatcatattgcctatttagtagtgcatagggttcagagtacatgataaaggatcaaaagctttgcattgataagtgtctcataatatttgctgtgattggagaaaaaatgtagtcgtagccaataaattttatcagcttttaagtttcagtattattaaaccattttcatataaactgggaagttgtacttttataagttaccctccttaactttacaaatttttgtctcttgtggtgtttgaggaggtgtttatatttaaggtctgtggcttgttttctttcatattgcctttttttttttaagtatgtttcagtatgtgacgtgcttcatagccatttttatttcattgtttaaacaacttttgggctatgtttgataagtgttatccatattttacccattttatatgtaggaatcagaaatcagaaaaggagctgggtgcagtggctcacacctgttattccagtaatttgggaggctgaggtacatgatcacttgagcccaggagttcaagaccagcctgggcaacatggtgaaacgctatctgtaccaaaaatacaaaaattagccaggtatatgcctatagtcccagctacttgggagactgaagtggtaggatcacccgagtccaggatgttgaggctgcagtgagctgggatcatgccactgcatactccaccctgggtgacagagtgagaccctgttt

SEQ ID NO: 293597 - DNA, 2711 bp, Homo sapiens
  misc_feature (2471)..(2471): n is a, c, g, or t
  misc_feature (2476)..(2477): n is a, c, g, or t
  misc_feature (2482)..(2483): n is a, c, g, or t
  misc_feature (2487)..(2487): n is a, c, g, or t
  misc_feature (2491)..(2492): n is a, c, g, or t
  misc_feature (2630)..(2630): n is a, c, g, or t
tgttcctcttaccctgcccggctccagctgaccagggaaggggtgggctgaactgaggcgggggcaagggagtgcccgacatcttgtccgactccgcgggtgacacgagccggttctctctggactggtggcagcgcgcggccccgaaccgcgccccaggccggcaggcggggaaggagccggtgggggtagggggtgcggtggggggtggggaccctccggctcttgggggtcccagtccccgccggctgctgagcgggtggggtggtggaggagctgcagagatgtccggccagagcctgacggaccgaatcactgccgcccagcacagtgtcaccggctctgccgtatccaagacagtatgcaaggccacgacccacgagatcatggggcccaagaaaaagcacctggactacttaattcagtgcacaaatgagatgaatgtgaacatcccacagttggcagacagtttatttgaaagaactactaatagtagttgggtggtggtcttcaaatctctcattacaactcatcatttgatggtgtatggaaatgagcgttttattcagtatttggcttcaagaaacacgttgtttaacttaagcaattttttggataaaagtggattgcaaggatatgacatgtctacatttattaggcggtatagtagatatttaaatgagaaagcagtttcatacagacaagttgcatttgatttcacaaaagtgaagagaggggctgatggagttatgagaacaatgaacacagaaaaactcctaaaaactgtaccaattattcagaatcagatggatgcacttcttgattttaatgttaatagcaatgaacttacaaatggggtaataaatgctgccttcatgctcctgttcaaagatgccattagactgtttgcagcatacaatgaaggaattattaatttgttggaaaaatattttgatatgaaaaagaaccaatgcaaagaaggtcttgacatctataagaagttcctaactaggatgacaagaatctcagagttcctcaaagttgcagagcaagttggaattgacagaggtgatataccagacctttcacaggcccctagcagtcttcttgatgctttggaacaacatttagcttccttggaaggaaagaaaatcaaagattctacagctgcaagcagggcaactacactttccaatgcagtgtcttccctggcaagcactggtctatctctgaccaaagtggatgaaagggaaaagcaggcagcattagaggaagaacaggcacgtttgaaagctttaaaggaacagcgcctaaaagaacttgcaaagaaacctcatacctctttaacaactgcagcctctcctgtatccacctcagcaggagggataatgactgcaccagccattgacatattttctacccctagttcttctaacagcacatcaaagctgcccaatgatctgcttgatttgcagcagccaacttttcacccatctgtacatcctatgtcaactgcttctcaggtagcaagtacatggggagatcctttctctgctactgtagatgctgttgatgatgccattccaagcttaaatcctttcctcacaaaaagtagtggtgatgttcacctttccatttcttcagatgtatctacttttactactaggacacctactcatgaaatgtttgttggattcactccttctccagttgcacagccacacccttcagctggccttaatgttgactttgaatctgtgtttggaaataaatctacaaatgttattgtagattctgggggctttgatgaactaggtggacttctcaaaccaacagtggcctctcagaaccagaaccttcctgttgccaaactcccacctagcaagttagtatctgatgacttggattcatctttagccaaccttgtgggcaatcttggcatcggaaatggaaccactaagaatgatgtaaattggagtcaaccaggtgaaaagaagttaactgggggatctaactggcaaccaaaggttgcaccaacaaccgcttggaatgcggcaacaatggcaccccctgtaatggcctatcctgctactacaccaacaggcatgataggatatggaattcctccacaaatgggaagtgttcctgtaatgacgcaaccaaccttaatatacagccagcctgtcatgagacctccaaacccctttggccctgtatcaggagcacagatacagtttatgtaacttgatggaagaaaatggaattactccaaaaagacaagtgctcaagcagcaaaatccttacttccagcaaaatccaaactgctgtctcttaaatctcttaaactctcttcttccattagaatgtatgttagcaaaatgggtggattttcaaataaaatgcagcttccacaaaaagaaaaaacagcatcgtcgggaccagactcgtctcaggccagttgcagccttctnagccnnacgcnnaccnatgnnaactcactaccatgagaattgcagtgatttgcttttgcctcctaggcatcacctgtgccataccagttaaacaggctgattctggaagttctgagggcagaatctgtgtcctctgaagaaaccaatgactttaaacangagacccttccaagtaagtccaacggccatgaccacatggatgatatggatgatggatgatgactaccatgtggacagcct

SEQ ID NO: 293598 - DNA, 2216 bp, Homo sapiens
tgttcctcttaccctgcccggctccagctgaccagggaaggggtgggctgaactgaggcgggggcaagggagtgcccgacatcttgtccgactccgcgggtgacacgagccggttctctctggactggtggcagcgcgcggccccgaaccgcgccccaggccggcaggcggggaaggagccggtgggggtagggggtgcggtggggggtggggaccctccggctcttgggggtcccagtccccgccggctgctgagcgggtggggtggtggaggagctgcagagatgtccggccagagcctgacggaccgaatcactgccgcccagcacagtgtcaccggctctgccgtatccaagacagtatgcaaggccacgacccacgagatcatggggcccaagaaaaagcacctggactacttaattcagtgcacaaatgagatgaatgtgaacatcccacagttggcagacagtttatttgaaagaactactaatagtagttgggtggtggtcttcaaatctctcattacaactcatcatttgatggtgtatggaaatgagcgttttattcagtatttggcttcaagaaacacgttgtttaacttaagcaattttttggataaaagtggattgcaaggatatgacatgtctacatttattaggcggtatagtagatatttaaatgagaaagcagtttcatacagacaagttgcatttgatttcacaaaagtgaagagaggggctgatggagttatgagaacaatgaacacagaaaaactcctaaaaactgtaccaattattcagaatcagatggatgcacttcttgattttaatgttaatagcaatgaacttacaaatggggtaataaatgctgccttcatgctcctgttcaaagatgccattagactgtttgcagcatacaatgaaggaattattaatttgttggaaaaatattttgatatgaaaaagaaccaatgcaaagaaggtcttgacatctataagaagttcctaactaggatgacaagaatctcagagttcctcaaagttgcagagcaagttggaattgacagaggtgatataccagacctttcacaggcccctagcagtcttcttgatgctttggaacaacatttagcttccttggaaggaaagaaaatcaaagattctacagctgcaagcagggcaactacactttccaatgcagtgtcttccctggcaagcactggtctatctctgaccaaagtggatgaaagggaaaagcaggcagcattagaggaagaacaggcacgtttgaaagctttaaaggaacagcgcctaaaagaacttgcaaagaaacctcatacctctttaacaactgcagcctctcctgtatccacctcagcaggagggataatgactgcaccagccattgacatattttctacccctagttcttctaacagcacatcaaagctgcccaatgatctgcttgatttgcagcagccaacttttcacccatctgtacatcctatgtcaactgcttctcaggtagcaagtacatggggaggattcactccttctccagttgcacagccacacccttcagctggccttaatgttgactttgaatctgtgtttggaaataaatctacaaatgttattgtagattctgggggctttgatgaactaggtggacttctcaaaccaacagtggcctctcagaaccagaaccttcctgttgccaaactcccacctagcaagttagtatctgatgacttggattcatctttagccaaccttgtgggcaatcttggcatcggaaatggaaccactaagaatgatgtaaattggagtcaaccaggtgaaaagaagttaactgggggatctaactggcaaccaaaggttgcaccaacaaccgcttggaatgcggcaacaatgaatggcatgcattttccacaatacgcaccccctgtaatggcctatcctgctactacaccaacaggcatgataggatatggaattcctccacaaatgggaagtgttcctgtaatgacgcaaccaaccttaatatacagccagcctgtcatgagacctccaaacccctttggccctgtatcaggagcacagatacagtttatgtaacttgatggaagaaaatggaattactccaaaaagacaagtgctcaagcagcaaaatccttacttccagcaaaatctgcgtgggtgcgagctcgatggtct

SEQ ID NO: 293599 - DNA, 2651 bp, Homo sapiens
  misc_feature (2411)..(2411): n is a, c, g, or t
  misc_feature (2416)..(2417): n is a, c, g, or t
  misc_feature (2422)..(2423): n is a, c, g, or t
  misc_feature (2427)..(2427): n is a, c, g, or t
  misc_feature (2431)..(2432): n is a, c, g, or t
  misc_feature (2570)..(2570): n is a, c, g, or t
tgttcctcttaccctgcccggctccagctgaccagggaaggggtgggctgaactgaggcgggggcaagggagtgcccgacatcttgtccgactccgcgggtgacacgagccggttctctctggactggtggcagcgcgcggccccgaaccgcgccccaggccggcaggcggggaaggagccggtgggggtagggggtgcggtggggggtggggaccctccggctcttgggggtcccagtccccgccggctgctgagcgggtggggtggtggaggagctgcagagatgtccggccagagcctgacggaccgaatcactgccgcccagcacagtgtcaccggctctgccgtatccaagacagtatgcaaggccacgacccacgagatcatggggcccaagaaaaagcacctggactacttaattcagtgcacaaatgagatgaatgtgaacatcccacagttggcagacagtttatttgaaagaactactaatagtagttgggtggtggtcttcaaatctctcattacaactcatcatttgatggtgtatggaaatgagcgttttattcagtatttggcttcaagaaacacgttgtttaacttaagcaattttttggataaaagtggattgcaaggatatgacatgtctacatttattaggcggtatagtagatatttaaatgagaaagcagtttcatacagacaagttgcatttgatttcacaaaagtgaagagaggggctgatggagttatgagaacaatgaacacagaaaaactcctaaaaactgtaccaattattcagaatcagatggatgcacttcttgattttaatgttaatagcaatgaacttacaaatggggtaataaatgctgccttcatgctcctgttcaaagatgccattagactgtttgcagcatacaatgaaggaattattaatttgttggaaaaatattttgatatgaaaaagaaccaatgcaaagaaggtcttgacatctataagaagttcctaactaggatgacaagaatctcagagttcctcaaagttgcagagcaagttggaattgacagaggtgatataccagacctttcacaggcccctagcagtcttcttgatgctttggaacaacatttagcttccttggaaggaaagaaaatcaaagattctacagctgcaagcagggcaactacactttccaatgcagtgtcttccctggcaagcactggtctatctctgaccaaagtggatgaaagggaaaagcaggcagcattagaggaagaacaggcacgtttgaaagctttaaaggaacagcgcctaaaagaacttgcaaagaaacctcatacctctttaacaactgcagcctctcctgtatccacctcagcaggagggataatgactgcaccagccattgacatattttctacccctagttcttctaacagcacatcaaagctgcccaatgatctgcttgatttgcagcagccaacttttcacccatctgtacatcctatgtcaactgcttctcaggtagcaagtacatggggagatcctttctctgctactgtagatgctgttgatgatgccattccaagcttaaatcctttcctcacaaaaagtagtggtgatgttcacctttccatttcttcagatgtatctacttttactactaggacacctactcatgaaatgtttgttggattcactccttctccagttgcacagccacacccttcagctggccttaatgttgactttgaatctgtgtttggaaataaatctacaaatgttattgtagattctgggggctttgatgaactaggtggacttctcaaaccaacagtggcctctcagaaccagaaccttcctgttgccaaactcccacctagcaagttagtatctgatgacttggattcatctttagccaaccttgtgggcaatcttggcatcggaaatggaaccactaagaatgatgtaaattggagtcaaccaggtgaaaagaagttaactgggggatctaactggcaaccaaaggttgcaccaacaaccgcttggaatgcggcaacaatgcctccacaaatgggaagtgttcctgtaatgacgcaaccaaccttaatatacagccagcctgtcatgagacctccaaacccctttggccctgtatcaggagcacagatacagtttatgtaacttgatggaagaaaatggaattactccaaaaagacaagtgctcaagcagcaaaatccttacttccagcaaaatccaaactgctgtctcttaaatctcttaaactctcttcttccattagaatgtatgttagcaaaatgggtggattttcaaataaaatgcagcttccacaaaaagaaaaaacagcatcgtcgggaccagactcgtctcaggccagttgcagccttctnagccnnacgcnnaccnatgnnaactcactaccatgagaattgcagtgatttgcttttgcctcctaggcatcacctgtgccataccagttaaacaggctgattctggaagttctgagggcagaatctgtgtcctctgaagaaaccaatgactttaaacangagacccttccaagtaagtccaacggccatgaccacatggatgatatggatgatggatgatgactaccatgtggacagcct

SEQ ID NO: 293600 - DNA, 2150 bp, Homo sapiens
tgttcctcttaccctgcccggctccagctgaccagggaaggggtgggctgaactgaggcgggggcaagggagtgcccgacatcttgtccgactccgcgggtgacacgagccggttctctctggactggtggcagcgcgcggccccgaaccgcgccccaggccggcaggcggggaaggagccggtgggggtagggggtgcggtggggggtggggaccctccggctcttgggggtcccagtccccgccggctgctgagcgggtggggtggtggaggagctgcagagatgtccggccagagcctgacggaccgaatcactgccgcccagcacagtgtcaccggctctgccgtatccaagacagtatgcaaggccacgacccacgagatcatggggcccaagaaaaagcacctggactacttaattcagtgcacaaatgagatgaatgtgaacatcccacagttggcagacagtttatttgaaagaactactaatagtagttgggtggtggtcttcaaatctctcattacaactcatcatttgatggtgtatggaaatgagcgttttattcagtatttggcttcaagaaacacgttgtttaacttaagcaattttttggataaaagtggattgcaaggatatgacatgtctacatttattaggcggtatagtagatatttaaatgagaaagcagtttcatacagacaagttgcatttgatttcacaaaagtgaagagaggggctgatggagttatgagaacaatgaacacagaaaaactcctaaaaactgtaccaattattcagaatcagatggatgcacttcttgattttaatgttaatagcaatgaacttacaaatggggtaataaatgctgccttcatgctcctgttcaaagatgccattagactgtttgcagcatacaatgaaggaattattaatttgttggaaaaatattttgatatgaaaaagaaccaatgcaaagaaggtcttgacatctataagaagttcctaactaggatgacaagaatctcagagttcctcaaagttgcagagcaagttggaattgacagaggtgatataccagacctttcacaggcccctagcagtcttcttgatgctttggaacaacatttagcttccttggaaggaaagaaaatcaaagattctacagctgcaagcagggcaactacactttccaatgcagtgtcttccctggcaagcactggtctatctctgaccaaagtggatgaaagggaaaagcaggcagcattagaggaagaacaggcacgtttgaaagctttaaaggaacagcgcctaaaagaacttgcaaagaaacctcatacctctttaacaactgcagcctctcctgtatccacctcagcaggagggataatgactgcaccagccattgacatattttctacccctagttcttctaacagcacatcaaagctgcccaatgatctgcttgatttgcagcagccaacttttcacccatctgtacatcctatgtcaactgcttctcaggtagcaagtacatggggagatcctttctctgctactgtagatgctgttgatgatgccattccaagcttaaatcctttcctcacaaaaagtagtggtgatgttcacctttccatttcttcagatgtatctacttttactactaggacacctactcatgaaatgtttgttggattcactccttctccagttgcacagccacacccttcagctggccttaatgttgactttgaatctgtgtttggaaataaatctacaaatgttattgtagattctgggggctttgatgaactaggtggacttctcaaaccaacagtggcctctcagaaccagaaccttcctgttgccaaactcccacctagcaagttagtatctgatgacttggattcatctttagccaaccttgtgggcaatcttggcatcggaaatggaaccactaagaatgatgtaaattggagtcaaccaggtgaaaagaagttaactgggggatctaactggcaaccaaaggttgcaccaacaaccgcttggaatgcggcaacaatgaatggcatgctttttccacaatacgcaccccctgtatggctattctgcttataaaacaacaggctgatcggattggaattccccaaa

SEQ ID NO: 293601 - DNA, 1479 bp, Homo sapiens
tgttcctcttaccctgcccggctccagctgaccagggaaggggtgggctgaactgaggcgggggcaagggagtgcccgacatcttgtccgactccgcgggtgacacgagccggttctctctggactggtggcagcgcgcggccccgaaccgcgccccaggccggcaggcggggaaggagccggtgggggtagggggtgcggtggggggtggggaccctccggctcttgggggtcccagtccccgccggctgctgagcgggtggggtggtggaggagctgcagagatgtccggccagagcctgacggaccgaatcactgccgcccagcacagtgtcaccggctctgccgtatccaagacagtatgcaaggccacgacccacgagatcatggggcccaagaaaaagcacctggactacttaattcagtgcacaaatgagatgaatgtgaacatcccacagttggcagacagtttatttgaaagaactactaatagtagttgggtggtggtcttcaaatctctcattacaactcatcatttgatggtgtatggaaatgagcgttttattcagtatttggcttcaagaaacacgttgtttaacttaagcaattttttggataaaagtggattgcaaggatatgacatgtctacatttattaggcggtatagtagatatttaaatgagaaagcagtttcatacagacaagttgcatttgatttcacaaaagtgaagagaggggctgatggagttatgagaacaatgaacacagaaaaactcctaaaaactgtaccaattattcagaatcagatggatgcacttcttgattttaatgttaatagcaatgaacttacaaatggggtaataaatgctgccttcatgctcctgttcaaagatgccattagactgtttgcagcatacaatgaaggaattattaatttgttggaaaaatattttgatatgaaaaagaaccaatgcaaagaaggtcttgacatctataagaagttcctaactaggatgacaagaatctcagagttcctcaaagttgcagagcaagttggaattgacagaggtgatataccagacctttcacaggtaagtttattgttaaaataccaatccactatctgttgtgtacaagttgtgaagagtattaagataagtaacatatagcccccattgtcaaagggatcaatgcagtttttgaccagttttaacattttgatgtattcctgaagattgttctaacactatgaccacgtaaaatgatctgcttaccacttatatttgttgcctacccactgtcataccatttatttaatctcttcaatcactctttctttcccatcatcattgtttaaaaaaggaaaaaaaaactttttggaacctgaatttagaaaatgatatttagaaaaacaattttcactataatgctggtagagaattatccagtatttatttttcctgttttaaacttccactt

SEQ ID NO: 293602 - DNA, 1289 bp, Homo sapiens
gttaaatgtggtagagaatatccagtatcagtgcaggtttctttccagtgagacagctggagccatagttcaaaatgttttcgttggctgggcaccgtggctcagacctgtaatcccaaagtgctgggattacagacatgagccaccatatctggcctttatcagattttctgctgacatcattctgagaccagcccctgagaggtcacaaaaggaagggagactgattagaaaatgaaacacagccacgggacagtttgctggaaattgcctagggcctgagcatcatgaaggtatattggaattggtttgagaagacagttatatcctgattagatatcacttgacatttatgtaaacctggcctacctgacagagcatgagtttttaaagtgttatctgtggtgatttccagggaaagcatgttttatggagaaagacaaagtcgatgtcttcaggtttgtttcttaaatttttttttttttttgcatcaaagagcttgttcatggtcaggctttctcattcttaccatagtgtttttatcatattacacatagaagagaggggagttttcagattgtgacaaggtagcttacatacaggtgttcagaagacagggatggtaacttagatttgttgactttccaactctagtttccctactgttaacaacttttagggccaccaaataatatctaagccattggaaatgttgagtatttttggagattaaatattttcctgattcttaagaagtctgtttaaaatattactggtactagccgtgatgtcatttttccaaattttatttataaaatatttttattataatttattaaatacaatgcttttcttacagcaagttggaattgacagaggtgatataccagacctttcacaggtaagtttattgttaaaataccaatccactatctgttgtgtacaagttgtgaagagtattaagataagtaacatatagcccccattgtcaaagggatcaatgcagtttttgaccagttttaacattttgatgtattcctgaagattgttctaacactatgaccacgtaaaatgatctgcttaccacttatatttgttgcctacccactgtcataccatttatttaatctcttcaatcactctttctttcccatcatcattgtttaaaaaaggaaaaaaaaactttttggaacctgaatttagaaaatgatatttagaaaaacaattttcactataatgctggtagagaattatccagtatttatttttcctgttttaaacttccactt

SEQ ID NO: 293603 - DNA, 1308 bp, Homo sapiens
tgttcctcttaccctgcccggctccagctgaccagggaaggggtgggctgaactgaggcgggggcaagggagtgcccgacatcttgtccgactccgcgggtgacacgagccggttctctctggactggtggcagcgcgcggccccgaaccgcgccccaggccggcaggcggggaaggagccggtgggggtagggggtgcggtggggggtggggaccctccggctcttgggggtcccagtccccgccggctgctgagcgggtggggtggtggaggagctgcagagatgtccggccagagcctgacggaccgaatcactgccgcccagcacagtgtcaccggctctgccgtatccaagacagtatgcaaggccacgacccacgagatcatggggcccaagaaaaagcacctggactacttaattcagtgcacaaatgagatgaatgtgaacatcccacagttggcagacagtttatttgaaagaactactaatagtagttgggtggtggtcttcaaatctctcattacaactcatcatttgatggtgtatggaaatgagcgttttattcagtatttggcttcaagaaacacgttgtttaacttaagcaattttttggataaaagtggattgcaaggatatgacatgtctacatttattaggcggtatagtagatatttaaatgagaaagcagtttcatacagacaagttgcatttgatttcacaaaagtgaagagaggggctgatggagttatgagaacaatgaacacagaaaaactcctaaaaactgtaccaattattcagaatcagatggatgcacttcttgattttaatgttaatagcaatgaacttacaaatggggtaataaatgctgccttcatgctcctgttcaaagatgccattagactgtttgcagcatacaatgaaggaattattaatttgttggaaaaatattttgatatgaaaaagaaccaatgcaaagaaggtcttgacatctataagaagttcctaactaggatgacaagaatctcagagttcctcaaagttgcagaggtaaactgtctttaagtgactgtctcctaacttgcctttttgtctgtaagtatggattttgaagtcatcactcactatccaaataaaataaatgtcttcaatttagtattcaatcattattatgctgtattgaattctgtggcaagatatgaatatgataaagtagtgaataaaatacatgctgtaaatttaattcaatagcgagtattgaaaagttacctgtttttacattgtttacttctctataaaattaagtagg

SEQ ID NO: 293604 - DNA, 275 bp, Homo sapiens
tccaagcttaaatcctttcctcacaaaaagtagtggtgatgttcacctttccatttcttcagatgtatctacttttactactaggacacctactcatgaaatgtttgttggtaaagtaccatttaacctttttttccaatcaatgtttatactgcctaactatattttacgtgtccattaattattttaaaagcactgcaatagttactttagattttaatatcaaattctaaaactaaccagccataatgtagtgaggtttttaaattgacact

SEQ ID NO: 293605 - DNA, 496 bp, Homo sapiens
gcctcccggattcacgccgttcttctgcctcagcctctcaagtagctggactacaggcacccaccaccatgcctggctaatttttttgtatttttagtagagacggggtttcgccgtgttagccaggttggtctcaatctcctgacctcaagtgatttgtccaccttggcctcccaaagtgctgggattacaggcatgagccaccacgcccagcctcaagtctctatcttactctgttctatataagtatatagctaaggaaactttataattagagacatttaatattctcacttatgtttatttaaagtgatgtaaattggagtcaaccaggtgaaaagaagttaactgggggatctaactggcaaccaaaggttgcaccaacaaccgcttggaatgcggcaacaatggtgagttgaaaaagctcctgatagactaacagttgaataatttagttaaatatgtaacatgaaaatgtttttaaagtgatagacat

SEQ ID NO: 293606 - DNA, 312 bp, Homo sapiens
ccctgtccccccccccctccccttttcccccccgttgccgtttcgcgccccgccccccccccccccccccccccccggtaaaaaaaaaaaaaaaaaaaaaacaaaaaaaaaaaaaaaaaaaaaaaagatagtctccaaaacacaagaggtaaggtttaagtcccattggcttacgacaggaagatatgtgcacatctgcagagctggtaacagggaggcaggcattccctctgatggttgctgtttcttaatgaggcatgtgttgtggtaactaccacaagggggaattgatagataagacagaagttttga

SEQ ID NO: 293607 - DNA, 496 bp, Homo sapiens
tgaagaaattagtcacagatgtttattgaattcactgaacaaaatgagcctctctcccacaccctcaaggtagttacaattgtatccagaatgtgtcccgatggcacaaccataaaaaccatatagctggaactctcacgcgagtgcatattcaaatgtccctttatcaaactcttcaacttcatcttcccatgtagaggaaggcatgctactatatgggtctagcaggattttgaagcatcggataataagaagtcccaagaagatacacaaaatcccaacaaaagcaaagccagttttttgctccagagtcaatgagaaagctgatacttcgttgacactcatcttagctgaagagttgccacagtaggtactactcattattcactggcacattgttgtggctcttcacagttccttctggaatcaactctttgcctagatgtcttcatcatggtgaaatgcataaatttcagggctttccagagatcccaga

SEQ ID NO: 293608 - DNA, 157 bp, Homo sapiens
ggaaggaatcatttagacttagcactaaaagcagtggaaaaatgtgacttgaaaagacatgtgagaccaggtgcagtggctcacgcctgtaatcccagcactttgggaggccaaggcgggtggatcatgaggtcaggagatcgagaccatcctggct

SEQ ID NO: 293609 - DNA, 143 bp, Homo sapiens
gcctgcaggagacatttccatcctgcttctgctacttgctgcctgtgtgaccttgggcaagggacttggcctccaagcctcagtgaccgcccctgtgaagcagggctgccggtgcctgcctcctggtgctctcagaggacatg

SEQ ID NO: 293610 - DNA, 1789 bp, Homo sapiens
cgaaccgcccggcggggcgggagcgagaaaggcggaaaagcccgggagagtcagcgcccgggagccgccggggaagcgccggcggaactgggcgcggagggcggtggcgcgtccccgcgcatcctgcggctcgagctcctccgaaggcgggggcgcggggcccctcccgcagtcctggggacgacaaaagtctcctggcactgggggcaagagaccagaaaaaggagtgatgggaattcgaggctctccccggccttggaaaaccctggaagcgctgcacctccctcctgccgcacggatttgagcgcggccccgacgtcctggcgtccgatcggcctgcggagtcccccgcgggcgcgcacttccagccgcgaccccgccccgcagccccgggtcagatccgccgagtatgaagcgctcggcttttcttttgtgtgaggagcacccacgacgccccgaccatgggcgcaggggcagaggcgaaggtcgtcgctccgtccgctaccccgtcccccagccgcaagcgccgaggagccggaagagaggcggaaagggcagcaggctccttacccagaccagcgaggggaggtcagctcgtcgcggggtgtggctcccgtccggggactcccgagctcattacgggtggccgtgtgtagccaagttcaagctctccctccgggaatgcctgccgcggcggcggaatacggcttcttcaggacattcagcaaagcggggaggcggggacctgcgggcggaggagcgacgccccagctgggaacgcggcggacgggcgagcggggggtgcgccctgggcgcgccaggccgcagaggctccggggaaagttctcttggccgcgcgagtggtggcgccccgggcgggagcagcccaggtgcatgtgggcccggtccaggcgtctgcaaaaagccctggaacgaagcggaccccccagtccagcgctggccgcggcaggggagccccttctgggcggggtatcagctgggggcggagggcggggcagagaccgtggtcccagcggcgaggtgccggcgagtccacgctgccaagccgcacactgcgcccaagccgcggggcagtccagcgctcgctgcgtccttcccccgagagacctggaggctgggtggggagaagaggacgcggtgctgctcggaccccacggttcggcggtcccaatcccacgccctccgcgcggtcggccgcgtccaggactgaggggcacaatagctctgaagctgcagtgacccctggtgggtcccgatgtccgtgcacaggcagccgaggttgagctgcggacgacactgagccccgctgggcttcggagcaggtgcaatctgtgctctccagctgggaaccagcagcgagttaatgcgagtcgcagttaggggagacacgaggggaggtgtcacagaaaaaaaactctatattgagttttagagttagagctttggcatcagacgtagttttgagttgactattctactgcttgttagctgggtagccaaagctcaaaaaaaattgcttaaaacctaggacgttagcccttaaaacaaaaccaggcttccgtagcacagtagaaatgaaatgaacaattggcgacttttgatggagtttcctctcatagtgatttgccacaaaggaccttctgtaggaagcctcggccttccctgctattgtgaccccatccaaacacaggatcagcataaccgccaaagtgcaatataaatttctgaactttacctaggctatgaataaaactattttatcttctga

SEQ ID NO: 293611 - DNA, 5509 bp, Homo sapiens
  misc_feature (3071)..(3071): n is a, c, g, or t
  misc_feature (4020)..(4020): n is a, c, g, or t
ctcacacttttgctctcttgcagtcagttgctttgctggcttctgcaggcttttaaggtctcgcggcgtagaaatgcctggcccccacccccttcctcggtctcccctttcaattcagatgtgctgatgtgcagaccggattcatcttctcggagctgcggcggcggctttgggctcaggcggcggcggctcgcgctcggccgcggagtcctggcagcagcggggacgcggcgcgggagtccgagctctggtggcagctgagcccgcggggcgccgctcgccgagccgcggccgcgggaagttcggcagccagaaggacgacctggcaggctgcgagcgccagcgccgccagagccgagtttgcctgcgccctccccgcctccgagtgcagagttccttacctgccctccgcccacccgtgggcccctagccaacttctccctgcgactgggggtaacaggcagtgcttgccctctctactgtcccggcggcatccacatgtttccggacacctgagcaccccggtcccgccgaggagcctccgggtggggagaagagcaccggtgcccctagccccgcacatcagcgcggaccgcggctgcctaacctctgggtcccgtcccctccttttcctccgggggaggaggatggggttgggaacgctttccccgaggatgctcgtgtggctggtggcctcggggattgttttctacggggagctatgggtctgcgctggcctcgattatgattacacttttgatgggaacgaagaggataaaacagagactatagattacaaggacccgtgtaaagccgctgtattttggggcgatattgccttagatgatgaagacttaaatatctttcaaatagataggacaattgaccttacgcagaacccctttggaaaccttggacataccacaggtggacttggagaccatgctatgtcaaagaagcgaggggccctctaccaacttatagacaggataagaagaattggctttggcttggagcaaaacaacacagttaagggaaaagtacctctacaattctcagggcaaaatgagaaaaatcgagttcccagagccgctacatcaagaacggaaagaatatggcctggaggcgttattccttatgttataggaggaaacttcactggcagccagagagccatgttcaagcaggccatgaggcactgggaaaagcacacatgtgtgactttcatagaaagaagtgatgaagagagttacattgtattcacctataggccttgtggatgctgctcctatgtaggtcggcgaggaaatggacctcaggcaatctctatcggcaagaactgtgataaatttgggattgttgttcatgaattgggtcatgtgataggcttttggcatgaacacacaagaccagatcgagataaccacgtaactatcataagagaaaacatccagccaggtcaagagtacaattttctgaagatggagcctggagaagtaaactcacttggagaaagatatgatttcgacagtatcatgcactatgccaggaacaccttctcaagggggatgtttctggataccattctcccctcccgtgatgataatggcatacgtcctgcaattggtcagcgaacccgtctaagcaaaggagatatcgcacaggcaagaaagctgtatagatgtccagcatgtggagaaactctacaagaatccaatggcaacctttcctctccaggatttcccaatggctacccttcttacacacactgcatctggagagtttctgtgaccccaggggagaagattgttttaaattttacaacgatggatctatacaagagtagtttgtgctggtatgactatattgaagtaagagacgggtactggagaaaatcacctctccttggtagattctgtggggacaaattgcctgaagttcttacttctacagacagcagaatgtggattgagtttcgtagcagcagtaattgggtaggaaaaggctttgcagctgtctatgaagcgatctgtggaggtgagatacgtaaaaatgaaggacagattcagtctcccaattatcctgatgactatcgcccgatgaaagaatgtgtgtggaaaataacagtgtctgagagctaccacgtcgggctgacctttcagtcctttgagattgaaagacatgacaattgtgcttatgactacctggaagttagagatggaaccagtgaaaatagccctttgatagggcgtttctgtggttatgacaaacctgaagacataagatctacctccaatactttgtggatgaagtttgtttctgacggaactgtgaacaaagcagggtttgctgctaacttttttaaagaggaagatgagtgtgccaaacctgaccgtggaggctgtgagcagcgatgtctgaacactctgggcagttaccagtgtgcctgtgagcctggctatgagctgggcccagacagaaggagctgtgaagctgcttgtggtggacttcttaccaaacttaacggcaccataaccacccctggctggcccaaggagtaccctcctaataagaactgtgtgtggcaagtggttgcaccaacccagtacagaatttctgtgaagtttgagttttttgaattggaaggcaatgaagtttgcaaatatgattatgtggagatctggagtggtctttcctctgagtctaaactgcatggcaaattctgtggcgctgaagtgcctgaagtgatcacatcccagttcaacaatatgagaattgaattcaaatctgacaatactgtatccaagaagggcttcaaagcacattttttctcagacaaagatgaatgctctaaggataatggtggatgtcagcacgaatgtgtcaacacgatggggagctacatgtgtcaatgccgtaatggatttgtgctacatgacaataaacatgattgcaaggaagctgagtgtgaacagaagatccacagtccaagtggcctcatcaccagtcccaactggccagacaagtacccaagcaggaaagaatgcacttgggaaatcagcgccactccnggccaccgaatcaaattagcctttagtgaatttgagattgagcagcatcaagaatgtgcttatgaccacttagaagtatttgatggagaaacagaaaagtcaccgattcttggacgactatgtggcaacaagataccagatccccttgtggctactggaaataaaatgtttgttcggtttgtttctgatgcatctgttcaaagaaaaggctttcaagccacacattctacagagtgtggcggacgattgaaagcagaatcaaaaccaagagatctgtactcacatgctcagtttggtgataacaactacccaggacaggttgactgtgaatggctattagtatcagaacggggctctcgacttgaattatccttccagacatttgaagtggaggaagaagcagactgtggctatgactatgtggagctctttgatggtcttgattcaacagctgtggggcttggtcgattctgtggatccgggccaccagaagagatttattcaattggagattcagttttaattcatttccacactgatgacacaatcaacaagaagggatttcatataagatacaaaagcataagatatccagataccacacataccaaaaaataacaccaaaacctctgtcagaacacaaaggaatgtgcataatggagagaagacatattttttttaaaactgaagatattggcacaaatgttttatacaaagagtttgaacaaaaaatccctgtaagaccagaattatctttgtactaaaagagaagtttccagcaaaaccctcatcagcattacaaggatatttgaactccatgcttgatggtattaataaagctggtgaaagggcatcatatacttcaaggaagactctacaagcttttgttcacagcttgaaatagatgcctcacaattcagacagtttaattcaggaactgtgaccctgnagtgttctttttgacaatttgtcaagatttagggacataaaatgatcttgcaggtcgtaaactggaaaacagtattttggttgtcttaggataattgctgactttgtatcttggatacagtgtaaaccagatccatataaggtgaatgtgaaatgggagtcttctgagggtgatttgtactttccatgtgtatgtgtgtgtctggtgtttggaaactgggatatttcagcttcattatttccacttgcaggccagcttaacctctgaaacacaaatgatcttgagaccactttagtgtacttacatttagatgagtttgaaatctcaatggtgtctaattattgcagttaaattctagacatcagttctttaagtctcagaaaacgcccagtgaattggtaaacttagttcttttttttggaagtgctgccttttcacaccaaatccaagaagcctgtgatgtcttatgaaccttatgagaaaactccgaagaggtgtgagcaggattcttctgaatgactgtctggatggttcattactcaagttactgctgctgctattgtctttcctttgttgtcgatctgttattgttgtattattattgttgatgttgtcatggttaatctattttttaaaattgaaatgaagcagaagtaggccttgtgagaactgaaaggtctctttcatttttctcttcctgggattcattttttcaaaacacaatgctggaaaaaaaagatttgtttctgaaagacttcttatggtgctattccataaactttttttcaaacaagtttttgacctttgagccaacccacccgtagactacgaatgtctccctatggctggtagcatttgaagactaaagacttgtcaaatatatcaagagtatatcattgcaagggcagcacttgtcctgtggaacaactacttataatgccttagaattcctgcacatgatcaaacagatcctcctaaaacacaccttttgaaatgttgaacataatagtgtatgttaattaacagctctatgaagaaaatccatttccatgactgaagcattggatataaatatggtgtcctgctttttttgtagaaaatgtaatttgaggatgaattttctgctttaaaggcatgtgtgtttttaaaattaatgaatgtagatgtgtgattgtctgagtgagtgaaactacaagaggtaaaaaataatgggtggttgaaaaggttaaaatgtatgtgccaagttctactagaattccatttgaaatagcaccttccttaggtttcatggacaaataatgggaacttctaattttgatcaatcccattaaaaaaaggctctttcctttagagaaactctattttgatgtcaatatagattactgtatgaagtagctttgtgtctgttacctgtccatgagcatacaacattgaatacaattgggtgtattctttcagttttacacaattaaagtatacacacagatgt

SEQ ID NO: 293612 - DNA, 604 bp, Homo sapiens
agacatcacttacccagagtcacagagccagcaggcactgggactgagattccaacccaggtcgtccatgtctggggcctgggtggacacccatgacactatctgactctccagttgtggaaaacatatctgacgctggaagtagaaacagaagttagacaatggctaggctacactgaaactacactgaaatttaaattggacccgttaaagctcattgaccttactcatcttatttttctttcctgggcagagtgtggcggacgattgaaagcagaatcaaaaccaagagatctgtactcacatgctcagtttggtgataacaactacccaggacaggttgactgtgaatggctattagtatcagaacggggctctcgacttgaattatccttccagacatttgaagtggaggaagaagcagactgtggctatgactatgtggagctctttgatggtcttgattcaacagctgtggggcttggtcgattctgtggatccggggtaaatataccaccaacagaataccctagacatgattaaagatgcctattgattcatgattgatatgtgtaccattcacaagttggcaatgctttttgca

SEQ ID NO: 293613 - DNA, 7270 bp, Homo sapiens
  misc_feature (3071)..(3071): n is a, c, g, or t
  misc_feature (4020)..(4020): n is a, c, g, or t
ctcacacttttgctctcttgcagtcagttgctttgctggcttctgcaggcttttaaggtctcgcggcgtagaaatgcctggcccccacccccttcctcggtctcccctttcaattcagatgtgctgatgtgcagaccggattcatcttctcggagctgcggcggcggctttgggctcaggcggcggcggctcgcgctcggccgcggagtcctggcagcagcggggacgcggcgcgggagtccgagctctggtggcagctgagcccgcggggcgccgctcgccgagccgcggccgcgggaagttcggcagccagaaggacgacctggcaggctgcgagcgccagcgccgccagagccgagtttgcctgcgccctccccgcctccgagtgcagagttccttacctgccctccgcccacccgtgggcccctagccaacttctccctgcgactgggggtaacaggcagtgcttgccctctctactgtcccggcggcatccacatgtttccggacacctgagcaccccggtcccgccgaggagcctccgggtggggagaagagcaccggtgcccctagccccgcacatcagcgcggaccgcggctgcctaacctctgggtcccgtcccctccttttcctccgggggaggaggatggggttgggaacgctttccccgaggatgctcgtgtggctggtggcctcggggattgttttctacggggagctatgggtctgcgctggcctcgattatgattacacttttgatgggaacgaagaggataaaacagagactatagattacaaggacccgtgtaaagccgctgtattttggggcgatattgccttagatgatgaagacttaaatatctttcaaatagataggacaattgaccttacgcagaacccctttggaaaccttggacataccacaggtggacttggagaccatgctatgtcaaagaagcgaggggccctctaccaacttatagacaggataagaagaattggctttggcttggagcaaaacaacacagttaagggaaaagtacctctacaattctcagggcaaaatgagaaaaatcgagttcccagagccgctacatcaagaacggaaagaatatggcctggaggcgttattccttatgttataggaggaaacttcactggcagccagagagccatgttcaagcaggccatgaggcactgggaaaagcacacatgtgtgactttcatagaaagaagtgatgaagagagttacattgtattcacctataggccttgtggatgctgctcctatgtaggtcggcgaggaaatggacctcaggcaatctctatcggcaagaactgtgataaatttgggattgttgttcatgaattgggtcatgtgataggcttttggcatgaacacacaagaccagatcgagataaccacgtaactatcataagagaaaacatccagccaggtcaagagtacaattttctgaagatggagcctggagaagtaaactcacttggagaaagatatgatttcgacagtatcatgcactatgccaggaacaccttctcaagggggatgtttctggataccattctcccctcccgtgatgataatggcatacgtcctgcaattggtcagcgaacccgtctaagcaaaggagatatcgcacaggcaagaaagctgtatagatgtccagcatgtggagaaactctacaagaatccaatggcaacctttcctctccaggatttcccaatggctacccttcttacacacactgcatctggagagtttctgtgaccccaggggagaagattgttttaaattttacaacgatggatctatacaagagtagtttgtgctggtatgactatattgaagtaagagacgggtactggagaaaatcacctctccttggtagattctgtggggacaaattgcctgaagttcttacttctacagacagcagaatgtggattgagtttcgtagcagcagtaattgggtaggaaaaggctttgcagctgtctatgaagcgatctgtggaggtgagatacgtaaaaatgaaggacagattcagtctcccaattatcctgatgactatcgcccgatgaaagaatgtgtgtggaaaataacagtgtctgagagctaccacgtcgggctgacctttcagtcctttgagattgaaagacatgacaattgtgcttatgactacctggaagttagagatggaaccagtgaaaatagccctttgatagggcgtttctgtggttatgacaaacctgaagacataagatctacctccaatactttgtggatgaagtttgtttctgacggaactgtgaacaaagcagggtttgctgctaacttttttaaagaggaagatgagtgtgccaaacctgaccgtggaggctgtgagcagcgatgtctgaacactctgggcagttaccagtgtgcctgtgagcctggctatgagctgggcccagacagaaggagctgtgaagctgcttgtggtggacttcttaccaaacttaacggcaccataaccacccctggctggcccaaggagtaccctcctaataagaactgtgtgtggcaagtggttgcaccaacccagtacagaatttctgtgaagtttgagttttttgaattggaaggcaatgaagtttgcaaatatgattatgtggagatctggagtggtctttcctctgagtctaaactgcatggcaaattctgtggcgctgaagtgcctgaagtgatcacatcccagttcaacaatatgagaattgaattcaaatctgacaatactgtatccaagaagggcttcaaagcacattttttctcagacaaagatgaatgctctaaggataatggtggatgtcagcacgaatgtgtcaacacgatggggagctacatgtgtcaatgccgtaatggatttgtgctacatgacaataaacatgattgcaaggaagctgagtgtgaacagaagatccacagtccaagtggcctcatcaccagtcccaactggccagacaagtacccaagcaggaaagaatgcacttgggaaatcagcgccactccnggccaccgaatcaaattagcctttagtgaatttgagattgagcagcatcaagaatgtgcttatgaccacttagaagtatttgatggagaaacagaaaagtcaccgattcttggacgactatgtggcaacaagataccagatccccttgtggctactggaaataaaatgtttgttcggtttgtttctgatgcatctgttcaaagaaaaggctttcaagccacacattctacagagtgtggcggacgattgaaagcagaatcaaaaccaagagatctgtactcacatgctcagtttggtgataacaactacccaggacaggttgactgtgaatggctattagtatcagaacggggctctcgacttgaattatccttccagacatttgaagtggaggaagaagcagactgtggctatgactatgtggagctctttgatggtcttgattcaacagctgtggggcttggtcgattctgtggatccgggccaccagaagagatttattcaattggagattcagttttaattcatttccacactgatgacacaatcaacaagaagggatttcatataagatacaaaagcataagatatccagataccacacataccaaaaaataacaccaaaacctctgtcagaacacaaaggaatgtgcataatggagagaagacatattttttttaaaactgaagatattggcacaaatgttttatacaaagagtttgaacaaaaaatccctgtaagaccagaattatctttgtactaaaagagaagtttccagcaaaaccctcatcagcattacaaggatatttgaactccatgcttgatggtattaataaagctggtgaaagggcatcatatacttcaaggaagactctacaagcttttgttcacagcttgaaatagatgcctcacaattcagacagtttaattcaggaactgtgaccctgnagtgttctttttgacaatttgtcaagatttagggacataaaatgatcttgcaggtcgtaaactggaaaacagtattttggttgtcttaggataattgctgactttgtatcttggatacagtgtaaaccagatccatataaggtgaatgtgaaatgggagtcttctgagggtgatttgtactttccatgtgtatgtgtgtgtctggtgtttggaaactgggatatttcagcttcattatttccacttgcaggccagcttaacctctgaaacacaaatgatcttgagaccactttagtgtacttacatttagatgagtttgaaatctcaatggtgtctaattattgcagttaaattctagacatcagttctttaagtctcagaaaacgcccagtgaattggtaaacttagttcttttttttggaagtgctgccttttcacaccaaatccaagaagcctgtgatgtcttatgaaccttatgagaaaactccgaagaggtgtgagcaggattcttctgaatgactgtctggatggttcattactcaagttactgctgctgctattgtctttcctttgttgtcgatctgttattgttgtattattattgttgatgttgtcatggttaatctattttttaaaattgaaatgaagcagaagtaggccttgtgagaactgaaaggtctctttcatttttctcttcctgggattcattttttcaaaacacaatgctggaaaaaaaagatttgtttctgaaagacttcttatggtgctattccataaactttttttcaaacaagtttttgacctttgagccaacccacccgtagactacgaatgtctccctatggctggtagcatttgaagactaaagacttgtcaaatatatcaagagtatatcattgcaagggcagcacttgtcctgtggaacaactacttataatgccttagaattcctgcacatgatcaaacagatcctcctaaaacacaccttttgaaatgttgaacataatagtgtatgttaattaacagctctatgaagaaaatccatttccatgactgaagcattggatataaatatggtgtcctgctttttttgtagaaaatgtaatttgaggatgaattttctgctttaaaggcatgtgtgtttttaaaattaatgaatgtagatgtgtgattgtctgagtgagtgaaactacaagaggtaaaaaataatgggtggttgaaaaggttaaaatgtatgtgccaagttctactagaattccatttgaaatagcaccttccttaggtttcatggacaaataatgggaacttctaattttgatcaatcccattaaaaaaaggctctttcctttagagaaactctattttgatgtcaatatagattactgtatgaagtagctttgtgtctgttacctgtccatgagcatacaacattgaatacaattgggtgtattctttcagttttacacaattaaagtatacacacagatgtagcttatctgtttttttcttaaattgttgccctgaaaaaatttcttgcatatgaattgtaaaatgtaaatacatttttataaccaatgttttgatcttattgaatgttactttgaaaatgtataactattgcctgcaatgtagatgagccttttagtagagctgatttattccagtaacttcttccatattttctcactaatctcccgttagccaaaatatgccagaaatgggaaagagaggagaaaaagtcattaacattaacacctatactgttctatactactcctacccgtgtgctaggaatgtgcactagctctttttaaattccatgctacactttgaggactgtcatcatgttctcgttttgtagttcagaaagtgaggctcaaagaatttatgtaaccttcccagagtcacagtgtaaagttagatgttgaaacccagtttatcttatacaaatgagcctctgcttgttctacaaaggtagtagaatcaatctcgacctatataaatagtagattttttatggtgaaactttcccacataaagtaaattttaggggtgaattagagtaaaacttacaggataagcattttgctctttttaagaacagcatgaaatttagaatatcaatgatagctatctttaagaatcagaattagtactagaaatttaaaaaaccctatagtttggagttagtatgagccttttgtgaaaataaatatattaaattattttgcctgatgtggtaggggaaatgtattgctctatattaagaaatattctggatattctgattgacatcttattaggccatagtgagctatgctctgcacaactgagaaattaggtatttagaaggcatgtagagatgttgtcataactaggtcttcaacgtgaaaattaatttttattgtatcatgtcaagtatcagtttaccacatattatttttatattaattcaacatttgccttaagtgtgttgttaaatgaaagtacagacagcttcattgttgtattgttaataattgttacttactgctccaggcattttactaaattaattttttaaattattttccaccctacatcagtatattggttgtgctttatatttgccaaagtcctaactgactatacatagaaaaaaaaaaaaacactgttctcacttgattttattaaattatttttaaaagtcaattttgaaaataactgtattttattaaggagatcgtgacttaacttaaatggacaaaataactttttaaaagaaatggatgagaagtaattgtgtttccaaaaccctcaaatatcccattcctatactggctggatttttgctacctgtcgctcattttaatatgtcacagtatgagattcaaattctgtttaactttgttttaaaatagcttggtctcttttatttggtttgtaatactgctgtatttttggtggtaagcttcaaatatcaaattttgttctgccgtgtagaaaaatctctaaaagcatcaaatgactaattttatttttgcaaggttaaaatttatttttaaaagaaacattaaattatatctttatgtagatttagaaggactgcaaccctatgtgacattataacttacttaaaacagttatcaaatatttggaaactattgtttactaataagaataagacttgccttatggaaaatttttgataccacttgttaaatcaggcatgggaggaggagagcagaaaatataattgccttctaaagat

SEQ ID NO: 293614 - DNA, 4220 bp, Homo sapiens
  misc_feature (970)..(970): n is a, c, g, or t
agacatcacttacccagagtcacagagccagcaggcactgggactgagattccaacccaggtcgtccatgtctggggcctgggtggacacccatgacactatctgactctccagttgtggaaaacatatctgacgctggaagtagaaacagaagttagacaatggctaggctacactgaaactacactgaaatttaaattggacccgttaaagctcattgaccttactcatcttatttttctttcctgggcagagtgtggcggacgattgaaagcagaatcaaaaccaagagatctgtactcacatgctcagtttggtgataacaactacccaggacaggttgactgtgaatggctattagtatcagaacggggctctcgacttgaattatccttccagacatttgaagtggaggaagaagcagactgtggctatgactatgtggagctctttgatggtcttgattcaacagctgtggggcttggtcgattctgtggatccgggccaccagaagagatttattcaattggagattcagttttaattcatttccacactgatgacacaatcaacaagaagggatttcatataagatacaaaagcataagatatccagataccacacataccaaaaaataacaccaaaacctctgtcagaacacaaaggaatgtgcataatggagagaagacatattttttttaaaactgaagatattggcacaaatgttttatacaaagagtttgaacaaaaaatccctgtaagaccagaattatctttgtactaaaagagaagtttccagcaaaaccctcatcagcattacaaggatatttgaactccatgcttgatggtattaataaagctggtgaaagggcatcatatacttcaaggaagactctacaagcttttgttcacagcttgaaatagatgcctcacaattcagacagtttaattcaggaactgtgaccctgnagtgttctttttgacaatttgtcaagatttagggacataaaatgatcttgcaggtcgtaaactggaaaacagtattttggttgtcttaggataattgctgactttgtatcttggatacagtgtaaaccagatccatataaggtgaatgtgaaatgggagtcttctgagggtgatttgtactttccatgtgtatgtgtgtgtctggtgtttggaaactgggatatttcagcttcattatttccacttgcaggccagcttaacctctgaaacacaaatgatcttgagaccactttagtgtacttacatttagatgagtttgaaatctcaatggtgtctaattattgcagttaaattctagacatcagttctttaagtctcagaaaacgcccagtgaattggtaaacttagttcttttttttggaagtgctgccttttcacaccaaatccaagaagcctgtgatgtcttatgaaccttatgagaaaactccgaagaggtgtgagcaggattcttctgaatgactgtctggatggttcattactcaagttactgctgctgctattgtctttcctttgttgtcgatctgttattgttgtattattattgttgatgttgtcatggttaatctattttttaaaattgaaatgaagcagaagtaggccttgtgagaactgaaaggtctctttcatttttctcttcctgggattcattttttcaaaacacaatgctggaaaaaaaagatttgtttctgaaagacttcttatggtgctattccataaactttttttcaaacaagtttttgacctttgagccaacccacccgtagactacgaatgtctccctatggctggtagcatttgaagactaaagacttgtcaaatatatcaagagtatatcattgcaagggcagcacttgtcctgtggaacaactacttataatgccttagaattcctgcacatgatcaaacagatcctcctaaaacacaccttttgaaatgttgaacataatagtgtatgttaattaacagctctatgaagaaaatccatttccatgactgaagcattggatataaatatggtgtcctgctttttttgtagaaaatgtaatttgaggatgaattttctgctttaaaggcatgtgtgtttttaaaattaatgaatgtagatgtgtgattgtctgagtgagtgaaactacaagaggtaaaaaataatgggtggttgaaaaggttaaaatgtatgtgccaagttctactagaattccatttgaaatagcaccttccttaggtttcatggacaaataatgggaacttctaattttgatcaatcccattaaaaaaaggctctttcctttagagaaactctattttgatgtcaatatagattactgtatgaagtagctttgtgtctgttacctgtccatgagcatacaacattgaatacaattgggtgtattctttcagttttacacaattaaagtatacacacagatgtagcttatctgtttttttcttaaattgttgccctgaaaaaatttcttgcatatgaattgtaaaatgtaaatacatttttataaccaatgttttgatcttattgaatgttactttgaaaatgtataactattgcctgcaatgtagatgagccttttagtagagctgatttattccagtaacttcttccatattttctcactaatctcccgttagccaaaatatgccagaaatgggaaagagaggagaaaaagtcattaacattaacacctatactgttctatactactcctacccgtgtgctaggaatgtgcactagctctttttaaattccatgctacactttgaggactgtcatcatgttctcgttttgtagttcagaaagtgaggctcaaagaatttatgtaaccttcccagagtcacagtgtaaagttagatgttgaaacccagtttatcttatacaaatgagcctctgcttgttctacaaaggtagtagaatcaatctcgacctatataaatagtagattttttatggtgaaactttcccacataaagtaaattttaggggtgaattagagtaaaacttacaggataagcattttgctctttttaagaacagcatgaaatttagaatatcaatgatagctatctttaagaatcagaattagtactagaaatttaaaaaaccctatagtttggagttagtatgagccttttgtgaaaataaatatattaaattattttgcctgatgtggtaggggaaatgtattgctctatattaagaaatattctggatattctgattgacatcttattaggccatagtgagctatgctctgcacaactgagaaattaggtatttagaaggcatgtagagatgttgtcataactaggtcttcaacgtgaaaattaatttttattgtatcatgtcaagtatcagtttaccacatattatttttatattaattcaacatttgccttaagtgtgttgttaaatgaaagtacagacagcttcattgttgtattgttaataattgttacttactgctccaggcattttactaaattaattttttaaattattttccaccctacatcagtatattggttgtgctttatatttgccaaagtcctaactgactatacatagaaaaaaaaaaaaacactgttctcacttgattttattaaattatttttaaaagtcaattttgaaaataactgtattttattaaggagatcgtgacttaacttaaatggacaaaataactttttaaaagaaatggatgagaagtaattgtgtttccaaaaccctcaaatatcccattcctatactggctggatttttgctacctgtcgctcattttaatatgtcacagtatgagattcaaattctgtttaactttgttttaaaatagcttggtctcttttatttggtttgtaatactgctgtatttttggtggtaagcttcaaatatcaaattttgttctgccgtgtagaaaaatctctaaaagcatcaaatgactaattttatttttgcaaggttaaaatttatttttaaaagaaacattaaattatatctttatgtagatttagaaggactgcaaccctatgtgacattataacttacttaaaacagttatcaaatatttggaaactattgtttactaataagaataagacttgccttatggaaaatttttgataccacttgttaaatcaggcatgggaggaggagagcagaaaatataattgccttctaaagat

SEQ ID NO: 293615 - DNA, 1836 bp, Homo sapiens
ctcacacttttgctctcttgcagtcagttgctttgctggcttctgcaggcttttaaggtctcgcggcgtagaaatgcctggcccccacccccttcctcggtctcccctttcaattcagatgtgctgatgtgcagaccggattcatcttctcggagctgcggcggcggctttgggctcaggcggcggcggctcgcgctcggccgcggagtcctggcagcagcggggacgcggcgcgggagtccgagctctggtggcagctgagcccgcggggcgccgctcgccgagccgcggccgcgggaagttcggcagccagaaggacgacctggcaggctgcgagcgccagcgccgccagagccgagtttgcctgcgccctccccgcctccgagtgcagagttccttacctgccctccgcccacccgtgggcccctagccaacttctccctgcgactgggggtaacaggcagtgcttgccctctctactgtcccggcggcatccacatgtttccggacacctgagcaccccggtcccgccgaggagcctccgggtggggagaagagcaccggtgcccctagccccgcacatcagcgcggaccgcggctgcctaacctctgggtcccgtcccctccttttcctccgggggaggaggatggggttgggaacgctttccccgaggatgctcgtgtggctggtggcctcggggattgttttctacggggagctatgggtctgcgctggcctcgattatgattacacttttgatgggaacgaagaggataaaacagagactatagattacaaggacccgtgtaaagccgctgtattttggggcgatattgccttagatgatgaagacttaaatatctttcaaatagataggacaattgaccttacgcagaacccctttggaaaccttggacataccacaggtggacttggagaccatgctatgtcaaagaagcgaggggccctctaccaacttatagacaggataagaagaattggctttggcttggagcaaaacaacacagttaagggaaaagtacctctacaattctcagggcaaaatgagaaaaatcgagttcccagagccgctacatcaagaacggaaagaatatggcctggaggcgttattccttatgttataggaggaaacttcactggcagccagagagccatgttcaagcaggccatgaggcactgggaaaagcacacatgtgtgactttcatagaaagaagtgatgaagagagttacattgtattcacctataggccttgtggatgctgctcctatgtaggtcggcgaggaaatggacctcaggcaatctctatcggcaagaactgtgataaatttgggattgttgttcatgaattgggtcatgtgataggcttttggcatgaacacacaagaccagatcgagataaccacgtaactatcataagagaaaacatccagccaggtcaagagtacaattttctgaagatggagcctggagaagtaaactcacttggagaaagatatgatttcgacagtatcatgcactatgccaggaacaccttctcaagggggatgtttctggataccattctcccctcccgtgatgataatggcatacgtcctgcaattggtcagcgaacccgtctaagcaaaggagatatcgcacaggcaagaaagctgtatagatgtccagcatgtggagaaactctacaagaatccaatggcaacctttcctctccaggatttcccaatggctacccttcttacacacactgcatctggagagtttctgtgaccccaggggagaaggtagtttataccgtcaagcccactattttat

SEQ ID NO: 293616 - DNA, 2905 bp, Homo sapiens
agccccaggatgccgcgcggccacctgcacctgccgccactagcactaagagggatgcgcaaagcaggcggggcgttggagttcagatgttcgctcccgggataggctgccccggagagggagaggcggggtcggctgtatcacgtggatctgctcccgccgccgccgccgccgccgtcgtctttctctgtctcggctgaggcagccatctttctcttgccgcgtgctggtgttggaggaccctccctgcttcagatttaccaacagcatgaatcaagaaaagttagccaaacttcaggctcaggtccggatagggggcaagggtacagctcgcagaaagaagaaggtggtacatagaacagccacagctgatgacaaaaagcttcagagttctctaaaaaaactggctgtgaataatatagctggtattgaagaggtgaacatgattaaagatgatgggacagttattcatttcaacaatcccaaagtccaagcttccctttctgctaatacctttgcaattactggtcatgcagaagccaaaccaatcacagaaatgcttcctggaatattaagtcagcttggtgctgacagtttaacaagccttaggaagttagctgaacagttcccacggcaagtcttggacagtaaagcaccaaaaccagaagacattgatgaggaagatgatgatgttccagatcttgtagaaaattttgatgaggcatcaaagaatgaagctaactaaaagtttggtttttggaagctggcatggactagatttaacaaatcagctatgtggttccaaagttttacagacatggagaacatcacctgttactagttcagtaatataaatattttgtatattaataatgctgtttgttcagcatttttcggtcatttgattttgcattttgcacttcctcccaggatatttttttggtcaaaatatgaagtattggtgcagtttgagggtgttttggtttttgattcctggtttttttgttttttgtttggggtatttttggtgtatgtatgtttatgtatgtgtgtgggtatgtgtgtatacagtggagagcaaattggaaaacagttctatttatcctcctccctccccagtagaaataaaaaaaatctttacatttgttacttttcttttccccccgtaagacacagaattaatggaaagtgagtatcttggatttcaaatctgaagagatttttaccattagtggtttgattttaatttgcttggttaactatcatatttttcatacacttctctggatttaaaatatcttgaggtattttgccactggcttcatgctggagtaatgggtaacatatctttggtatggttgccttagattaacttacctagtcagacccagaagaacttcttttactagcttgcttcctaaatgccttttttcctctccttttggtctccaaatggcctggtcagcttttggtaatattcttcctcatcttccacctagcttgagaaggatgttctccatatagagtttagcgagtgcctaatccctccttttgtaagattttgttccctcagcttgaggaacaacttcatcttcaactttttatttctccctgatgttacagtttggtagatttcaaactggaatagctagcatgtgcttgctaaataattttatgccagccttatcctgtatcctagctgttcttaacagcaggtacaaaaatgcctgtttttcagcaaggttgaaattgggaatgtccttttgaatcagaagaaaataggccatagactcatctcccagcacaaatgggcattctatgaaatggtactggccctaggaggatttcctcaaccactctcctactcttggccttgaacctacctctgggttggatcttactattgtagctgctcactataccctcctgcatgcttagaataatgctttgaggggagcactggtaaaacacagtatttatttttttacctcctttaagaggacttggaggtaagttgcattcattcactcaagtttccctcttgctgtctaatagaagcttactttttgctatatcagcatttgttacagccaatatttaaggacaaaatttagaaaatatatcatttcctggcccatcatcaaactaatacagcttaaccttgcagctaccaacttttgtgtcaagctagatatctttatttgatatctaaggtgcaagaccaacaatatattaagagatctgtagacatgaaggcaaagctcttgtattttttttcatccaaacacctcaatttattttataaattcgttcatttttcctgttatgttttatataatatatggactaaacaaaataaaataacagtgcaaaagaggagaatatttcctcttgtgcttttcttgatgttgtgtacagaatttccttttatattattcctctaccctccacctgtaaatgaatgttagtgcagtaattgtttgaaataatgcctcatccagtgttaggtcagtagctccacagtctacacagtccagaattctttctctaattgtcccaaagggggacattgtggaggcagagttagggggaaccacttcaagtggttagggacagataaataataggcagtatagcacatgaaagaaaacacacacttggaagccaggagacttgtgtcctagtcaaaactctggcattatgtgaccttggacaggtcatctaactactctgaaatttatcatcagtcaaataagattttattctgttttgttttgtttgagatggggatttgctcttgttgtccaggccgaactgcaatgttgtggtctcggctgactgcaacctccacctcccagattcaagcgattctcctgtctcagcctccacagtagctgggattttt

SEQ ID NO: 293617 - DNA, 2838 bp, Homo sapiens
agccccaggatgccgcgcggccacctgcacctgccgccactagcactaagagggatgcgcaaagcaggcggggcgttggagttcagatgttcgctcccgggataggctgccccggagagggagaggcggggtcggctgtatcacgtggatctgctcccgccgccgccgccgccgccgtcgtctttctctgtctcggctgaggcagccatctttctcttgccgcgtgctggtgttggaggaccctccctgcttcagggtacagctcgcagaaagaagaaggtggtacatagaacagccacagctgatgacaaaaagcttcagagttctctaaaaaaactggctgtgaataatatagctggtattgaagaggtgaacatgattaaagatgatgggacagttattcatttcaacaatcccaaagtccaagcttccctttctgctaatacctttgcaattactggtcatgcagaagccaaaccaatcacagaaatgcttcctggaatattaagtcagcttggtgctgacagtttaacaagccttaggaagttagctgaacagttcccacggcaagtcttggacagtaaagcaccaaaaccagaagacattgatgaggaagatgatgatgttccagatcttgtagaaaattttgatgaggcatcaaagaatgaagctaactaaaagtttggtttttggaagctggcatggactagatttaacaaatcagctatgtggttccaaagttttacagacatggagaacatcacctgttactagttcagtaatataaatattttgtatattaataatgctgtttgttcagcatttttcggtcatttgattttgcattttgcacttcctcccaggatatttttttggtcaaaatatgaagtattggtgcagtttgagggtgttttggtttttgattcctggtttttttgttttttgtttggggtatttttggtgtatgtatgtttatgtatgtgtgtgggtatgtgtgtatacagtggagagcaaattggaaaacagttctatttatcctcctccctccccagtagaaataaaaaaaatctttacatttgttacttttcttttccccccgtaagacacagaattaatggaaagtgagtatcttggatttcaaatctgaagagatttttaccattagtggtttgattttaatttgcttggttaactatcatatttttcatacacttctctggatttaaaatatcttgaggtattttgccactggcttcatgctggagtaatgggtaacatatctttggtatggttgccttagattaacttacctagtcagacccagaagaacttcttttactagcttgcttcctaaatgccttttttcctctccttttggtctccaaatggcctggtcagcttttggtaatattcttcctcatcttccacctagcttgagaaggatgttctccatatagagtttagcgagtgcctaatccctccttttgtaagattttgttccctcagcttgaggaacaacttcatcttcaactttttatttctccctgatgttacagtttggtagatttcaaactggaatagctagcatgtgcttgctaaataattttatgccagccttatcctgtatcctagctgttcttaacagcaggtacaaaaatgcctgtttttcagcaaggttgaaattgggaatgtccttttgaatcagaagaaaataggccatagactcatctcccagcacaaatgggcattctatgaaatggtactggccctaggaggatttcctcaaccactctcctactcttggccttgaacctacctctgggttggatcttactattgtagctgctcactataccctcctgcatgcttagaataatgctttgaggggagcactggtaaaacacagtatttatttttttacctcctttaagaggacttggaggtaagttgcattcattcactcaagtttccctcttgctgtctaatagaagcttactttttgctatatcagcatttgttacagccaatatttaaggacaaaatttagaaaatatatcatttcctggcccatcatcaaactaatacagcttaaccttgcagctaccaacttttgtgtcaagctagatatctttatttgatatctaaggtgcaagaccaacaatatattaagagatctgtagacatgaaggcaaagctcttgtattttttttcatccaaacacctcaatttattttataaattcgttcatttttcctgttatgttttatataatatatggactaaacaaaataaaataacagtgcaaaagaggagaatatttcctcttgtgcttttcttgatgttgtgtacagaatttccttttatattattcctctaccctccacctgtaaatgaatgttagtgcagtaattgtttgaaataatgcctcatccagtgttaggtcagtagctccacagtctacacagtccagaattctttctctaattgtcccaaagggggacattgtggaggcagagttagggggaaccacttcaagtggttagggacagataaataataggcagtatagcacatgaaagaaaacacacacttggaagccaggagacttgtgtcctagtcaaaactctggcattatgtgaccttggacaggtcatctaactactctgaaatttatcatcagtcaaataagattttattctgttttgttttgtttgagatggggatttgctcttgttgtccaggccgaactgcaatgttgtggtctcggctgactgcaacctccacctcccagattcaagcgattctcctgtctcagcctccacagtagctgggattttt

SEQ ID NO: 293618 - DNA, 886 bp, Homo sapiens
agccccaggatgccgcgcggccacctgcacctgccgccactagcactaagagggatgcgcaaagcaggcggggcgttggagttcagatgttcgctcccgggataggctgccccggagagggagaggcggggtcggctgtatcacgtggatctgctcccgccgccgccgccgccgccgtcgtctttctctgtctcggctgaggcagccatctttctcttgccgcgtgctggtgttggaggaccctccctgcttcagatttaccaacagcatgaatcaagaaaagttagccaaacttcaggctcaggtccggatagggggcaagggtacagctcgcagaaagaagaaggtggtacatagaacagccacagctgatgacaaaaagcttcagagttctctaaaaaaactggctgtgaataatatagctggtattgaagagcactatttacaagagccaagatttggaagaaacctgtttccatcaacagatgaatagatgaagaaaatgtggcacatacactcaatggaccactattcagccatgaagaagaatgaggtcctgttttgcaatgacatggatggaactggaggtcattatgttaaatgaaataagccaggcactgaaagacaaaccacatattctcacttatttgtgggagctaaaaattaaactcatggagacagagagtggaatgatggttaccagatgctgggagggtagggggaagtgaggatggttaatcagtacaaaaatatacttaggtagaatgaatattatctagtatttgatagcacaataaagtggctgcagtcaacaataatttattgtacatttaagaataactaaaagaaggctgggcttggctcacgcctgtagtcccagcacttt

SEQ ID NO: 293619 - DNA, 382 bp, Homo sapiens
gcggccgactactactactaaattcgcggccgcgtcgacattttagattgacaatatttagctatttctgagcaactctgtgtgatttatacaggaaaaaagggataaacattataagttttctttaaggtctttgttctcaatgactaatattaaaataaactttttgtagtcttggacagtaaagcaccaaaaccagaagacattgatgaggaagatgatgatgttctccatgtctgtaaaactttggaaccacatagctgatttgttaaatctagtccatgccagcttccaaaaaccaaacttttagttagcttcattctttgatgcctcatcaaaattttctacaagatctggaacatcagtcgacgcggccgcgaat

SEQ ID NO: 293620 - DNA, 2721 bp, Homo sapiens
agccccaggatgccgcgcggccacctgcacctgccgccactagcactaagagggatgcgcaaagcaggcggggcgttggagttcagatgttcgctcccgggataggctgccccggagagggagaggcggggtcggctgtatcacgtggatctgctcccgccgccgccgccgccgccgtcgtctttctctgtctcggctgaggcagccatctttctcttgccgcgtgctggtgttggaggaccctccctgcttcagatttaccaacagcatgaatcaagaaaagttagccaaacttcaggctcaggtccggatagggggcaagggtacagctcgcagaaagaagaaggtggtacatagaacagccacagctgatgacaaaaagcttcagagttctctaaaaaaactggctgtgaataatatagctggtattgaagaggtgaacatgattaaagatgatgggacagttattcatttcaacaatcccaaagtccaagcttccctttctgctaatacctttgcaattactggtcatgcagaagccaaaccaatcacagaaatgcttcctggaatattaagtcagcttggtgctgacagtttaacaagccttaggaagttagctgaacagttcccacggcaagtcttggacagtaaagcaccaaaaccagaagacattgatgaggaagatgatgatgttccagatcttgtagaaaattttgatgaggcatcaaagaatgaagctaactaaaagtttggtttttggaagctggcatggactagatttaacaaatcagctatgtggttccaaagttttacagacatggagaacatcacctgttactagttcagtaatataaatattttgtatattaataatgctgtttgttcagcatttttcggtcatttgattttgcattttgcacttcctcccaggatatttttttggtcaaaatatgaagtattggtgcagtttgagggtgttttggtttttgattcctggtttttttgttttttgtttggggtatttttggtgtatgtatgtttatgtatgtgtgtgggtatgtgtgtatacagtggagagcaaattggaaaacagttctatttatcctcctccctccccagtagaaataaaaaaaatctttacatttgttacttttcttttccccccgtaagacacagaattaatggaaagtgagtatcttggatttcaaatctgaagagatttttaccattagtggtttgattttaatttgcttggttaactatcatatttttcatacacttctctggatttaaaatatcttgaggtattttgccactggcttcatgctggagtaatgggtaacatatctttggtatggttgccttagattaacttacctagtcagacccagaagaacttcttttactagcttgcttcctaaatgccttttttcctctccttttggtctccaaatggcctggtcagcttttggtaatattcttcctcatcttccacctagcttgagaaggatgttctccatatagagtttagcgagtgcctaatccctccttttgtaagattttgttccctcagcttgaggaacaacttcatcttcaactttttatttctccctgatgttacagtttggtagatttcaaactggaatagctagcatgtgcttgctaaataattttatgccagccttatcctgtatcctagctgttcttaacagcaggtacaaaaatgcctgtttttcagcaaggttgaaattgggaatgtccttttgaatcagaagaaaataggccatagactcatctcccagcacaaatgggcattctatgaaatggtactggccctaggaggatttcctcaaccactctcctactcttggccttgaacctacctctgggttggatcttactattgtagctgctcactataccctcctgcatgcttagaataatgctttgaggggagcactggtaaaacacagtatttatttttttacctcctttaagaggacttggaggtaagttgcattcattcactcaagtttccctcttgctgtctaatagaagcttactttttgctatatcagcatttgttacagccaatatttaaggacaaaatttagaaaatatatcatttcctggcccatcatcaaactaatacagcttaaccttgcagctaccaacttttgtgtcaagctagatatctttatttgatatctaaggtgcaagaccaacaatatattaagagatctgtagacatgaaggcaaagctcttgtattttttttcatccaaacacctcaatttattttataaattcgttcatttttcctgttatgttttatataatatatggactaaacaaaataaaaaaaaaaaaaaaaaaaaaaaaaaaaaaaaaaaaaaaaaagggggggggggccaaaaatcccccgggggggcccatggggccccccggttttttgtgtaaagaagggggcccccctatggggggggcattataatagcagcaggaggcagcagcggcggggttaacaccaacgtcgggacggggaaaaccaagggcgaccagcgggacaccttggggaggaaggaccccaacctcgtcggcgggcggggccacatagtcgcgaaccccacccccccaaagaggttataagcgcccgagggaaataaaccaccggtgttcatcgtgtggacaccagccctatttctggcgcggagaattggcc

SEQ ID NO: 293621 - DNA, 3137 bp, Homo sapiens
agccccaggatgccgcgcggccacctgcacctgccgccactagcactaagagggatgcgcaaagcaggcggggcgttggagttcagatgttcgctcccgggataggctgccccggagagggagaggcggggtcggctgtatcacgtggatctgctcccgccgccgccgccgccgccgtcgtctttctctgtctcggctgaggcagccatctttctcttgccgcgtgctggtgttggaggaccctccctgcttcagatttaccaacagcatgaatcaagaaaagttagccaaacttcaggctcaggtccggatagggggcaaggttttcctcacaaattcttacctgttcttccatgttggtgaatatgaatatcagctttcttattccctgtactttttaaagcctaaggaagaactagttgtgagcaactgaagtctttgattctcttcagctgtggcaccaggctcaaggagaatattctacccatatctctgcccaacacaatctttgcaaaagtgaaagaaagaatagtacttacctcagacctgaagtgggtacagctcgcagaaagaagaaggtggtacatagaacagccacagctgatgacaaaaagcttcagagttctctaaaaaaactggctgtgaataatatagctggtattgaagaggtgaacatgattaaagatgatgggacagttattcatttcaacaatcccaaagtccaagcttccctttctgctaatacctttgcaattactggtcatgcagaagccaaaccaatcacagaaatgcttcctggaatattaagtcagcttggtgctgacagtttaacaagccttaggaagttagctgaacagttcccacggcaagtcttggacagtaaagcaccaaaaccagaagacattgatgaggaagatgatgatgttccagatcttgtagaaaattttgatgaggcatcaaagaatgaagctaactaaaagtttggtttttggaagctggcatggactagatttaacaaatcagctatgtggttccaaagttttacagacatggagaacatcacctgttactagttcagtaatataaatattttgtatattaataatgctgtttgttcagcatttttcggtcatttgattttgcattttgcacttcctcccaggatatttttttggtcaaaatatgaagtattggtgcagtttgagggtgttttggtttttgattcctggtttttttgttttttgtttggggtatttttggtgtatgtatgtttatgtatgtgtgtgggtatgtgtgtatacagtggagagcaaattggaaaacagttctatttatcctcctccctccccagtagaaataaaaaaaatctttacatttgttacttttcttttccccccgtaagacacagaattaatggaaagtgagtatcttggatttcaaatctgaagagatttttaccattagtggtttgattttaatttgcttggttaactatcatatttttcatacacttctctggatttaaaatatcttgaggtattttgccactggcttcatgctggagtaatgggtaacatatctttggtatggttgccttagattaacttacctagtcagacccagaagaacttcttttactagcttgcttcctaaatgccttttttcctctccttttggtctccaaatggcctggtcagcttttggtaatattcttcctcatcttccacctagcttgagaaggatgttctccatatagagtttagcgagtgcctaatccctccttttgtaagattttgttccctcagcttgaggaacaacttcatcttcaactttttatttctccctgatgttacagtttggtagatttcaaactggaatagctagcatgtgcttgctaaataattttatgccagccttatcctgtatcctagctgttcttaacagcaggtacaaaaatgcctgtttttcagcaaggttgaaattgggaatgtccttttgaatcagaagaaaataggccatagactcatctcccagcacaaatgggcattctatgaaatggtactggccctaggaggatttcctcaaccactctcctactcttggccttgaacctacctctgggttggatcttactattgtagctgctcactataccctcctgcatgcttagaataatgctttgaggggagcactggtaaaacacagtatttatttttttacctcctttaagaggacttggaggtaagttgcattcattcactcaagtttccctcttgctgtctaatagaagcttactttttgctatatcagcatttgttacagccaatatttaaggacaaaatttagaaaatatatcatttcctggcccatcatcaaactaatacagcttaaccttgcagctaccaacttttgtgtcaagctagatatctttatttgatatctaaggtgcaagaccaacaatatattaagagatctgtagacatgaaggcaaagctcttgtattttttttcatccaaacacctcaatttattttataaattcgttcatttttcctgttatgttttatataatatatggactaaacaaaataaaataacagtgcaaaagaggagaatatttcctcttgtgcttttcttgatgttgtgtacagaatttccttttatattattcctctaccctccacctgtaaatgaatgttagtgcagtaattgtttgaaataatgcctcatccagtgttaggtcagtagctccacagtctacacagtccagaattctttctctaattgtcccaaagggggacattgtggaggcagagttagggggaaccacttcaagtggttagggacagataaataataggcagtatagcacatgaaagaaaacacacacttggaagccaggagacttgtgtcctagtcaaaactctggcattatgtgaccttggacaggtcatctaactactctgaaatttatcatcagtcaaataagattttattctgttttgttttgtttgagatggggatttgctcttgttgtccaggccgaactgcaatgttgtggtctcggctgactgcaacctccacctcccagattcaagcgattctcctgtctcagcctccacagtagctgggattttt

SEQ ID NO: 293622 - DNA, 2466 bp, Homo sapiens
gcggccgactactactactaaattcgcggccgcgtcgacaatcccaaagtccaagcttccctttctgctaatacctttgcaattactggtcatgcagaagccaaaccaatcacagaaatgcttcctggaatattaagtcagcttggtgctgacagtttaacaagccttaggaagttagctgaacagttcccacggcaagtcttggacagtaaagcaccaaaaccagaagacattgatgaggaagatgatgatgttccagatcttgtagaaaattttgatgaggcatcaaagaatgaagctaactaaaagtttggtttttggaagctggcatggactagatttaacaaatcagctatgtggttccaaagttttacagacatggagaacatcacctgttactagttcagtaatataaatattttgtatattaataatgctgtttgttcagcatttttcggtcatttgattttgcattttgcacttcctcccaggatatttttttggtcaaaatatgaagtattggtgcagtttgagggtgttttggtttttgattcctggtttttttgttttttgtttggggtatttttggtgtatgtatgtttatgtatgtgtgtgggtatgtgtgtatacagtggagagcaaattggaaaacagttctatttatcctcctccctccccagtagaaataaaaaaaatctttacatttgttacttttcttttccccccgtaagacacagaattaatggaaagtgagtatcttggatttcaaatctgaagagatttttaccattagtggtttgattttaatttgcttggttaactatcatatttttcatacacttctctggatttaaaatatcttgaggtattttgccactggcttcatgctggagtaatgggtaacatatctttggtatggttgccttagattaacttacctagtcagacccagaagaacttcttttactagcttgcttcctaaatgccttttttcctctccttttggtctccaaatggcctggtcagcttttggtaatattcttcctcatcttccacctagcttgagaaggatgttctccatatagagtttagcgagtgcctaatccctccttttgtaagattttgttccctcagcttgaggaacaacttcatcttcaactttttatttctccctgatgttacagtttggtagatttcaaactggaatagctagcatgtgcttgctaaataattttatgccagccttatcctgtatcctagctgttcttaacagcaggtacaaaaatgcctgtttttcagcaaggttgaaattgggaatgtccttttgaatcagaagaaaataggccatagactcatctcccagcacaaatgggcattctatgaaatggtactggccctaggaggatttcctcaaccactctcctactcttggccttgaacctacctctgggttggatcttactattgtagctgctcactataccctcctgcatgcttagaataatgctttgaggggagcactggtaaaacacagtatttatttttttacctcctttaagaggacttggaggtaagttgcattcattcactcaagtttccctcttgctgtctaatagaagcttactttttgctatatcagcatttgttacagccaatatttaaggacaaaatttagaaaatatatcatttcctggcccatcatcaaactaatacagcttaaccttgcagctaccaacttttgtgtcaagctagatatctttatttgatatctaaggtgcaagaccaacaatatattaagagatctgtagacatgaaggcaaagctcttgtattttttttcatccaaacacctcaatttattttataaattcgttcatttttcctgttatgttttatataatatatggactaaacaaaataaaataacagtgcaaaagaggagaatatttcctcttgtgcttttcttgatgttgtgtacagaatttccttttatattattcctctaccctccacctgtaaatgaatgttagtgcagtaattgtttgaaataatgcctcatccagtgttaggtcagtagctccacagtctacacagtccagaattctttctctaattgtcccaaagggggacattgtggaggcagagttagggggaaccacttcaagtggttagggacagataaataataggcagtatagcacatgaaagaaaacacacacttggaagccaggagacttgtgtcctagtcaaaactctggcattatgtgaccttggacaggtcatctaactactctgaaatttatcatcagtcaaataagattttattctgttttgttttgtttgagatggggatttgctcttgttgtccaggccgaactgcaatgttgtggtctcggctgactgcaacctccacctcccagattcaagcgattctcctgtctcagcctccacagtagctgggattttt

SEQ ID NO: 293623 - DNA, 2703 bp, Homo sapiens
agccccaggatgccgcgcggccacctgcacctgccgccactagcactaagagggatgcgcaaagcaggcggggcgttggagttcagatgttcgctcccgggataggctgccccggagagggagaggcggggtcggctgtatcacgtggatctgctcccgccgccgccgccgccgccgtcgtctttctctgtctcggctgaggcagccatctttctcttgccgcgtgctggtgttggaggaccctccctgcttcagatttaccaacagcatgaatcaagaaaagttagccaaacttcaggctcaggtccggatagggggcaagggtacagctcgcagaaagaagaaggtggtacatagaacagccacagctgatgacaaaaagcttcagagttctctaaaaaaactggctgtgaataatatagctggtattgaagagtcttggacagtaaagcaccaaaaccagaagacattgatgaggaagatgatgatgttccagatcttgtagaaaattttgatgaggcatcaaagaatgaagctaactaaaagtttggtttttggaagctggcatggactagatttaacaaatcagctatgtggttccaaagttttacagacatggagaacatcacctgttactagttcagtaatataaatattttgtatattaataatgctgtttgttcagcatttttcggtcatttgattttgcattttgcacttcctcccaggatatttttttggtcaaaatatgaagtattggtgcagtttgagggtgttttggtttttgattcctggtttttttgttttttgtttggggtatttttggtgtatgtatgtttatgtatgtgtgtgggtatgtgtgtatacagtggagagcaaattggaaaacagttctatttatcctcctccctccccagtagaaataaaaaaaatctttacatttgttacttttcttttccccccgtaagacacagaattaatggaaagtgagtatcttggatttcaaatctgaagagatttttaccattagtggtttgattttaatttgcttggttaactatcatatttttcatacacttctctggatttaaaatatcttgaggtattttgccactggcttcatgctggagtaatgggtaacatatctttggtatggttgccttagattaacttacctagtcagacccagaagaacttcttttactagcttgcttcctaaatgccttttttcctctccttttggtctccaaatggcctggtcagcttttggtaatattcttcctcatcttccacctagcttgagaaggatgttctccatatagagtttagcgagtgcctaatccctccttttgtaagattttgttccctcagcttgaggaacaacttcatcttcaactttttatttctccctgatgttacagtttggtagatttcaaactggaatagctagcatgtgcttgctaaataattttatgccagccttatcctgtatcctagctgttcttaacagcaggtacaaaaatgcctgtttttcagcaaggttgaaattgggaatgtccttttgaatcagaagaaaataggccatagactcatctcccagcacaaatgggcattctatgaaatggtactggccctaggaggatttcctcaaccactctcctactcttggccttgaacctacctctgggttggatcttactattgtagctgctcactataccctcctgcatgcttagaataatgctttgaggggagcactggtaaaacacagtatttatttttttacctcctttaagaggacttggaggtaagttgcattcattcactcaagtttccctcttgctgtctaatagaagcttactttttgctatatcagcatttgttacagccaatatttaaggacaaaatttagaaaatatatcatttcctggcccatcatcaaactaatacagcttaaccttgcagctaccaacttttgtgtcaagctagatatctttatttgatatctaaggtgcaagaccaacaatatattaagagatctgtagacatgaaggcaaagctcttgtattttttttcatccaaacacctcaatttattttataaattcgttcatttttcctgttatgttttatataatatatggactaaacaaaataaaataacagtgcaaaagaggagaatatttcctcttgtgcttttcttgatgttgtgtacagaatttccttttatattattcctctaccctccacctgtaaatgaatgttagtgcagtaattgtttgaaataatgcctcatccagtgttaggtcagtagctccacagtctacacagtccagaattctttctctaattgtcccaaagggggacattgtggaggcagagttagggggaaccacttcaagtggttagggacagataaataataggcagtatagcacatgaaagaaaacacacacttggaagccaggagacttgtgtcctagtcaaaactctggcattatgtgaccttggacaggtcatctaactactctgaaatttatcatcagtcaaataagattttattctgttttgttttgtttgagatggggatttgctcttgttgtccaggccgaactgcaatgttgtggtctcggctgactgcaacctccacctcccagattcaagcgattctcctgtctcagcctccacagtagctgggattttt

SEQ ID NO: 293624 - DNA, 2416 bp, Homo sapiens
gttgctggggctgatctagaggatcccaggtcttttccctcaaagcagcagttagctgatgaagatgaaatatggaagcaagacgaagacaacaatcaggaaaatttctgcgagcagtagaacgtgctcgtaaacggggtgaagaggaagagcgaagaatggaaagaaacaaagggaagacattgatgaggaagatgatgatgttccagatcttgtagaaaattttgatgaggcatcaaagaatgaagctaactaaaagtttggtttttggaagctggcatggactagatttaacaaatcagctatgtggttccaaagttttacagacatggagaacatcacctgttactagttcagtaatataaatattttgtatattaataatgctgtttgttcagcatttttcggtcatttgattttgcattttgcacttcctcccaggatatttttttggtcaaaatatgaagtattggtgcagtttgagggtgttttggtttttgattcctggtttttttgttttttgtttggggtatttttggtgtatgtatgtttatgtatgtgtgtgggtatgtgtgtatacagtggagagcaaattggaaaacagttctatttatcctcctccctccccagtagaaataaaaaaaatctttacatttgttacttttcttttccccccgtaagacacagaattaatggaaagtgagtatcttggatttcaaatctgaagagatttttaccattagtggtttgattttaatttgcttggttaactatcatatttttcatacacttctctggatttaaaatatcttgaggtattttgccactggcttcatgctggagtaatgggtaacatatctttggtatggttgccttagattaacttacctagtcagacccagaagaacttcttttactagcttgcttcctaaatgccttttttcctctccttttggtctccaaatggcctggtcagcttttggtaatattcttcctcatcttccacctagcttgagaaggatgttctccatatagagtttagcgagtgcctaatccctccttttgtaagattttgttccctcagcttgaggaacaacttcatcttcaactttttatttctccctgatgttacagtttggtagatttcaaactggaatagctagcatgtgcttgctaaataattttatgccagccttatcctgtatcctagctgttcttaacagcaggtacaaaaatgcctgtttttcagcaaggttgaaattgggaatgtccttttgaatcagaagaaaataggccatagactcatctcccagcacaaatgggcattctatgaaatggtactggccctaggaggatttcctcaaccactctcctactcttggccttgaacctacctctgggttggatcttactattgtagctgctcactataccctcctgcatgcttagaataatgctttgaggggagcactggtaaaacacagtatttatttttttacctcctttaagaggacttggaggtaagttgcattcattcactcaagtttccctcttgctgtctaatagaagcttactttttgctatatcagcatttgttacagccaatatttaaggacaaaatttagaaaatatatcatttcctggcccatcatcaaactaatacagcttaaccttgcagctaccaacttttgtgtcaagctagatatctttatttgatatctaaggtgcaagaccaacaatatattaagagatctgtagacatgaaggcaaagctcttgtattttttttcatccaaacacctcaatttattttataaattcgttcatttttcctgttatgttttatataatatatggactaaacaaaataaaataacagtgcaaaagaggagaatatttcctcttgtgcttttcttgatgttgtgtacagaatttccttttatattattcctctaccctccacctgtaaatgaatgttagtgcagtaattgtttgaaataatgcctcatccagtgttaggtcagtagctccacagtctacacagtccagaattctttctctaattgtcccaaagggggacattgtggaggcagagttagggggaaccacttcaagtggttagggacagataaataataggcagtatagcacatgaaagaaaacacacacttggaagccaggagacttgtgtcctagtcaaaactctggcattatgtgaccttggacaggtcatctaactactctgaaatttatcatcagtcaaataagattttattctgttttgttttgtttgagatggggatttgctcttgttgtccaggccgaactgcaatgttgtggtctcggctgactgcaacctccacctcccagattcaagcgattctcctgtctcagcctccacagtagctgggattttt

SEQ ID NO: 293625 - DNA, 1032 bp, Homo sapiens
agccccaggatgccgcgcggccacctgcacctgccgccactagcactaagagggatgcgcaaagcaggcggggcgttggagttcagatgttcgctcccgggataggctgccccggagagggagaggcggggtcggctgtatcacgtggatctgctcccgccgccgccgccgccgccgtcgtctttctctgtctcggctgaggcagccatctttctcttgccgcgtgctggtgttggaggaccctccctgcttcagatttaccaacagcatgaatcaagaaaagttagccaaacttcaggctcaggtccggatagggggcaagggtacagctcgcagaaagaagaaggtggtacatagaacagccacagctgatgacaaaaagcttcagagttctctaaaaaaactggctgtgaataatatagctggtattgaagaggtgaacatgattaaagatgatgggacagttattcatttcaacaatcccaaagtccaagcttccctttctgctaatacctttgcaattactggtcatgcagaagccaaaccaatcacagaaatgcttcctggaatattaagtcagcttggtgctgacagtttaacaagccttaggaagttagctgaacagttcccacggcaagtcttggacagtaaagcaccaaaaccagaagacattgatgaggaagatgatgatgttccagatcttgtagaaaattttgatgaggcatcaaagaatgaagctaactaaaagtttggtttttggaagctggcatggactagatttaacaaatcagctatgtggttccaaagttttacagacatggagaacatcacctgttactagttcagtaatataaatattttgtatattaataatgctgtttgttcagcatttttcggtcatttgattttgcattttgcacttcctcccaggatatttttttggtcaaaatatgaagtattggtgcagtttgagggtgttttggtttttgattcctggttagggatgcctgtcgggatcatctagatcgactc

SEQ ID NO: 293626 - DNA, 1708 bp, Homo sapiens
ggccattgagataaccccgagatccccgggaagaggtttctccgggatatttgcttggttaactatcatatttttcatacacttctctggatttaaaatatcttgaggtattttgccactggcttcatgctggagtaatgggtaacatatctttggtatggttgccttagattaacttacctagtcagacccagaagaacttcttttactagcttgcttcctaaatgccttttttcctctccttttggtctccaaatggcctggtcagcttttggtaatattcttcctcatcttccacctagcttgagaaggatgttctccatatagagtttagcgagtgcctaatccctccttttgtaagattttgttccctcagcttgaggaacaacttcatcttcaactttttatttctccctgatgttacagtttggtagatttcaaactggaatagctagcatgtgcttgctaaataattttatgccagccttatcctgtatcctagctgttcttaacagcaggtacaaaaatgcctgtttttcagcaaggttgaaattgggaatgtccttttgaatcagaagaaaataggccatagactcatctcccagcacaaatgggcattctatgaaatggtactggccctaggaggatttcctcaaccactctcctactcttggccttgaacctacctctgggttggatcttactattgtagctgctcactataccctcctgcatgcttagaataatgctttgaggggagcactggtaaaacacagtatttatttttttacctcctttaagaggacttggaggtaagttgcattcattcactcaagtttccctcttgctgtctaatagaagcttactttttgctatatcagcatttgttacagccaatatttaaggacaaaatttagaaaatatatcatttcctggcccatcatcaaactaatacagcttaaccttgcagctaccaacttttgtgtcaagctagatatctttatttgatatctaaggtgcaagaccaacaatatattaagagatctgtagacatgaaggcaaagctcttgtattttttttcatccaaacacctcaatttattttataaattcgttcatttttcctgttatgttttatataatatatggactaaacaaaataaaataacagtgcaaaagaggagaatatttcctcttgtgcttttcttgatgttgtgtacagaatttccttttatattattcctctaccctccacctgtaaatgaatgttagtgcagtaattgtttgaaataatgcctcatccagtgttaggtcagtagctccacagtctacacagtccagaattctttctctaattgtcccaaagggggacattgtggaggcagagttagggggaaccacttcaagtggttagggacagataaataataggcagtatagcacatgaaagaaaacacacacttggaagccaggagacttgtgtcctagtcaaaactctggcattatgtgaccttggacaggtcatctaactactctgaaatttatcatcagtcaaataagattttattctgttttgttttgtttgagatggggatttgctcttgttgtccaggccgaactgcaatgttgtggtctcggctgactgcaacctccacctcccagattcaagcgattctcctgtctcagcctccacagtagctgggattttt

SEQ ID NO: 293627 - DNA, 1580 bp, Homo sapiens
cccctccccccccgccccccgaccccatacagtcaccgacttgcatgtcaccccactcccgacacacttaacttcttttactagcttgcttcctaaatgccttttttcctctccttttggtctccaaatggcctggtcagcttttggtaatattcttcctcatcttccacctagcttgagaaggatgttctccatatagagtttagcgagtgcctaatccctccttttgtaagattttgttccctcagcttgaggaacaacttcatcttcaactttttatttctccctgatgttacagtttggtagatttcaaactggaatagctagcatgtgcttgctaaataattttatgccagccttatcctgtatcctagctgttcttaacagcaggtacaaaaatgcctgtttttcagcaaggttgaaattgggaatgtccttttgaatcagaagaaaataggccatagactcatctcccagcacaaatgggcattctatgaaatggtactggccctaggaggatttcctcaaccactctcctactcttggccttgaacctacctctgggttggatcttactattgtagctgctcactataccctcctgcatgcttagaataatgctttgaggggagcactggtaaaacacagtatttatttttttacctcctttaagaggacttggaggtaagttgcattcattcactcaagtttccctcttgctgtctaatagaagcttactttttgctatatcagcatttgttacagccaatatttaaggacaaaatttagaaaatatatcatttcctggcccatcatcaaactaatacagcttaaccttgcagctaccaacttttgtgtcaagctagatatctttatttgatatctaaggtgcaagaccaacaatatattaagagatctgtagacatgaaggcaaagctcttgtattttttttcatccaaacacctcaatttattttataaattcgttcatttttcctgttatgttttatataatatatggactaaacaaaataaaataacagtgcaaaagaggagaatatttcctcttgtgcttttcttgatgttgtgtacagaatttccttttatattattcctctaccctccacctgtaaatgaatgttagtgcagtaattgtttgaaataatgcctcatccagtgttaggtcagtagctccacagtctacacagtccagaattctttctctaattgtcccaaagggggacattgtggaggcagagttagggggaaccacttcaagtggttagggacagataaataataggcagtatagcacatgaaagaaaacacacacttggaagccaggagacttgtgtcctagtcaaaactctggcattatgtgaccttggacaggtcatctaactactctgaaatttatcatcagtcaaataagattttattctgttttgttttgtttgagatggggatttgctcttgttgtccaggccgaactgcaatgttgtggtctcggctgactgcaacctccacctcccagattcaagcgattctcctgtctcagcctccacagtagctgggattttt

SEQ ID NO: 293628 - DNA, 1795 bp, Homo sapiens
agccccaggatgccgcgcggccacctgcacctgccgccactagcactaagagggatgcgcaaagcaggcggggcgttggagttcagatgttcgctcccgggataggctgccccggagagggagaggcggggtcggctgtatcacgtggatctgctcccgccgccgccgccgccgccgtcgtctttctctgtctcggctgaggcagccatctttctcttgccgcgtgctggtgttggaggaccctccctgcttcagatttaccaacagcatgaatcaagaaaagttagccaaacttcaggctcagttcctaaatgccttttttcctctccttttggtctccaaatggcctggtcagcttttggtaatattcttcctcatcttccacctagcttgagaaggatgttctccatatagagtttagcgagtgcctaatccctccttttgtaagattttgttccctcagcttgaggaacaacttcatcttcaactttttatttctccctgatgttacagtttggtagatttcaaactggaatagctagcatgtgcttgctaaataattttatgccagccttatcctgtatcctagctgttcttaacagcaggtacaaaaatgcctgtttttcagcaaggttgaaattgggaatgtccttttgaatcagaagaaaataggccatagactcatctcccagcacaaatgggcattctatgaaatggtactggccctaggaggatttcctcaaccactctcctactcttggccttgaacctacctctgggttggatcttactattgtagctgctcactataccctcctgcatgcttagaataatgctttgaggggagcactggtaaaacacagtatttatttttttacctcctttaagaggacttggaggtaagttgcattcattcactcaagtttccctcttgctgtctaatagaagcttactttttgctatatcagcatttgttacagccaatatttaaggacaaaatttagaaaatatatcatttcctggcccatcatcaaactaatacagcttaaccttgcagctaccaacttttgtgtcaagctagatatctttatttgatatctaaggtgcaagaccaacaatatattaagagatctgtagacatgaaggcaaagctcttgtattttttttcatccaaacacctcaatttattttataaattcgttcatttttcctgttatgttttatataatatatggactaaacaaaataaaataacagtgcaaaagaggagaatatttcctcttgtgcttttcttgatgttgtgtacagaatttccttttatattattcctctaccctccacctgtaaatgaatgttagtgcagtaattgtttgaaataatgcctcatccagtgttaggtcagtagctccacagtctacacagtccagaattctttctctaattgtcccaaagggggacattgtggaggcagagttagggggaaccacttcaagtggttagggacagataaataataggcagtatagcacatgaaagaaaacacacacttggaagccaggagacttgtgtcctagtcaaaactctggcattatgtgaccttggacaggtcatctaactactctgaaatttatcatcagtcaaataagattttattctgttttgttttgtttgagatggggatttgctcttgttgtccaggccgaactgcaatgttgtggtctcggctgactgcaacctccacctcccagattcaagcgattctcctgtctcagcctccacagtagctgggattttt

SEQ ID NO: 293629 - DNA, 439 bp, Homo sapiens
cgaggatgaatctatggttatgaagtactttccatggtatccaacatgtccaccacgcccaggcaactctgtcataccaaaatttctaaagttcctgtgtcatactgcatggaactctcctgctctttcagccttaggtcaaatgcatggcaaaggaatccactacactccagagaaaggacatcatggggaccgaccaccatccaaagcaactgacagtcgttctatctctcgttctcttagctcaatctgaagatatagtcatgctgtcattttaaaaaatctggttttcaaccaaatgattaacactgtacaaacatttatttggatatattttcttatgtaccaatgtatgcaagagattaacattcatatttgtgtccatatattatatgcataaatgcagaacaaaaataaattacatagaaaatgtcaacag

SEQ ID NO: 293630 - DNA, 329 bp, Homo sapiens
gatacctcatattcataaaagtataagaacatgtggttctaaacatatacactctatatccaggataaggtactcattgggaccgaccaccatccaaagcaactgacagtcgttctatctctcgttctcttagctcaatctgaagatatagtcatgctgtcattttaaaaaatctggttttcaaccaaatgattaacactgtacaaacatttatttggatatattttcttatgtaccaatgtatgcaagagattaacattcatatttgtgtccatatattatatgcataaatgcagaacaaaaataaattacatagaaaatgtcaacag

SEQ ID NO: 293631 - DNA, 6938 bp, Homo sapiens
cttaaagtagatcatggaggacacccaggctattgactgggatgttgaagaagaggaggagacagagcaatccagtgaatccttgaggtgtaacgtggagccagtagggcggctacatatctttagtggtgcccatggaccagaaaaagatttcccactacacctcgggaagaatgtggtaggccgaatgcctgactgctctgtggccctgccctttccatctatctccaaacaacatgcagagattgaaatcttagcctgggacaaggcacctatcctccgagactgtgggagccttaatggtactcaaatcctgagacctcctaaggttttgagccctggggtgagtcaccgtctgagggaccaggaattgattctctttgctgacttgctctgccagtaccatcgcctggatgtctctctgccctttgtctcccggggccctctgacagtagaagagacacccagagtacagggagaaactcaaccccagaggcttctgttggctgaggactcggaggaggaagtagattttctttctgaaaggcgtatggtaaaaaaatcaaggaccacatcttcctctgtgatagttccagagagtgatgaagaggggcattccccggtcctgggcggccttgggccgccttttgccttcaatttgaacagtgacacagatgtggaagaaggtcagcaaccagccacagaggaggcctcctcagctgccagaagaggtgccactgtagaggcaaagcagtctgaagctgaagttgtaactgaaatccagcttgaaaaggatcagcctttagtgaaggagagggacaatgatacaaaagtcaagaggggtgcagggaatggggtggttccagctggggtgattctggagaggagccaacctcctggagaggacagtgacacagatgtggatgatgacagcaggcctcctggaaggccagctgaggtccatttggaaagggctcagccttttggcttcatcgacagcgacactgatgcggaagaagagaggatcccagcaaccccagttgtcattcctatgaagaagaggaagatcttccatggagtaggtacaaggggtcctggagcaccaggcctggcccatctgcaggagagccaggctggtagtgatacagatgtggaagaaggcaaggccccacaggctgtccctctggagaaaagccaagcttccatggttatcaacagcgatacagatgacgaggaagaagtctcagcagcgctgactttggcacatctgaaagagagccagcctgctatatggaacagagatgcagaagaggacatgccccaacgtgtggtccttctgcagcgaagccaaaccaccactgagagagacagtgacacagacgtggaggaggaagagctcccagtggaaaatagagaagctgtcctcaaggatcacacaaagattagagcccttgttagagcacattcagaaaaggaccaacctccttttggggacagtgatgacagtgtggaagcagataagagctcacctgggatccacctggagagaagccaagcctccaccacagtggacatcaacacacaagtggagaaggaagtcccgccagggtcagccattatacatataaagaagcatcaggtgtctgtggaggggacaaatcaaacagatgtgaaagcagttgggggaccagcaaagctgcttgtggtatctctagaggaagcctggcctctgcatggggactgtgaaacagatgcagaggagggcacctccctaacagcctcagtagttgcagatgtaagaaagagccagcttccagcagaaggggatgctggggcagagtgggctgcagctgttcttaagcaggagagagctcatgaggtgggggcccagggtgggccacctgtggcacaagtggagcaggacctccctatctcaagagagaacctcacagatctggtggtggacacagacactctaggggaatccacccagccacagagagagggagcccaggtccccacaggaagggagagagaacaacatgtgggtgggaccaaggactctgaagacaactatggtgattctgaagatctggacctacaagctacccagtgctttctggagaatcagggcctggaagcagtccagagcatggaggatgaacctacccaggccttcatgttgactccaccccaagagcttggcccttcccattgcagcttccagacaacaggtaccctagatgaaccatgggaggtcctggctacacagccattctgtctgagagagtctgaggactctgagacccagccttttgacacgcaccttgaggcctatggaccttgcctgtctccacctagggcaataccaggagaccaacatccagagagcccagttcacacagagccaatggggattcaaggcagagggaggcagactgtggataaagtcatgggtataccaaaagaaacagcagagagggtgggccctgagagagggccattggagagagaaactgagaaactgctaccagaaagacagacagatgtgacaggagaggaagaattaaccaaggggaaacaggacagagaacaaaaacagttgttagctagagacacccagagacaagaatctgacaaaaatggggaaagtgcaagtcctgaaagagatagggagagtttgaaggtagaaattgagacatctgaggaaatacaagagaaacaagtacagaagcagacccttccaagcaaagcatttgagagagaagtagagagaccagtagcaaacagagagtgcgatccagccgagttagaagagaaggtgcccaaagtgatcctggagagagatacacagagaggggagccagagggagggagccaggaccagaaagggcaggcctccagcccaacaccagagcctggggtgggggcgggggaccttccgggacctacctcagcccccgtaccttctgggagccagtcaggtggaaggggatccccagtgagccccaggaggcatcagaaaggcctcctgaattgcaagatgccacctgctgagaaggcttccaggatcagagctgctgagaaggtttccaggggcgatcaggaatctccagatgcttgtctgcctcctgcagtacctgaagccccagccccaccccaaaagccccttaactctcagagccagaaacatcttgcacctccgccccttctttctccccttttaccttctatcaagccaaccgttcgtaagaccaggcaagatgggagtcaggaagctccagaggctcccttgtcctcagagctggagcctttccacccaaagcctaaaattagaactcggaagtcctccagaatgacaccctttccagctacctctgctgcccctgagccccacccttccacctccacagcccagccagtcactcccaagcccacatctcaggccactaggagcaggacaaataggtcctctgtcaagacccctgaaccagttgtccccacagcccctgagctccagccttccacctccacagaccagcctgtcacctctgagcccacatctcaggttactaggggaagaaaaagtagatcctctgtcaagacccctgaaacagttgtgcccacagcccttgagctccagccttccacctccaccgaccgacctgtcacctctgaacccacctctcaggctactaggggaagaaaaaatagatcctctgtcaagacccctgaaccagttgtccccacagcccctgagctccagccttccacctccacagaccagcctgtcacttctgagcccacatatcaggctactaggggaagaaaaaatagatcctctgtcaagacccctgaaccagttgtgcccacagcccctgagctccggccttccacctccacagaccgacctgtcacccccaagcccacatctcggaccactaggagcaggacaaatatgtcctctgtcaagacccctgaaacagttgtccccacagcccctgagctccagatttccacctccacagaccaacctgtcacccctaagcccacatctcggaccactaggagcaggacaaatatgtcctctgtgaagaaccctgaatcaactgtccctatagcccctgagctcccaccttccacctccacagagcagcctgtcacccctgagcccacatctcgggctactaggggaagaaaaaatagatcctctggcaagacccctgaaacacttgtccccacagcccctaagctcgagccttccacttccacagaccaacctgtcactcctgagcccacatctcaggccaccaggggcaggacaaataggtcctctgtgaagacccctgaaacagttgtccccacagcccctgagctccagccttccacctccacagaccagcctgttacccctgagcctacgtctcaggctactaggggaagaacagatagatcctctgtcaagactcctgaaacagttgtccccacagcccctgagctacaggcttccgcctccacagaccagcctgtcacctctgagcccacatctcggaccactaggggaagaaaaaatcggtcctctgtcaagacccctgaaacagttgtgcccgcagcccctgagctccagcctcccacctccacagaccaacctgtcacccctgagcccacatctcgggccactaggggcaggacaaataggtcctctgtcaagacccctgaatcaattgtccctatagcccctgagcttcagccttccacctccagaaaccagcttgtcacccctgagcccacatctcgggccactaggtgcaggacaaataggtcctctgtcaagacccctgagccagttgtccccacagcccctgagccccatcctaccacctccacagaccagcctgtcacccccaagctcacatctagggccactaggagaaagacaaataggtcctctgtcaagactcccaaaccagttgaaccagcagcctctgatcttgagccttttacccccacagaccagtccgtcacccctgaggccatagctcagggtggtcagagcaaaacactgaggtcttccacagtaagagctatgccggttcctaccacccctgaattccaatctcctgtcaccacagaccagcctatttcccctgagcctattactcaacccagttgcatcaagaggcagagagccgctgggaaccctggctccctcgcagctcccattgaccataagccttgctctgcacccttggaacctaaatcccaggcctcaaggaaccaaagatggggagcagtgagagcagctgaatcccttacagccattcctgagcctgcctctccccagcttcttgagacaccaattcatgcctcccagatccaaaaggtggaaccagcaggtagatctaggttcaccccggagctccagcctaaggcctctcaaagccgcaagaggtctttagctaccatggattcaccaccacatcaaaaacagccccaaagaggggaagtctcccagaagacagtgattatcaaggaagaggaagaagatactgcagagaagccagggaaggaagaggatgtcgtgactccaaaaccaggcaagagaaagagagaccaggcagaggaggagcccaacagaataccaagccgcagcctccgacggaccaaacttaaccaagaatcaacagcccccaaagtgctcttcacaggagtggtggatgctcggggagagcgggctgtgctggcactggggggaagtctggctggttcagcggcagaggcttcccacctggtcactgatcgcatccgccggacagtcaagttcctgtgtgccctggggcggggaatccccattctgtccctggactggctgcatcagtcccgcaaggctggtttcttcttacccccggatgaatatgtggtgaccgaccctgagcaagagaagaactttggctttagccttcaagacgcactgagcagggctcgggagcgaaggctgctagagggctatgagatctatgtgacccctggagtccagccaccaccacctcagatgggagagattattagctgctgtggaggcacatacctacccagcatgcctcggtcctataagcctcagagagttgtgatcacatgccctcaggacttccctcattgctccattccactacgggttgggctgcccctcctctcgcctgagttcctgctgactggagtgctgaagcaggaagccaagccagaggcctttgtcctctcccctttggagatgtcatccacctgagaactccactacccttttccctcccagaccacgaattagaagatatgtggaagaaagaactcagggcgttagaaaggattggggtatattgatacaacttgtcctggaacatgggtgggaccagaaatctttatgaataaatgaaaagataagggatttggaagccacaggttgttttttgtttgtttgtttgtttttttaatggccattttattttatttgtatttatagttttttatttgtatagatttaggggatacaagatttcttacatgcatgtattaaatggccattttaaaattagctagtttcatgctcagatgtcataagtggcagctatctttagccagactgttgcagttattgctcgatgccactcatggtgtcctacctcctatttggaaaccatctctatttttttcttactgagattcttactttggggtcaggaacttgaagggatgcttggagtgagtagatttgagggtccagttatggagtgctactaaaacattttcttctctcctggcctctggaagcatctttagctttgactttgggcaagtctctgtacttttctggccagcttttccaggatttataaaattagagcttcggcttgacctctgtgataaataaatattcactctgtgcc

SEQ ID NO: 293632 - DNA, 6146 bp, Homo sapiens
cttaaagtagatcatggaggacacccaggctattgactgggatgttgaagaagaggaggagacagagcaatccagtgaatccttgaggtgtaacgtggagccagtagggcggctacatatctttagtggtgcccatggaccagaaaaagatttcccactacacctcgggaagaatgtggtaggccgaatgcctgactgctctgtggccctgccctttccatctatctccaaacaacatgcagagattgaaatcttagcctgggacaaggcacctatcctccgagactgtgggagccttaatggtactcaaatcctgagacctcctaaggttttgagccctggggtgagtcaccgtctgagggaccaggaattgattctctttgctgacttgctctgccagtaccatcgcctggatgtctctctgccctttgtctcccggggccctctgacagtagaagagacacccagagtacagggagaaactcaaccccagaggcttctgttggctgaggactcggaggaggaagtagattttctttctgaaaggcgtatggtaaaaaaatcaaggaccacatcttcctctgtgatagttccagagagtgatgaagaggggcattccccggtcctgggcggccttgggccgccttttgccttcaatttgaacagtgacacagatgtggaagaaggtcagcaaccagccacagaggaggcctcctcagctgccagaagaggtgccactgtagaggcaaagcagtctgaagctgaagttgtaactgaaatccagcttgaaaaggatcagcctttagtgaaggagagggacaatgatacaaaagtcaagaggggtgcagggaatggggtggttccagctggggtgattctggagaggagccaacctcctggagaggacagtgacacagatgtggatgatgacagcaggcctcctggaaggccagctgaggtccatttggaaagggctcagccttttggcttcatcgacagcgacactgatgcggaagaagagaggatcccagcaaccccagttgtcattcctatgaagaagaggaagatcttccatggagtaggtacaaggggtcctggagcaccaggcctggcccatctgcaggagagccaggctggtagtgatacagatgtggaagaaggcaaggccccacaggctgtccctctggagaaaagccaagcttccatggttatcaacagcgatacagatgacgaggaagaagtctcagcagcgctgactttggcacatctgaaagagagccagcctgctatatggaacagagatgcagaagaggacatgccccaacgtgtggtccttctgcagcgaagccaaaccaccactgagagagacagtgacacagacgtggaggaggaagagctcccagtggaaaatagagaagctgtcctcaaggatcacacaaagattagagcccttgttagagcacattcagaaaaggaccaacctccttttggggacagtgatgacagtgtggaagcagataagagctcacctgggatccacctggagagaagccaagcctccaccacagtggacatcaacacacaagtggagaaggaagtcccgccagggtcagccattatacatataaagaagcatcaggtgtctgtggaggggacaaatcaaacagatgtgaaagcagttgggggaccagcaaagctgcttgtggtatctctagaggaagcctggcctctgcatggggactgtgaaacagatgcagaggagggcacctccctaacagcctcagtagttgcagatgtaagaaagagccagcttccagcagaaggggatgctggggcagagtgggctgcagctgttcttaagcaggagagagctcatgaggtgggggcccagggtgggccacctgtggcacaagtggagcaggacctccctatctcaagagagaacctcacagatctggtggtggacacagacactctaggggaatccacccagccacagagagagggagcccaggtccccacaggaagggagagagaacaacatgtgggtgggaccaaggactctgaagacaactatggtgattctgaagatctggacctacaagctacccagtgctttctggagaatcagggcctggaagcagtccagagcatggaggatgaacctacccaggccttcatgttgactccaccccaagagcttggcccttcccattgcagcttccagacaacaggcctcctgaattgcaagatgccacctgctgagaaggcttccaggatcagagctgctgagaaggtttccaggggcgatcaggaatctccagatgcttgtctgcctcctgcagtacctgaagccccagccccaccccaaaagccccttaactctcagagccagaaacatcttgcacctccgccccttctttctccccttttaccttctatcaagccaaccgttcgtaagaccaggcaagatgggagtcaggaagctccagaggctcccttgtcctcagagctggagcctttccacccaaagcctaaaattagaactcggaagtcctccagaatgacaccctttccagctacctctgctgcccctgagccccacccttccacctccacagcccagccagtcactcccaagcccacatctcaggccactaggagcaggacaaataggtcctctgtcaagacccctgaaccagttgtccccacagcccctgagctccagccttccacctccacagaccagcctgtcacctctgagcccacatctcaggttactaggggaagaaaaagtagatcctctgtcaagacccctgaaacagttgtgcccacagcccttgagctccagccttccacctccaccgaccgacctgtcacctctgaacccacctctcaggctactaggggaagaaaaaatagatcctctgtcaagacccctgaaccagttgtccccacagcccctgagctccagccttccacctccacagaccagcctgtcacttctgagcccacatatcaggctactaggggaagaaaaaatagatcctctgtcaagacccctgaaccagttgtgcccacagcccctgagctccggccttccacctccacagaccgacctgtcacccccaagcccacatctcggaccactaggagcaggacaaatatgtcctctgtcaagacccctgaaacagttgtccccacagcccctgagctccagatttccacctccacagaccaacctgtcacccctaagcccacatctcggaccactaggagcaggacaaatatgtcctctgtgaagaaccctgaatcaactgtccctatagcccctgagctcccaccttccacctccacagagcagcctgtcacccctgagcccacatctcgggctactaggggaagaaaaaatagatcctctggcaagacccctgaaacacttgtccccacagcccctaagctcgagccttccacttccacagaccaacctgtcactcctgagcccacatctcaggccaccaggggcaggacaaataggtcctctgtgaagacccctgaaacagttgtccccacagcccctgagctccagccttccacctccacagaccagcctgttacccctgagcctacgtctcaggctactaggggaagaacagatagatcctctgtcaagactcctgaaacagttgtccccacagcccctgagctacaggcttccgcctccacagaccagcctgtcacctctgagcccacatctcggaccactaggggaagaaaaaatcggtcctctgtcaagacccctgaaacagttgtgcccgcagcccctgagctccagcctcccacctccacagaccaacctgtcacccctgagcccacatctcgggccactaggggcaggacaaataggtcctctgtcaagacccctgaatcaattgtccctatagcccctgagcttcagccttccacctccagaaaccagcttgtcacccctgagcccacatctcgggccactaggtgcaggacaaataggtcctctgtcaagacccctgagccagttgtccccacagcccctgagccccatcctaccacctccacagaccagcctgtcacccccaagctcacatctagggccactaggagaaagacaaataggtcctctgtcaagactcccaaaccagttgaaccagcagcctctgatcttgagccttttacccccacagaccagtccgtcacccctgaggccatagctcagggtggtcagagcaaaacactgaggtcttccacagtaagagctatgccggttcctaccacccctgaattccaatctcctgtcaccacagaccagcctatttcccctgagcctattactcaacccagttgcatcaagaggcagagagccgctgggaaccctggctccctcgcagctcccattgaccataagccttgctctgcacccttggaacctaaatcccaggcctcaaggaaccaaagatggggagcagtgagagcagctgaatcccttacagccattcctgagcctgcctctccccagcttcttgagacaccaattcatgcctcccagatccaaaaggtggaaccagcaggtagatctaggttcaccccggagctccagcctaaggcctctcaaagccgcaagaggtctttagctaccatggattcaccaccacatcaaaaacagccccaaagaggggaagtctcccagaagacagtgattatcaaggaagaggaagaagatactgcagagaagccagggaaggaagaggatgtcgtgactccaaaaccaggcaagagaaagagagaccaggcagaggaggagcccaacagaataccaagccgcagcctccgacggaccaaacttaaccaagaatcaacagcccccaaagtgctcttcacaggagtggtggatgctcggggagagcgggctgtgctggcactggggggaagtctggctggttcagcggcagaggcttcccacctggtcactgatcgcatccgccggacagtcaagttcctgtgtgccctggggcggggaatccccattctgtccctggactggctgcatcagtcccgcaaggctggtttcttcttacccccggatgaatatgtggtgaccgaccctgagcaagagaagaactttggctttagccttcaagacgcactgagcagggctcgggagcgaaggctgctagagggctatgagatctatgtgacccctggagtccagccaccaccacctcagatgggagagattattagctgctgtggaggcacatacctacccagcatgcctcggtcctataagcctcagagagttgtgatcacatgccctcaggacttccctcattgctccattccactacgggttgggctgcccctcctctcgcctgagttcctgctgactggagtgctgaagcaggaagccaagccagaggcctttgtcctctcccctttggagatgtcatccacctgagaactccactacccttttccctcccagaccacgaattagaagatatgtggaagaaagaactcagggcgttagaaaggattggggtatattgatacaacttgtcctggaacatgggtgggaccagaaatctttatgaataaatgaaaagataagggatttggaagccacaggttgttttttgtttgtttgtttgtttttttaatggccattttattttatttgtatttatagttttttatttgtatagatttaggggatacaagatttcttacatgcatgtattaaatggccattttaaaattagctagtttcatgctcagatgtcataagtggcagctatctttagccagactgttgcagttattgctcgatgccactcatggtgtcctacctcctatttggaaaccatctctatttttttcttactgagattcttactttggggtcaggaacttgaagggatgcttggagtgagtagatttgagggtccagttatggagtgctactaaaacattttcttctctcctggcctctggaagcatctttagctttgactttgggcaagtctctgtacttttctggccagcttttccaggatttataaaattagagcttcggcttgacctctgtgataaataaatattcactctgtgcc

SEQ ID NO: 293633 - DNA, 7331 bp, Homo sapiens
cttaaagtagatcatggaggacacccaggctattgactgggatgttgaagaagaggaggagacagagcaatccagtgaatccttgaggtgtaacgtggagccagtagggcggctacatatctttagtggtgcccatggaccagaaaaagatttcccactacacctcgggaagaatgtggtaggccgaatgcctgactgctctgtggccctgccctttccatctatctccaaacaacatgcagagattgaaatcttagcctgggacaaggcacctatcctccgagactgtgggagccttaatggtactcaaatcctgagacctcctaaggttttgagccctggggtgagtcaccgtctgagggaccaggaattgattctctttgctgacttgctctgccagtaccatcgcctggatgtctctctgccctttgtctcccggggccctctgacagtagaagagacacccagagtacagggagaaactcaaccccagaggcttctgttggctgaggactcggaggaggaagtagattttctttctgaaaggcgtatggtaaaaaaatcaaggaccacatcttcctctgtgatagttccagagagtgatgaagaggggcattccccggtcctgggcggccttgggccgccttttgccttcaatttgaacagtgacacagatgtggaagaaggtcagcaaccagccacagaggaggcctcctcagctgccagaagaggtgccactgtagaggcaaagcagtctgaagctgaagttgtaactgaaatccagcttgaaaaggatcagcctttagtgaaggagagggacaatgatacaaaagtcaagaggggtgcagggaatggggtggttccagctggggtgattctggagaggagccaacctcctggagaggacagtgacacagatgtggatgatgacagcaggcctcctggaaggccagctgaggtccatttggaaagggctcagccttttggcttcatcgacagcgacactgatgcggaagaagagaggatcccagcaaccccagttgtcattcctatgaagaagaggaagatcttccatggagtaggtacaaggggtcctggagcaccaggcctggcccatctgcaggagagccaggctggtagtgatacagatgtggaagaaggcaaggccccacaggctgtccctctggagaaaagccaagcttccatggttatcaacagcgatacagatgacgaggaagaagtctcagcagcgctgactttggcacatctgaaagagagccagcctgctatatggaacagagatgcagaagaggacatgccccaacgtgtggtccttctgcagcgaagccaaaccaccactgagagagacagtgacacagacgtggaggaggaagagctcccagtggaaaatagagaagctgtcctcaaggatcacacaaagattagagcccttgttagagcacattcagaaaaggaccaacctccttttggggacagtgatgacagtgtggaagcagataagagctcacctgggatccacctggagagaagccaagcctccaccacagtggacatcaacacacaagtggagaaggaagtcccgccagggtcagccattatacatataaagaagcatcaggtgtctgtggaggggacaaatcaaacagatgtgaaagcagttgggggaccagcaaagctgcttgtggtatctctagaggaagcctggcctctgcatggggactgtgaaacagatgcagaggagggcacctccctaacagcctcagtagttgcagatgtaagaaagagccagcttccagcagaaggggatgctggggcagagtgggctgcagctgttcttaagcaggagagagctcatgaggtgggggcccagggtgggccacctgtggcacaagtggagcaggacctccctatctcaagagagaacctcacagatctggtggtggacacagacactctaggggaatccacccagccacagagagagggagcccaggtccccacaggaagggagagagaacaacatgtgggtgggaccaaggactctgaagacaactatggtgattctgaagatctggacctacaagctacccagtgctttctggagaatcagggcctggaagcagtccagagcatggaggatgaacctacccaggccttcatgttgactccaccccaagagcttggcccttcccattgcagcttccagacaacaggtaccctagatgaaccatgggaggtcctggctacacagccattctgtctgagagagtctgaggactctgagacccagccttttgacacgcaccttgaggcctatggaccttgcctgtctccacctagggcaataccaggagaccaacatccagagagcccagttcacacagagccaatggggattcaaggcagagggaggcagactgtggataaagtcatgggtataccaaaagaaacagcagagagggtgggccctgagagagggccattggagagagaaactgagaaactgctaccagaaagacagacagatgtgacaggagaggaagaattaaccaaggggaaacaggacagagaacaaaaacagttgttagctagagacacccagagacaagaatctgacaaaaatggggaaagtgcaagtcctgaaagagatagggagagtttgaaggtagaaattgagacatctgaggaaatacaagagaaacaagtacagaagcagacccttccaagcaaagcatttgagagagaagtagagagaccagtagcaaacagagagtgcgatccagccgagttagaagagaaggtgcccaaagtgatcctggagagagatacacagagaggggagccagagggagggagccaggaccagaaagggcaggcctccagcccaacaccagagcctggggtgggggcgggggaccttccgggacctacctcagcccccgtaccttctgggagccagtcaggtggaaggggatccccagtgagccccaggaggcatcagaaaggcctcctgaattgcaagatgccacctgctgagaaggcttccaggatcagagctgctgagaaggtttccaggggcgatcaggaatctccagatgcttgtctgcctcctgcagtacctgaagccccagccccaccccaaaagccccttaactctcagagccagaaacatcttgcacctccgccccttctttctccccttttaccttctatcaagccaaccgttcgtaagaccaggcaagatgggagtcaggaagctccagaggctcccttgtcctcagagctggagcctttccacccaaagcctaaaattagaactcggaagtcctccagaatgacaccctttccagctacctctgctgcccctgagccccacccttccacctccacagcccagccagtcactcccaagcccacatctcaggccactaggagcaggacaaataggtcctctgtcaagacccctgaaccagttgtccccacagcccctgagctccagccttccacctccacagaccagcctgtcacctctgagcccacatctcaggttactaggggaagaaaaagtagatcctctgtcaagacccctgaaacagttgtgcccacagcccttgagctccagccttccacctccaccgaccgacctgtcacctctgaacccacctctcaggctactaggggaagaaaaaatagatcctctgtcaagacccctgaaccagttgtccccacagcccctgagctccagccttccacctccacagaccagcctgtcacttctgagcccacatatcaggctactaggggaagaaaaaatagatcctctgtcaagacccctgaaccagttgtgcccacagcccctgagctccggccttccacctccacagaccgacctgtcacccccaagcccacatctcggaccactaggagcaggacaaatatgtcctctgtcaagacccctgaaacagttgtccccacagcccctgagctccagatttccacctccacagaccaacctgtcacccctaagcccacatctcggaccactaggagcaggacaaatatgtcctctgtgaagaaccctgaatcaactgtccctatagcccctgagctcccaccttccacctccacagagcagcctgtcacccctgagcccacatctcgggctactaggggaagaaaaaatagatcctctggcaagacccctgaaacacttgtccccacagcccctaagctcgagccttccacttccacagaccaacctgtcactcctgagcccacatctcaggccaccaggggcaggacaaataggtcctctgtgaagacccctgaaacagttgtccccacagcccctgagctccagccttccacctccacagaccagcctgttacccctgagcctacgtctcaggctactaggggaagaacagatagatcctctgtcaagactcctgaaacagttgtccccacagcccctgagctacaggcttccgcctccacagaccagcctgtcacctctgagcccacatctcggaccactaggggaagaaaaaatcggtcctctgtcaagacccctgaaacagttgtgcccgcagcccctgagctccagcctcccacctccacagaccaacctgtcacccctgagcccacatctcgggccactaggggcaggacaaataggtcctctgtcaagacccctgaatcaattgtccctatagcccctgagcttcagccttccacctccagaaaccagcttgtcacccctgagcccacatctcgggccactaggtgcaggacaaataggtcctctgtcaagacccctgagccagttgtccccacagcccctgagccccatcctaccacctccacagaccagcctgtcacccccaagctcacatctagggccactaggagaaagacaaataggtcctctgtcaagactcccaaaccagttgaaccagcagcctctgatcttgagccttttacccccacagaccagtccgtcacccctgaggccatagctcagggtggtcagagcaaaacactgaggtcttccacagtaagagctatgccggttcctaccacccctgaattccaatctcctgtcaccacagaccagcctatttcccctgagcctattactcaacccagttgcatcaagaggcagagagccgctgggaaccctggctccctcgcagctcccattgaccataagccttgctctgcacccttggaacctaaatcccaggcctcaaggaaccaaagatggggagcagtgagagcagctgaatcccttacagccattcctgagcctgcctctccccagcttcttgagacaccaattcatgcctcccagatccaaaaggtggaaccagcaggtagatctaggttcaccccggagctccagcctaaggcctctcaaagccgcaagaggtctttagctaccatggattcaccaccacatcaaaaacagccccaaagaggggaagtctcccagaagacagtgattatcaaggaagaggaagaagatactgcagagaagccagggaaggaagaggatgtcgtgactccaaaaccaggcaagagaaagagagaccaggcagaggaggagcccaacagaataccaagccgcagcctccgacggaccaaacttaaccaagaatcaacagcccccaaagtgctcttcacaggagtggtggatgctcggggagagcgggctgtgctggcactggggggaagtctggctggttcagcggcagaggcttcccacctggtcactgatcgcatccgccggacagtcaagttcctgtgtgccctggggcggggaatccccattctgtccctggactggctgcatcagtcccgcaaggctggtttcttcttacccccggatgaatatgtggtgaccgaccctgagcaagagaagaactttggctttagccttcaagacgcactgagcagggctcgggagcgaaggctgctagagggctatgagatctatgtgacccctggagtccagccaccaccacctcagatgggagagattattagctgctgtggaggcacatacctacccagcatgcctcggtcctataagcctcagagagttgtgatcacatgccctcaggacttccctcattgctccattccactacgggttgggctgcccctcctctcgcctgagttcctgctgactggagtgctgaagcaggaagccaagccagaggcctttgtcctctcccctttggagatgtcatccacctgagaactccactacccttttccctcccagaccacgaattagaagatatgtggaagaaagaactcagggcgttagaaaggattggggtatattgatacaacttgtcctggaacatgggtgggaccagaaatctttatgaataaatgaaaagataagggatttggaagccacaggttgttttttgtttgtttgtttgtttttttaatggccattttattttatttgtatttatagttttttatttgtatagatttaggggatacaagatttcttacatgcatgtattaaatggccattttaaaattagctagtttcatgctcagatgtcataagtggcagctatctttagccagactgttgcagttattgctcgatgccactcatggtgtcctacctcctatttggaaaccatctctatttttttcttactgagattcttactttggggtcaggaacttgaagggatgcttggagtgagtagatttgagggtccagttatggagtgctactaaaacattttcttctctcctggcctctggaagcatctttagctttgactttgggcaagtctctgtacttttctggccagcttttccaggatttataaaattagagcttcggcttgacctctgtgataaataaatattcactctgtgccaaaaaaaaaaaaaaaaaaaaaaaaaacaaaaaaaaagaaacaacaaaaaaacaaagacgacaaaaaaaagagggggcgcgcaaaaagaaatacccagaggtgaccaaattagaaacaacagagattatgagacaaggggaccaaaagagagcgataagaccaaagcaaacggacacgcctaaacacacgcgcacaaagcaaaaacagagagagagagaagattttggtagaaagagacaactctactatggggagggcacaacattgtgagaaatctacccgacagatactaaacacactggatgagaataaagaaacagaagctcataaaggtaaaaacagaagagattgtaggtgtagaatatttcaggaaaattaaagaaaaaattaggg

SEQ ID NO: 293634 - DNA, 6439 bp, Homo sapiens
cttaaagtagatcatggaggacacccaggctattgactgggatgttgaagaagaggaggagacagagcaatccagtgaatccttgaggtgtaacgtggagccagtagggcggctacatatctttagtggtgcccatggaccagaaaaagatttcccactacacctcgggaagaatgtggtaggccgaatgcctgactgctctgtggccctgccctttccatctatctccaaacaacatgcagagattgaaatcttagcctgggacaaggcacctatcctccgagactgtgggagccttaatggtactcaaatcctgagacctcctaaggttttgagccctggggtgagtcaccgtctgagggaccaggaattgattctctttgctgacttgctctgccagtaccatcgcctggatgtctctctgccctttgtctcccggggccctctgacagtagaagagacacccagagtacagggagaaactcaaccccagaggcttctgttggctgaggactcggaggaggaagtagattttctttctgaaaggcgtatggtaaaaaaatcaaggaccacatcttcctctgtgatagttccagagagtgatgaagaggggcattccccggtcctgggcggccttgggccgccttttgccttcaatttgaacagtgacacagatgtggaagaaggtcagcaaccagccacagaggaggcctcctcagctgccagaagaggtgccactgtagaggcaaagcagtctgaagctgaagttgtaactgaaatccagcttgaaaaggatcagcctttagtgaaggagagggacaatgatacaaaagtcaagaggggtgcagggaatggggtggttccagctggggtgattctggagaggagccaacctcctggagaggacagtgacacagatgtggatgatgacagcaggcctcctggaaggccagctgaggtccatttggaaagggctcagccttttggcttcatcgacagcgacactgatgcggaagaagagaggatcccagcaaccccagttgtcattcctatgaagaagaggaagatcttccatggagtaggtacaaggggtcctggagcaccaggcctggcccatctgcaggagagccaggctggtagtgatacagatgtggaagaaggcaaggccccacaggctgtccctctggagaaaagccaagcttccatggttatcaacagcgatacagatgacgaggaagaagtctcagcagcgctgactttggcacatctgaaagagagccagcctgctatatggaacagagatgcagaagaggacatgccccaacgtgtggtccttctgcagcgaagccaaaccaccactgagagagacagtgacacagacgtggaggaggaagagctcccagtggaaaatagagaagctgtcctcaaggatcacacaaagattagagcccttgttagagcacattcagaaaaggaccaacctccttttggggacagtgatgacagtgtggaagcagataagagctcacctgggatccacctggagagaagccaagcctccaccacagtggacatcaacacacaagtggagaaggaagtcccgccagggtcagccattatacatataaagaagcatcaggtgtctgtggaggggacaaatcaaacagatgtgaaagcagttgggggaccagcaaagctgcttgtggtatctctagaggaagcctggcctctgcatggggactgtgaaacagatgcagaggagggcacctccctaacagcctcagtagttgcagatgtaagaaagagccagcttccagcagaaggggatgctggggcagagtgggctgcagctgttcttaagcaggagagagctcatgaggtgggggcccagggtgggccacctgtggcacaagtggagcaggacctccctatctcaagagagaacctcacagatctggtggtggacacagacactctaggggaatccacccagccacagagagagggagcccaggtccccacaggaagggagagagaacaacatgtgggtgggaccaaggactctgaagacaactatggtgattctgaagatctggacctacaagctacccagtgctttctggagaatcagggcctggaagcagtccagagcatggaggatgaacctacccaggccttcatgttgactccaccccaagagcttggcccttcccattgcagcttccagacaacaggtaccctagatgaaccatgggaggtcctggctacacagccattctgtctgagagagtctgaggactctgagacccagccttttgacacgcaccttgaggcctatggaccttgcctgtctccacctagggcaataccaggagaccaacatccagagagcccagttcacacagagccaatggggattcaaggcagagggaggcagactgtggataaagtcatgggtataccaaaagaaacagcagagagggtgggccctgagagagggccattggagagagaaactgagaaactgctaccagaaagacagacagatgtgacaggagaggaagaattaaccaaggggaaacaggacagagaacaaaaacagttgttagctagagacacccagagacaagaatctgacaaaaatggggaaagtgcaagtcctgaaagagatagggagagtttgaaggtagaaattgagacatctgaggaaatacaagagaaacaagtacagaagcagacccttccaagcaaagcatttgagagagaagtagagagaccagtagcaaacagagagtgcgatccagccgagttagaagagaaggtgcccaaagtgatcctggagagagatacacagagaggggagccagagggagggagccaggaccagaaagggcaggcctccagcccaacaccagagcctggggtgggggcgggggaccttccgggacctacctcagcccccgtaccttctgggagccagtcaggtggaaggggatccccagtgagccccaggaggcatcagaaaggcctcctgaattgcaagatgccacctgctgagaaggcttccaggatcagagctgctgagaaggtttccaggggcgatcaggaatctccagatgcttgtctgcctcctgcagtacctgaagccccagccccaccccaaaagccccttaactctcagagccagaaacatcttgcacctccgccccttctttctccccttttaccttctatcaagccaaccgttcgtaagaccaggcaagatgggagtcaggaagctccagaggctcccttgtcctcagagctggagcctttccacccaaagcctaaaattagaactcggaagtcctccagaatgacaccctttccagctacctctgctgcccctgagccccacccttccacctccacagcccagccagtcactcccaagcccacatctcaggccactaggagcaggacaaataggtcctctgtcaagacccctgaaccagttgtccccacagcccctgagctccagccttccacctccacagaccagcctgtcacctctgagcccacatctcaggttactaggggaagaaaaagtagatcctctgtcaagacccctgaaacagttgtgcccacagcccttgagctccagccttccacctccaccgaccgacctgtcacctctgaacccacctctcaggctactaggggaagaaaaaatagatcctctgtcaagacccctgaaccagttgtccccacagcccctgagctccagccttccacctccacagaccagcctgtcacttctgagcccacatatcaggctactaggggaagaaaaaatagatcctctgtcaagacccctgaaccagttgtgcccacagcccctgagctccggccttccacctccacagaccgacctgtcacccccaagcccacatctcggaccactaggagcaggacaaatatgtcctctgtcaagacccctgaaacagttgtccccacagcccctgagctccagatttccacctccacagaccaacctgtcacccctaagcccacatctcggaccactaggagcaggacaaatatgtcctctgtgaagaaccctgaatcaactgtccctatagcccctgagctcccaccttccacctccacagagcagcctgtcacccctgagcccacatctcgggctactaggggaagaaaaaatagatcctctggcaagacccctgaaacacttgtccccacagcccctaagctcgagccttccacttccacagaccaacctgtcactcctgagcccacatctcaggccaccaggggcaggacaaataggtcctctgtgaagacccctgaaacagttgtccccacagcccctgagctccagccttccacctccacagaccagcctgttacccctgagcctacgtctcaggctactaggggaagaacagatagatcctctgtcaagactcctgaaacagttgtccccacagcccctgagctacaggcttccgcctccacagaccagcctgtcacctctgagcccacatctcggaccactaggggaagaaaaaatcggtcctctgtcaagacccctgaaacagttgtgcccgcagcccctgagctccagcctcccacctccacagaccaacctgtcacccctgagcccacatctcgggccactaggggcaggacaaataggtcctctgtcaagacccctgaatcaattgtccctatagcccctgagcttcagccttccacctccagaaaccagcttgtcacccctgagcccacatctcgggccactaggtgcaggacaaataggtcctctgtcaagacccctgagccagttgtccccacagcccctgagccccatcctaccacctccacagaccagcctgtcacccccaagctcacatctagggccactaggagaaagacaaataggtcctctgtcaagactcccaaaccagttgaaccagcagcctctgatcttgagccttttacccccacagaccagtccgtcacccctgaggccatagctcagggtggtcagagcaaaacactgaggtcttccacagtaagagctatgccggttcctaccacccctgaattccaatctcctgtcaccacagaccagcctatttcccctgagcctattactcaacccagttgcatcaagaggcagagagccgctgggaaccctggctccctcgcagctcccattgaccataagccttgctctgcacccttggaacctaaatcccaggcctcaaggaaccaaagatggggagcagtgagagcagctgaatcccttacagccattcctgagcctgcctctccccagcttcttgagacaccaattcatgcctcccagatccaaaaggtggaaccagcaggtagatctaggttcaccccggagctccagcctaaggcctctcaaagccgcaagaggtctttagctaccatggattcaccaccacatcaaaaacagccccaaagaggggaagtctcccagaagacagtgattatcaaggaagaggaagaagatactgcagagaagccagggaaggaagaggatgtcgtgactccaaaaccaggcaagagaaagagagaccaggcagaggaggagcccaacagaataccaagccgcagcctccgacggaccaaacttaaccaagaatcaacagcccccaaagtgctcttcacaggagtggtggatgctcggggagagcgggctgtgctggcactggggggaagtctggctggttcagcggcagaggcttcccacctggtcactgatcgcatccgccggacagtcaagttcctgtgtgccctggggcggggaatccccattctgtccctggactggctgcatcagtcccgcaaggctggtttcttcttacccccggatgaatatgtggtgaccgaccctgagcaagagaagaactttggctttagccttcaagacgcactgagcagggctcgggagcgaaggctgctagagggctatgagatctatgtgacccctggagtccagccaccaccacctcagatgggagagattattagctgctgtggaggcacatacctacccagcatgcctcggtcctataagcctcagagagttgtgatcacatgccctcaggacttccctcattgctccattccactacgggttgggctgcccctcctctcgcctgagttcctgctgactggagtgctgaagcaggaagccaagccagaggcctttgtcctctcccctttggagatgtcatccacctgagaactccactacccttttccctcccagaccacgaattagaagatatgtggaagaaagaactcagggcgttagaaaggattggggtatattgatacaacttgtcctggaacatgggtgggaccagaaatctttatgaataaatgaaaagataaggga

SEQ ID NO: 293635 - DNA, 2224 bp, Homo sapiens
cttaaagtagatcatggaggacacccaggctattgactgggatgttgaagaagaggaggagacagagcaatccagtgaatccttgaggtgtaacgtggagccagtagggcggctacatatctttagtggtgcccatggaccagaaaaagatttcccactacacctcgggaagaatgtggtaggccgaatgcctgactgctctgtggccctgccctttccatctatctccaaacaacatgcagagattgaaatcttagcctgggacaaggcacctatcctccgagactgtgggagccttaatggtactcaaatcctgagacctcctaaggttttgagccctggggtgagtcaccgtctgagggaccaggaattgattctctttgctgacttgctctgccagtaccatcgcctggatgtctctctgccctttgtctcccggggccctctgacagtagaagagacacccagagtacagggagaaactcaaccccagaggcttctgttggctgaggactcggaggaggaagtagattttctttctgaaaggcgtatggtaaaaaaatcaaggaccacatcttcctctgtgatagttccagagagtgatgaagaggggcattccccggtcctgggcggccttgggccgccttttgccttcaatttgaacagtgacacagatgtggaagaaggtcagcaaccagccacagaggaggcctcctcagctgccagaagaggtgccactgtagaggcaaagcagtctgaagctgaagttgtaactgaaatccagcttgaaaaggatcagcctttagtgaaggagagggacaatgatacaaaagtcaagaggggtgcagggaatggggtggttccagctggggtgattctggagaggagccaacctcctggagaggacagtgacacagatgtggatgatgacagcaggcctcctggaaggccagctgaggtccatttggaaagggctcagccttttggcttcatcgacagcgacactgatgcggaagaagagaggatcccagcaaccccagttgtcattcctatgaagaagaggaagatcttccatggagtaggtacaaggggtcctggagcaccaggcctggcccatctgcaggagagccaggctggtagtgatacagatgtggaagaaggcaaggccccacaggctgtccctctggagaaaagccaagcttccatggttatcaacagcgatacagatgacgaggaagaagtctcagcagcgctgactttggcacatctgaaagagagccagcctgctatatggaacagagatgcagaagaggacatgccccaacgtgtggtccttctgcagcgaagccaaaccaccactgagagagacagtgacacagacgtggaggaggaagagctcccagtggaaaatagagaagctgtcctcaaggatcacacaaagattagagcccttgttagagcacattcagaaaaggaccaacctccttttggggacagtgatgacagtgtggaagcagataagagctcacctgggatccacctggagagaagccaagcctccaccacagtggacatcaacacacaagtggagaaggaagtcccgccagggtcagccattatacatataaagaagcatcaggtgtctgtggaggggacaaatcaaacagatgtgaaagcagttgggggaccagcaaagctgcttgtggtatctctagaggaagcctggcctctgcatggggactgtgaaacagatgcagaggagggcacctccctaacagcctcagtagttgcagatgtaagaaagagccagcttccagcagaaggggatgctggggcagagtgggctgcagctgttcttaagcaggagagagctcatgaggtgggggcccagggtgggccacctgtggcacaagtggagcaggacctccctatctcaagagagaacctcacagatctggtggtggacacagacactctaggggaatccacccagccacagagagagggagcccaggtccccacaggaagggagagagaacaacatgtgggtgggaccaaggactctgaagacaactatggtgattctgaagatctggacctacaagctacccagtgctttctggagaatcagggcctggaagtccagagcatggaggatgaacctacccaggacaactgaaggagccgctctggttttaattgcagcaattaaaaccagagcggc

SEQ ID NO: 293636 - DNA, 372 bp, Homo sapiens
aaggggatccccagtgagccccaggaggcatcagaaaggtaagtgaaggcagaggggaacccaaggtgatacacaggcctcgtgataatcaacccctgggcaaccagctgcttggaactcagccacctttgtgtttactttctgtctaggcctcctgaattgcaagatgccacctgctgagaaggcttccaggatcagagctgctgagaaggtttccagggtgagagctactttttctacctcctattccacaagtcatctctatatcttctccaatgctctttcacctagcctcactttaatctattcctttctcattattcagttttcttccatttttgtcacgccttgattggcttctattcctttatc

SEQ ID NO: 293637 - DNA, 508 bp, Homo sapiens
taccaatgcccaggttccaccccagaccaataaaatcagggtatctacagagcaggtgtggaaatctgtatctgcaaaggttgagacacattggtttagggcaaaggaggagattaaaaatggctccagattctttgccattcttcccaccaaaaggaatctgctttgctctgtgttttgcattgaccaggagagaatgaaatggaaataatgttctgggacttttgagtacaggccttaaaaggactggcatcttctgcttttccatttggaacaccagcctgctgtattgtggaaaagtccaggccaggacactacatgattagaggtggtatggagagagcactggaggagaggagatcatcttggatgtcccagctttagccaaactcccagctgaatgcagctgcacatgtgacctcagcctaccccatctgaatcagacccacccagctgagctcactcaatccacatatttgtgagaaataataaattgtttgaagccact

SEQ ID NO: 293638 - DNA, 706 bp, Homo sapiens
tcccgttggcgtagaggatgcgcagcttgcgcagcggggccagcgtgcccggggcgagcgcctgcaagaggttgttccccaggtacagctcttccagccgcgagagcttctcgaaggtcttggggtgcagagagcggatctggttgtactgcaggtccagccgtctgagctgccccagacggtggaagtcgaaggccgtgatgttggttatgaagttgccgccgaggctgtaggtgccaccctgcgggaagtttgggcagcacggagtccgccagcattctacaggaagtttgggggagcacaaggttgcctgcagaaggccatcagaaggggagagtgatctgcctgctccccgcagttgagagtgctgcactgcaagtgttacctggagagaatgaaatggaaataatgttctgggacttttgagtacaggccttaaaaggactggcatcttctgcttttccatttggaacaccagcctgctgtattgtggaaaagtccaggccaggacactacatgattagaggtggtatggagagagcactggaggagaggagatcatcttggatgtcccagctttagccaaactcccagctgaatgcagctgcacatgtgacctcagcctaccccatctgaatcagacccacccagctgagctcactcaatccacatatttgtgagaaataataaattgtttgaagccact

SEQ ID NO: 293639 - DNA, 509 bp, Homo sapiens
ctttacagtctgcgatgattgacgaggtcaaacaggactcacttgcattgccgggtctctgtggcgacagggaggacttggagatcaaagaaactctagtaacgtggaaattcatgctccgagtagtgacaagccagtgactttttctatagaaagggtacaagactccaatttgaaaatctcaagcagctttatattcaagcaagttcaatccaatctcttcctgactcactgtctcatcaacatgcaaagctctcgaagagaaatcatctcttacttgcctgagggagttctggcagacgttttgaatgtggatgtggaagttctttcctcgtctccatcctgtcaagagccgtggagcaaacagcaggatgaggaagacatggaagacaaaactgataacgcacgtcacctcgctgcagcgggagacagaatgtaacttcaattcagcctctttggggtttgggttctgaccaagtaaatcgggaatgttgttaacatatcaaaaa

SEQ ID NO: 293640 - DNA, 871 bp, Homo sapiens
tatttcttacgtacgcaatgatggctgaagtccatgcggagtttatcactactggtcagtttcagagtgtaggtcagaacccgtgagccttccttgccagaacagtttggagtgtcacacgaggacttcagcctggacaccagaaccaggtgggcagtggggcccatcacgtgccactgtagtgtgaagggacagggtctgcctgctggtctgcccagggagaagatactcctagctcttcaggctcctactcaatcccctgacagcaccccttagcgaaaaggcaccaccctcggcgtcaagcgcatctctgaatgagggtcatggtgagcttgtgttaggaaaatagctctcttgccaatacgcaggcaaagtaagcttctgcaattctcaaagtcccgagtttgcagaattttatttacagcaaaatgttggtttacccacaaacatcctgcttggctaaatatatctcctgctcctagaacaggacctgtggttttcaagcatgggttttggcctcccttcagcatgctggcatgcatgtgccctgctctttctcctgtgatcatcggcatgataggaggcgagtgaggaactcagtgtcttctgacacaggcatctcacaacaccagtgcagccggaccgttgtctggtaggtctctgtgcacccaggaggacctgggcctgcgagaagtctggggcccactgctgggtatgctcgtttcttgagcatccgagtcacctttacagtctgcgatgattgacgaggtcaaacaggactcacttgcattgccgggtctctgtggcgacagggaggacttggaggtaggtgttcaggtcagaagggacagtcctgacttcctccaccgct

SEQ ID NO: 293641 - DNA, 450 bp, Homo sapiens
acgaggagcccagcgccaggccctcggcctcctgcttcagcggcaccgtcagctccatggggcctcctggacggcagcgcctgccccgcgtggcccagggtgcaaagaggtctctgtgaggggcggcgctcactcgggcggtgaggaaagggtgtctgtctcgtgggatcccacggagtcaagtgccggctctgcccctcgttgggccccttccgcggcttctgtacctcagtcctgcagctcctcccgcagcctgtcctacagcacaaaggctctggagcaaattccagctctgcctcccaccagctctgtgtccttggacaagagggaatgcagtatggcagcattttctttggaacaaattaagaagatagtaacaaataacagaagaaatacttctacacatatattttccatgggcaataaacagataagtatataattatgaaa

SEQ ID NO: 293642 - DNA, 5816 bp, Homo sapiens
gaaggcttaaagtaaatttattatctcactctcctgtttccacgaactttcccgaaattttcttctttcccggccttgtgaatcccttccatttctcagttaaaggacagcaccatccacccacctctctcaaagccgagctttgtattaatcctcattgacaaaatccctcctgaaatatgaaactgaaagccctgaaccctccggctgatcttggaagagaaaccccgccagaggccggggacccgctccccacctggcggacccgattccgggcgcgttccggctatcgtccctgcttgggacgctgcgcccgcctggtgcggggcggggttccggcgcagtggcgcccgcccagccccgggggcagggaaagcctaaattacggaattaccgcgagcaaggagcgcggaatcggggagcgtccggagctagctggatcctctaggcaggatggtgatgggaatctttgcaaattgtatcttctgtttgaaagtgaagtacttacctcagcagcagaagaaaaagctacaaactgacattaaggaaaatggcggaaagttttccttttcgttaaatcctcagtgcacacatataatcttagataatgctgatgttctgagtcagtaccaactgaattctatccaaaagaaccacgttcatattgcaaacccagattttatatggaaatctatcagagaaaagagactcttggatgtaaagaattatgatccttataagcccctggacatcacaccacctcctgatcagaaggcgagcagttctgaagtgaaaacagaaggtctatgcccggacagtgccacagaggaggaagacactgtggaactcactgagtttggtatgcagaatgttgaaattcctcatcttcctcaagattttgaagttgcaaaatataacaccttggagaaagtgggaatggagggaggccaggaagctgtggtggtggagcttcagtgttcgcgggactccagggactgtcctttcctgatatcctcacacttcctcctggatgatggcatggagactagaagacagtttgctataaagaaaacctctgaagatgcaagtgaatactttgaaaattacattgaagaactgaagaaacaaggatttctactaagagaacatttcacacctgaagcaacccaattagcatctgaacaattgcaagcattgcttttggaggaagtcatgaattcaagcactctgagccaagaggtgagcgatttagtagagatgatttgggcagaggccctgggccacctggaacacatgcttctcaagccagtgaacaggattagcctcaacgatgtgagcaaggcagaggggattctccttctagtaaaggcagcactgaaaaatggagaaacagcagagcaattgcaaaagatgatgacagagttttacagactgatacctcacaaaggcacaatgcccaaagaagtgaacctgggactattggctaagaaagcagacctctgccagctaataagagacatggttaatgtctgtgaaactaatttgtccaaacccaacccaccatccctggccaaataccgagctttgaggtgcaaaattgagcatgttgaacagaatactgaagaatttctcagggttagaaaagaggttttgcagaatcatcacagtaagagcccagtggatgtcttgcagatatttagagttggcagagtgaatgaaaccacagagtttttgagcaaacttggtaatgtgaggcccttgttgcatggttctcctgtacaaaacatcgtgggaatcttgtgtcgagggttgcttttacccaaagtagtggaagatcgtggtgtgcaaagaacagacgtcggaaaccttggaagtgggatttatttcagtgattcgctcagtacaagtatcaagtactcacacccgggagagacagatggcaccagactcctgctcatttgtgacgtagccctcggaaagtgtatggacttacatgagaaggacttttccttaactgaagcaccaccaggctacgacagtgtgcatggagtttcacaaacagcctctgtcaccacagactttgaggatgatgaatttgttgtctataaaaccaatcaggttaaaatgaaatatattattaaattttccatgcctggagatcagataaaggactttcatcctagtgatcatactgaattagaggaatacagacctgagttttcaaatttttcaaaggttgaagattaccagttaccagatgccaaaacttccagcagcaccaaggccggcctccaggatgcctctgggaacttggttcctctggaggatgtccacatcaaagggagaatcatagacactgtagcccaggtcattgtttttcagacatacacaaataaaagtcacgtgcccattgaggcaaaatatatctttcctttggatgacaaggccgctgtgtgtggcttcgaagccttcatcaatgggaagcacatagttggagagattaaagagaaggaagaagcccagcaagagtacctagaagccgtgacccagggccatggcgcttacctgatgagtcaggatgctccggacgtttttactgtaagtgttggaaacttaccccctaaggctaaggttcttataaaaattacctacatcacagaactcagcatcctgggcactgttggtgtctttttcatgcccgccaccgtagcaccctggcaacaggacaaggctttgaatgaaaaccttcaggatacagtagagaagatttgtataaaagaaataggaacaaagcaaagcttctctttgactatgtctattgagatgccgtatgtgattgaattcattttcagtgatacacatgaactgaaacaaaagcgcacagactgcaaagctgtcattagcaccatggaaggcagctccttagacagcagtggattttctctccacatcggtttgtctgctgcctatctcccaagaatgtgggttgaaaaacatccagaaaaagaaagcgaggcttgcatgcttgtctttcaacccgatctcgatgtcgacctccctgacctagccaatgagagcgaagtgattatttgtcttgactgctccagttccatggagggtgtgacattcttgcaagccaagcaaatcgccttgcatgcgctgtccttggtgggtgagaagcagaaagtaaatattatccagttcggcacaggttacaaggagctattttcgtatcctaagcatatcacaagcaataccacggcagcagagttcatcatgtctgccacacctaccatggggaacacagacttctggaaaacactccgatatcttagcttattgtaccctgctcgagggtcacggaacatcctcctggtgtctgatgggcacctccaggatgagagcctgacattacagctcgtgaagaggagccgcccgcacaccaggttattcgcctgcggtatcggttctacagcaaatcgtcacgtcttaaggattttgtcccagtgtggtgccggagtatttgaatattttaatgcaaaatccaagcatagttggagaaaacagatagaagaccaaatgaccaggctatgttctccgagttgccactctgtctccgtcaaatggcagcaactcaatccagatgcgcccgaggccctgcaggccccagcccaggtgccatccttgtttcgcaatgatcgactccttgtctatggattcattcctcactgcacacaggcaactctgtgtgcactaattcaagagaaagaattttgtacaatggtgtcgactactgagcttcagaagacaactggaactatgatccacaagctggcagcccgagctctaatcagagattatgaagatggcattcttcacgaaaatgaaaccagtcatgagatgaaaaaacaaaccttgaaatctctgattattaaactcagtaaagaaaactctctcataacacaatttacaagctttgtggcagttgagaaaagggatgagaatgagtcaccttttcctgatattccaaaagtttctgaacttattgccaaagaagatgtagacttcctgccctacatgagctggcagggggaaccccaagaagccgtcaggaaccagtctcttttagcatcctctgagtggccagaattacgtttatccaaacgaaaacataggaaaattccattttccaaaagaaaaatggaattatctcagccagaagtttctgaagattttgaagaggatggcttaggtgtactaccagctttcacatcaaatttggaacgtggaggtgtggaaaagctattggatttaagttggacagagtcatgtaaaccaacagcaactgaaccactatttaagaaagtcagtccatgggaaacatctacttctagcttttttcctattttggctccggccgttggttcctatcttcccccgactgcccgcgctcacagtcctgcttccttgtcttttgcctcatatcgtcaggtagctagtttcggttcagctgctcctcccagacagtttgatgcatctcaattcagccaaggccctgtgcctggcacttgtgctgactggatcccacagtcggcgtcttgtcccacaggacctccccagaacccaccttctgcaccctattgtggcattgttttttcagggagctcattaagctctgcacagtctgctccactgcaacatcctggaggctttactaccaggccttctgctggcaccttccctgagctggattctccccagcttcatttctctcttcctacagaccctgatcccatcagaggttttgggtcttatcatccctctgcttactctccttttcattttcaaccttccgcagcctctttgactgccaaccttaggctgccaatggcctctgctttacctgaggctctttgcagtcagtcccggactaccccagtagatctctgtcttctagaagaatcagtaggcagtctcgaaggaagtcgatgtcctgtctttgcttttcaaagttctgacacagaaagtgatgagctatcagaagtacttcaagacagctgctttttacaaataaaatgtgatacaaaagatgacagtatcccgtgctttctggaagtaaaagaagaggatgaaatagtgtgcacacaacactggcaggatgctgtgccttggacagaactcctcagtctacagacagaggatggcttctggaaacttacaccagaactgggacttatattaaatcttaatacaaatggtttgcacagctttcttaaacaaaaaggcattcaatctctaggtgtaaaaggaagagaatgtctcctggacctaattgccacaatgctggtactacagtttattcgcaccaggttggaaaaagagggaatagtgttcaaatcactgatgaaaatggatgacccttctatttccaggaatattccctgggcttttgaggcaataaagcaagcaagtgaatgggtaagaagaactgaaggacagtacccatctatctgcccacggcttgaactggggaacgactgggactctgccaccaagcagttgctgggactccagcccataagcactgtgtcccctcttcatagagtcctccattacagtcaaggctaagtcaaatgaaactgaattttaaactttttgcatgcttctatgtagaaaataatcaaatgataatagatacttataatgaaacttcattaaggtttcattcagtgtagcaattactgtctttaaaaattaagtggaagaagaattactttaatcaactaacaagcaataataaaatgaaacttaaaata

SEQ ID NO: 293643 - DNA, 4437 bp, Homo sapiens
cctgggctctgtaaagaatagtgcatctttaaataatttcttaaaagcctctaaagtgatcagtgccttgatgccaactaaggaaatttgtttagcattgaatctctgaaggctctatgaaaggaatagcatgatgtgctgttagaatcagatgttactgctaaaatttacatgttgtgatgtaaattgtgtagaaaaccattaaatcattcaaaataataaactatttttattagagaatgtatacttttagaaagctgtctccttatttaaataaaatagtgtttgtaagagcccagtggatgtcttgcagatatttagagttggcagagtgaatgaaaccacagagtttttgagcaaacttggtaatgtgaggcccttgttgcatggttctcctgtacaaaacatcgtgggaatcttgtgtcgagggttgcttttacccaaagtagtggaagatcgtggtgtgcaaagaacagacgtcggaaaccttggaagtgggatttatttcagtgattcgctcagtacaagtatcaagtactcacacccgggagagacagatggcaccagactcctgctcatttgtgacgtagccctcggaaagtgtatggacttacatgagaaggacttttccttaactgaagcaccaccaggctacgacagtgtgcatggagtttcacaaacagcctctgtcaccacagactttgaggatgatgaatttgttgtctataaaaccaatcaggttaaaatgaaatatattattaaattttccatgcctggagatcagataaaggactttcatcctagtgatcatactgaattagaggaatacagacctgagttttcaaatttttcaaaggttgaagattaccagttaccagatgccaaaacttccagcagcaccaaggccggcctccaggatgcctctgggaacttggttcctctggaggatgtccacatcaaagggagaatcatagacactgtagcccaggtcattgtttttcagacatacacaaataaaagtcacgtgcccattgaggcaaaatatatctttcctttggatgacaaggccgctgtgtgtggcttcgaagccttcatcaatgggaagcacatagttggagagattaaagagaaggaagaagcccagcaagagtacctagaagccgtgacccagggccatggcgcttacctgatgagtcaggatgctccggacgtttttactgtaagtgttggaaacttaccccctaaggctaaggttcttataaaaattacctacatcacagaactcagcatcctgggcactgttggtgtctttttcatgcccgccaccgtagcaccctggcaacaggacaaggctttgaatgaaaaccttcaggatacagtagagaagatttgtataaaagaaataggaacaaagcaaagcttctctttgactatgtctattgagatgccgtatgtgattgaattcattttcagtgatacacatgaactgaaacaaaagcgcacagactgcaaagctgtcattagcaccatggaaggcagctccttagacagcagtggattttctctccacatcggtttgtctgctgcctatctcccaagaatgtgggttgaaaaacatccagaaaaagaaagcgaggcttgcatgcttgtctttcaacccgatctcgatgtcgacctccctgacctagccaatgagagcgaagtgattatttgtcttgactgctccagttccatggagggtgtgacattcttgcaagccaagcaaatcgccttgcatgcgctgtccttggtgggtgagaagcagaaagtaaatattatccagttcggcacaggttacaaggagctattttcgtatcctaagcatatcacaagcaataccacggcagcagagttcatcatgtctgccacacctaccatggggaacacagacttctggaaaacactccgatatcttagcttattgtaccctgctcgagggtcacggaacatcctcctggtgtctgatgggcacctccaggatgagagcctgacattacagctcgtgaagaggagccgcccgcacaccaggttattcgcctgcggtatcggttctacagcaaatcgtcacgtcttaaggattttgtcccagtgtggtgccggagtatttgaatattttaatgcaaaatccaagcatagttggagaaaacagatagaagaccaaatgaccaggctatgttctccgagttgccactctgtctccgtcaaatggcagcaactcaatccagatgcgcccgaggccctgcaggccccagcccaggtgccatccttgtttcgcaatgatcgactccttgtctatggattcattcctcactgcacacaggcaactctgtgtgcactaattcaagagaaagaattttgtacaatggtgtcgactactgagcttcagaagacaactggaactatgatccacaagctggcagcccgagctctaatcagagattatgaagatggcattcttcacgaaaatgaaaccagtcatgagatgaaaaaacaaaccttgaaatctctgattattaaactcagtaaagaaaactctctcataacacaatttacaagctttgtggcagttgagaaaagggatgagaatgagtcaccttttcctgatattccaaaagtttctgaacttattgccaaagaagatgtagacttcctgccctacatgagctggcagggggaaccccaagaagccgtcaggaaccagtctcttttagcatcctctgagtggccagaattacgtttatccaaacgaaaacataggaaaattccattttccaaaagaaaaatggaattatctcagccagaagtttctgaagattttgaagaggatggcttaggtgtactaccagctttcacatcaaatttggaacgtggaggtgtggaaaagctattggatttaagttggacagagtcatgtaaaccaacagcaactgaaccactatttaagaaagtcagtccatgggaaacatctacttctagcttttttcctattttggctccggccgttggttcctatcttcccccgactgcccgcgctcacagtcctgcttccttgtcttttgcctcatatcgtcaggtagctagtttcggttcagctgctcctcccagacagtttgatgcatctcaattcagccaaggccctgtgcctggcacttgtgctgactggatcccacagtcggcgtcttgtcccacaggacctccccagaacccaccttctgcaccctattgtggcattgttttttcagggagctcattaagctctgcacagtctgctccactgcaacatcctggaggctttactaccaggccttctgctggcaccttccctgagctggattctccccagcttcatttctctcttcctacagaccctgatcccatcagaggttttgggtcttatcatccctctgcttactctccttttcattttcaaccttccgcagcctctttgactgccaaccttaggctgccaatggcctctgctttacctgaggctctttgcagtcagtcccggactaccccagtagatctctgtcttctagaagaatcagtaggcagtctcgaaggaagtcgatgtcctgtctttgcttttcaaagttctgacacagaaagtgatgagctatcagaagtacttcaagacagctgctttttacaaataaaatgtgatacaaaagatgacagtatcccgtgctttctggaagtaaaagaagaggatgaaatagtgtgcacacaacactggcaggatgctgtgccttggacagaactcctcagtctacagacagaggatggcttctggaaacttacaccagaactgggacttatattaaatcttaatacaaatggtttgcacagctttcttaaacaaaaaggcattcaatctctaggtgtaaaaggaagagaatgtctcctggacctaattgccacaatgctggtactacagtttattcgcaccaggttggaaaaagagggaatagtgttcaaatcactgatgaaaatggatgacccttctatttccaggaatattccctgggcttttgaggcaataaagcaagcaagtgaatgggtaagaagaactgaaggacagtacccatctatctgcccacggcttgaactggggaacgactgggactctgccaccaagcagttgctgggactccagcccataagcactgtgtcccctcttcatagagtcctccattacagtcaaggctaagtcaaatgaaactgaattttaaactttttgcatgcttctatgtagaaaataatcaaatgataatagatacttataatgaaacttcattaaggtttcattcagtgtagcaattactgtctttaaaaattaagtggaagaagaattactttaatcaactaacaagcaataataaaatgaaacttaaaata

SEQ ID NO: 293644 - DNA, 3244 bp, Homo sapiens
gtgagttgtattttagaagttcctgtcattccatgagcaaactttctgtgtttcactgcttgaaagtgaaaccagctgtcttgctgacagttgtggccttgccaagattacattcactttagtctcattgtgaaacttaatatatgcttagttatacaaatgtatttttcttttaacaggatacagtagagaagatttgtataaaagaaataggaacaaagcaaagcttctctttgactatgtctattgagatgccgtatgtgattgaattcattttcagtgatacacatgaactgaaacaaaagcgcacagactgcaaagctgtcattagcaccatggaaggcagctccttagacagcagtggattttctctccacatcggtttgtctgctgcctatctcccaagaatgtgggttgaaaaacatccagaaaaagaaagcgaggcttgcatgcttgtctttcaacccgatctcgatgtcgacctccctgacctagccaatgagagcgaagtgattatttgtcttgactgctccagttccatggagggtgtgacattcttgcaagccaagcaaatcgccttgcatgcgctgtccttggtgggtgagaagcagaaagtaaatattatccagttcggcacaggttacaaggagctattttcgtatcctaagcatatcacaagcaataccacggcagcagagttcatcatgtctgccacacctaccatggggaacacagacttctggaaaacactccgatatcttagcttattgtaccctgctcgagggtcacggaacatcctcctggtgtctgatgggcacctccaggatgagagcctgacattacagctcgtgaagaggagccgcccgcacaccaggttattcgcctgcggtatcggttctacagcaaatcgtcacgtcttaaggattttgtcccagtgtggtgccggagtatttgaatattttaatgcaaaatccaagcatagttggagaaaacagatagaagaccaaatgaccaggctatgttctccgagttgccactctgtctccgtcaaatggcagcaactcaatccagatgcgcccgaggccctgcaggccccagcccaggtgccatccttgtttcgcaatgatcgactccttgtctatggattcattcctcactgcacacaggcaactctgtgtgcactaattcaagagaaagaattttgtacaatggtgtcgactactgagcttcagaagacaactggaactatgatccacaagctggcagcccgagctctaatcagagattatgaagatggcattcttcacgaaaatgaaaccagtcatgagatgaaaaaacaaaccttgaaatctctgattattaaactcagtaaagaaaactctctcataacacaatttacaagctttgtggcagttgagaaaagggatgagaatgagtcaccttttcctgatattccaaaagtttctgaacttattgccaaagaagatgtagacttcctgccctacatgagctggcagggggaaccccaagaagccgtcaggaaccagtctcttttagcatcctctgagtggccagaattacgtttatccaaacgaaaacataggaaaattccattttccaaaagaaaaatggaattatctcagccagaagtttctgaagattttgaagaggatggcttaggtgtactaccagctttcacatcaaatttggaacgtggaggtgtggaaaagctattggatttaagttggacagagtcatgtaaaccaacagcaactgaaccactatttaagaaagtcagtccatgggaaacatctacttctagcttttttcctattttggctccggccgttggttcctatcttcccccgactgcccgcgctcacagtcctgcttccttgtcttttgcctcatatcgtcaggtagctagtttcggttcagctgctcctcccagacagtttgatgcatctcaattcagccaaggccctgtgcctggcacttgtgctgactggatcccacagtcggcgtcttgtcccacaggacctccccagaacccaccttctgcaccctattgtggcattgttttttcagggagctcattaagctctgcacagtctgctccactgcaacatcctggaggctttactaccaggccttctgctggcaccttccctgagctggattctccccagcttcatttctctcttcctacagaccctgatcccatcagaggttttgggtcttatcatccctctgcttactctccttttcattttcaaccttccgcagcctctttgactgccaaccttaggctgccaatggcctctgctttacctgaggctctttgcagtcagtcccggactaccccagtagatctctgtcttctagaagaatcagtaggcagtctcgaaggaagtcgatgtcctgtctttgcttttcaaagttctgacacagaaagtgatgagctatcagaagtacttcaagacagctgctttttacaaataaaatgtgatacaaaagatgacagtatcccgtgctttctggaagtaaaagaagaggatgaaatagtgtgcacacaacactggcaggatgctgtgccttggacagaactcctcagtctacagacagaggatggcttctggaaacttacaccagaactgggacttatattaaatcttaatacaaatggtttgcacagctttcttaaacaaaaaggcattcaatctctaggtgtaaaaggaagagaatgtctcctggacctaattgccacaatgctggtactacagtttattcgcaccaggttggaaaaagagggaatagtgttcaaatcactgatgaaaatggatgacccttctatttccaggaatattccctgggcttttgaggcaataaagcaagcaagtgaatgggtaagaagaactgaaggacagtacccatctatctgcccacggcttgaactggggaacgactgggactctgccaccaagcagttgctgggactccagcccataagcactgtgtcccctcttcatagagtcctccattacagtcaaggctaagtcaaatgaaactgaattttaaactttttgcatgcttctatgtagaaaataatcaaatgataatagatacttataatgaaacttcattaaggtttcattcagtgtagcaattactgtctttaaaaattaagtggaagaagaattactttaatcaactaacaagcaataataaaatgaaacttaaaata

SEQ ID NO: 293645 - DNA, 5876 bp, Homo sapiens
gaaggcttaaagtaaatttattatctcactctcctgtttccacgaactttcccgaaattttcttctttcccggccttgtgaatcccttccatttctcagttaaaggacagcaccatccacccacctctctcaaagccgagctttgtattaatcctcattgacaaaatccctcctgaaatatgaaactgaaagccctgaaccctccggctgatcttggaagagaaaccccgccagaggccggggacccgctccccacctggcggacccgattccgggcgcgttccggctatcgtccctgcttgggacgctgcgcccgcctggtgcggggcggggttccggcgcagtggcgcccgcccagccccgggggcagggaaagcctaaattacggaattaccgcgagcaaggagcgcggaatcggggagcgtccggagctagctggatcctctaggcaggatggtgatgggaatctttgcaaattgtatcttctgtttgaaagtgaagtacttacctcagcagcagaagaaaaagctacaaactgacattaaggaaaatggcggaaagttttccttttcgttaaatcctcagtgcacacatataatcttagataatgctgatgttctgagtcagtaccaactgaattctatccaaaagaaccacgttcatattgcaaacccagattttatatggaaatctatcagagaaaagagactcttggatgtaaagaattatgatccttataagcccctggacatcacaccacctcctgatcagaaggcgagcagttctgaagtgaaaacagaaggtctatgcccggacagtgccacagaggaggaagacactgtggaactcactgagtttggtatgcagaatgttgaaattcctcatcttcctcaagattttgaagttgcaaaatataacaccttggagaaagtgggaatggagggaggccaggaagctgtggtggtggagcttcagtgttcgcgggactccagggactgtcctttcctgatatcctcacacttcctcctggatgatggcatggagactagaagacagtttgctataaagaaaacctctgaagatgcaagtgaatactttgaaaattacattgaagaactgaagaaacaaggatttctactaagagaacatttcacacctgaagcaacccaattagcatctgaacaattgcaagcattgcttttggaggaagtcatgaattcaagcactctgagccaagaggtgagcgatttagtagagatgatttgggcagaggccctgggccacctggaacacatgcttctcaagccagtgaacaggattagcctcaacgatgtgagcaaggcagaggggattctccttctagtaaaggcagcactgaaaaatggagaaacagcagagcaattgcaaaagatgatgacagagttttacagactgatacctcacaaaggcacaatgcccaaagaagtgaacctgggactattggctaagaaagcagacctctgccagctaataagagacatggttaatgtctgtgaaactaatttgtccaaacccaacccaccatccctggccaaataccgagctttgaggtgcaaaattgagcatgttgaacagaatactgaagaatttctcagggttagaaaagaggttttgcagaatcatcacagtaagagcccagtggatgtcttgcagatatttagagttggcagagtgaatgaaaccacagagtttttgagcaaacttggtaatgtgaggcccttgttgcatggttctcctgtacaaaacatcgtgggaatcttgtgtcgagggttgcttttacccaaagtagtggaagatcgtggtgtgcaaagaacagacgtcggaaaccttggaagtgggatttatttcagtgattcgctcagtacaagtatcaagtactcacacccgggagagacagatggcaccagactcctgctcatttgtgacgtagccctcggaaagtgtatggacttacatgagaaggacttttccttaactgaagcaccaccaggctacgacagtgtgcatggagtttcacaaacagcctctgtcaccacagactttgaggatgatgaatttgttgtctataaaaccaatcaggttaaaatgaaatatattattaaattttccatgcctggagatcagataaaggactttcatcctagtgatcatactgaattagaggaatacagacctgagttttcaaatttttcaaaggttgaagattaccagttaccagatgccaaaacttccagcagcaccaaggccggcctccaggatgcctctgggaacttggttcctctggaggatgtccacatcaaagggagaatcatagacactgtagcccaggtcattgtttttcagacatacacaaataaaagtcacgtgcccattgaggcaaaatatatctttcctttggatgacaaggccgctgtgtgtggcttcgaagccttcatcaatgggaagcacatagttggagagattaaagagaaggaagaagcccagcaagagtacctagaagccgtgacccagggccatggcgcttacctgatgagtcaggatgctccggacgtttttactgtaagtgttggaaacttaccccctaaggctaaggttcttataaaaattacctacatcacagaactcagcatcctgggcactgttggtgtctttttcatgcccgccaccgtagcaccctggcaacaggacaaggctttgaatgaaaaccttcaggatacagtagagaagatttgtataaaagaaataggaacaaagcaaagcttctctttgactatgtctattgagatgccgtatgtgattgaattcattttcagtgatacacatgaactgaaacaaaagcgcacagactgcaaagctgtcattagcaccatggaaggcagctccttagacagcagtggattttctctccacatcggtttgtctgctgcctatctcccaagaatgtgggttgaaaaacatccagaaaaagaaagcgaggcttgcatgcttgtctttcaacccgatctcgatgtcgacctccctgacctagccaatgagagcgaagtgattatttgtcttgactgctccagttccatggagggtgtgacattcttgcaagccaagcaaatcgccttgcatgcgctgtccttggtgggtgagaagcagaaagtaaatattatccagttcggcacaggttacaaggagctattttcgtatcctaagcatatcacaagcaataccacggcagcagagttcatcatgtctgccacacctaccatggggaacacagacttctggaaaacactccgatatcttagcttattgtaccctgctcgagggtcacggaacatcctcctggtgtctgatgggcacctccaggatgagagcctgacattacagctcgtgaagaggagccgcccgcacaccaggttattcgcctgcggtatcggttctacagcaaatcgtcacgtcttaaggattttgtcccagtgtggtgccggagtatttgaatattttaatgcaaaatccaagcatagttggagaaaacagatagaagaccaaatgaccaggctatgttctccgagttgccactctgtctccgtcaaatggcagcaactcaatccagatgcgcccgaggccctgcaggccccagcccaggtgccatccttgtttcgcaatgatcgactccttgtctatggattcattcctcactgcacacaggcaactctgtgtgcactaattcaagagaaagaattttgtacaatggtgtcgactactgagcttcagaagacaactggaactatgatccacaagctggcagcccgagctctaatcagagattatgaagatggcattcttcacgaaaatgaaaccagtcatgagatgaaaaaacaaaccttgaaatctctgattattaaactcagtaaagaaaactctctcataacacaatttacaagctttgtggcagttgagaaaagggatgagaatgagtcaccttttcctgatattccaaaagtttctgaacttattgccaaagaagatgtagacttcctgccctacatgagctggcagggggaaccccaagaagccgtcaggaaccagtctcttttagcatcctctgagtggccagaattacgtttatccaaacgaaaacataggaaaattccattttccaaaagaaaaatggaattatctcagccagaagtttctgaagattttgaagaggatggcttaggtgtactaccagctttcacatcaaatttggaacgtggaggtgtggaaaagctattggatttaagttggacagagtcatgtaaaccaacagcaactgaaccactatttaagaaagtcagtccatgggaaacatctacttctagcttttttcctattttggctccggccgttggttcctatcttcccccgactgcccgcgctcacagtcctgcttccttgtcttttgcctcatatcgtcaggtagctagtttcggttcagctgctcctcccagacagtttgatgcatctcaattcagccaaggccctgtgcctggcacttgtgctgactggatcccacagtcggcgtcttgtcccacaggacctccccagaacccaccttctgcaccctattgtggcattgttttttcagggagctcattaagctctgcacagtctgctccactgcaacatcctggaggctttactaccaggccttctgctggcaccttccctgagctggattctccccagcttcatttctctcttcctacagaccctgatcccatcagaggttttgggtcttatcatccctctgcttactctccttttcattttcaaccttccgcagcctctttgactgccaaccttaggctgccaatggcctctgctttacctgaggctctttgcagtcagtcccggactaccccagtagatctctgtcttctagaagaatcagtaggcagtctcgaaggaagtcgatgtcctgtctttgcttttcaaagttctgacacagaaagtgatgagctatcagaagtacttcaagacagctgctttttacaaataaaatgtgatacaaaagatgacagtatcccgtgctttctggaagtaaaagaagaggatgaaatagtgtgcacacaacactggcaggatgctgtgccttggacagaactcctcagtctacagacagaggatggcttctggaaacttacaccagaactgggacttatattaaatcttaatacaaatggtttgcacagctttcttaaacaaaaaggcattcaatctctaggtgtaaaaggaagagaatgtctcctggacctaattgccacaatgctggtactacagtttattcgcaccaggttggaaaaagagggaatagtgttcaaatcactgatgaaaatggatgacccttctatttccaggaatattccctgggcttttgaggcaataaagcaagcaagtgaatgggtaagaagaactgaaggacagtacccatctatctgcccacggcttgaactggggaacgactgggactctgccaccaagcagttgctgggactccagcccataagcactgtgtcccctcttcatagagtcctccattacagtcaaggctaagtcaaatgaaactgaattttaaactttttgcatgcttctatgtagaaaataatcaaatgataatagatacttataatgaaacttcattaaggtttcattcagtgtagcaattactgtctttaaaaattaagtggaagaagaattactttaatcaactaacaagcaataataaaatgaaacttaaaataaaaaaacctgaaaaaaaaataactccagggggggcccgtacccaaatttgccctatgtga

SEQ ID NO: 293646 - DNA, 5095 bp, Homo sapiens
gaaggcttaaagtaaatttattatctcactctcctgtttccacgaactttcccgaaattttcttctttcccggccttgtgaatcccttccatttctcagttaaaggacagcaccatccacccacctctctcaaagccgagctttgtattaatcctcattgacaaaatccctcctgaaatatgaaactgaaagccctgaaccctccggctgatcttggaagagaaaccccgccagaggccggggacccgctccccacctggcggacccgattccgggcgcgttccggctatcgtccctgcttgggacgctgcgcccgcctggtgcggggcggggttccggcgcagtggcgcccgcccagccccgggggcagggaaagcctaaattacggaattaccgcgagcaaggagcgcggaatcggggagcgtccggagctagctggatcctctaggcaggatggtgatgggaatctttgcaaattgtatcttctgtttgaaagtgaagtacttacctcagcagcagaagaaaaagctacaaactgacattaaggaaaatggcggaaagttttccttttcgttaaatcctcagtgcacacatataatcttagataatgctgatgttctgagtcagtaccaactgaattctatccaaaagaaccacgttcatattgcaaacccagattttatatggaaatctatcagagaaaagagactcttggatgtaaagaattatgatccttataagcccctggacatcacaccacctcctgatcagaaggcgagcagttctgaagtgaaaacagaaggtctatgcccggacagtgccacagaggaggaagacactgtggaactcactgagtttggtatgcagaatgttgaaattcctcatcttcctcaagattttgaagttgcaaaatataacaccttggagaaagtgggaatggagggaggccaggaagctgtggtggtggagcttcagtgttcgcgggactccagggactgtcctttcctgatatcctcacacttcctcctggatgatggcatggagactagaagacagtttgctataaagaaaacctctgaagatgcaagtgaatactttgaaaattacattgaagaactgaagaaacaaggatttctactaagagaacatttcacacctgaagcaacccaattagcatctgaacaattgcaagcattgcttttggaggaagtcatgaattcaagcactctgagccaagaggtgagcgatttagtagagatgatttgggcagaggccctgggccacctggaacacatgcttctcaagccagtgaacaggattagcctcaacgatgtgagcaaggcagaggggattctccttctagtaaaggcagcactgaaaaatggagaaacagcagagcaattgcaaaagatgatgacagagttttacagactgatacctcacaaaggcacaatgcccaaagaagtgaacctgggactattggctaagaaagcagacctctgccagctaataagagacatggttaatgtctgtgaaactaatttgtccaaacccaacccaccatccctggccaaataccgagctttgaggtgcaaaattgagcatgttgaacagaatactgaagaatttctcagggttagaaaagaggttttgcagaatcatcacagtaagagcccagtggatgtcttgcagatatttagagttggcagagtgaatgaaaccacagagtttttgagcaaacttggtaatgtgaggcccttgttgcatggttctcctgtacaaaacatcgtgggaatcttgtgtcgagggttgcttttacccaaagtagtggaagatcgtggtgtgcaaagaacagacgtcggaaaccttggaagtgggatttatttcagtgattcgctcagtacaagtatcaagtactcacacccgggagagacagatggcaccagactcctgctcatttgtgacgtagccctcggaaagtgtatggacttacatgagaaggacttttccttaactgaagcaccaccaggctacgacagtgtgcatggagtttcacaaacagcctctgtcaccacagactttgaggatgatgaatttgttgtctataaaaccaatcaggttaaaatgaaatatattattaaattttccatgcctggagatcagataaaggactttcatcctagtgatcatactgaattagaggaatacagacctgagttttcaaatttttcaaaggttgaagattaccagttaccagatgccaaaacttccagcagcaccaaggccggcctccaggatgcctctgggaacttggttcctctggaggatgtccacatcaaagggagaatcatagacactgtagcccaggtcattgtttttcagacatacacaaataaaagtcacgtgcccattgaggcaaaatatatctttcctttggatgacaaggccgctgtgtgtggcttcgaagccttcatcaatgggaagcacatagttggagagattaaagagaaggaagaagcccagcaagagtacctagaagccgtgacccagggccatggcgcttacctgatgagtcaggatgctccggacgtttttactgtaagtgttggaaacttaccccctaaggctaaggttcttataaaaattacctacatcacagaactcagcatcctgggcactgttggtgtctttttcatgcccgccaccgtagcaccctggcaacaggacaaggctttgaatgaaaaccttcaggatacagtagagaagatttgtataaaagaaataggaacaaagcaaagcttctctttgactatgtctattgagatgccgtatgtgattgaattcattttcagtgatacacatgaactgaaacaaaagcgcacagactgcaaagctgtcattagcaccatggaaggcagctccttagacagcagtggattttctctccacatcggtttgtctgctgcctatctcccaagaatgtgggttgaaaaacatccagaaaaagaaagcgaggcttgcatgcttgtctttcaacccgatctcgatgtcgacctccctgacctagccaatgagagcgaagtgattatttgtcttgactgctccagttccatggagggtgtgacattcttgcaagccaagcaaatcgccttgcatgcgctgtccttggtgggtgagaagcagaaagtaaatattatccagttcggcacaggttacaaggagctattttcgtatcctaagcatatcacaagcaataccacggcagcagagttcatcatgtctgccacacctaccatggggaacacagacttctggaaaacactccgatatcttagcttattgtaccctgctcgagggtcacggaacatcctcctggtgtctgatgggcacctccaggatgagagcctgacattacagctcgtgaagaggagccgcccgcacaccaggttattcgcctgcggtatcggttctacagcaaatcgtcacgtcttaaggattttgtcccagtgtggtgccggagtatttgaatattttaatgcaaaatccaagcatagttggagaaaacagatagaagaccaaatgaccaggctatgttctccgagttgccactctgtctccgtcaaatggcagcaactcaatccagatgcgcccgaggccctgcaggccccagcccaggtgccatccttgtttcgcaatgatcgactccttgtctatggattcattcctcactgcacacaggcaactctgtgtgcactaattcaagagaaagaattttgtacaatggtgtcgactactgagcttcagaagacaactggaactatgatccacaagctggcagcccgagctctaatcagagattatgaagatggcattcttcacgaaaatgaaaccagtcatgagatgaaaaaacaaaccttgaaatctctgattattaaactcagtaaagaaaactctctcataacacaatttacaagctttgtggcagttgagaaaagggatgagaatgagtcaccttttcctgatattccaaaagtttctgaacttattgccaaagaagatgtagacttcctgccctacatgagctggcagggggaaccccaagaagccgtcaggaaccagtctcttttagcatcctctgagtggccagaattacgtttatccaaacgaaaacataggaaaattccattttccaaaagaaaaatggaattatctcagccagaagtttctgaagattttgaagaggatggcttaggtgtactaccagctttcacatcaaatttggaacgtggagttctgacacagaaagtgatgagctatcagaagtacttcaagacagctgctttttacaaataaaatgtgatacaaaagatgacagtatcccgtgctttctggaagtaaaagaagaggatgaaatagtgtgcacacaacactggcaggatgctgtgccttggacagaactcctcagtctacagacagaggatggcttctggaaacttacaccagaactgggacttatattaaatcttaatacaaatggtttgcacagctttcttaaacaaaaaggcattcaatctctaggtgtaaaaggaagagaatgtctcctggacctaattgccacaatgctggtactacagtttattcgcaccaggttggaaaaagagggaatagtgttcaaatcactgatgaaaatggatgacccttctatttccaggaatattccctgggcttttgaggcaataaagcaagcaagtgaatgggtaagaagaactgaaggacagtacccatctatctgcccacggcttgaactggggaacgactgggactctgccaccaagcagttgctgggactccagcccataagcactgtgtcccctcttcatagagtcctccattacagtcaaggctaagtcaaatgaaactgaattttaaactttttgcatgcttctatgtagaaaataatcaaatgataatagatacttataatgaaacttcattaaggtttcattcagtgtagcaattactgtctttaaaaattaagtggaagaagaattactttaatcaactaacaagcaataataaaatgaaacttaaaata

SEQ ID NO: 293647 - DNA, 6155 bp, Homo sapiens
gaaggcttaaagtaaatttattatctcactctcctgtttccacgaactttcccgaaattttcttctttcccggccttgtgaatcccttccatttctcagttaaaggacagcaccatccacccacctctctcaaagccgagctttgtattaatcctcattgacaaaatccctcctgaaatatgaaactgaaagccctgaaccctccggctgatcttggaagagaaaccccgccagaggccggggacccgctccccacctggcggacccgattccgggcgcgttccggctatcgtccctgcttgggacgctgcgcccgcctggtgcggggcggggttccggcgcagtggcgcccgcccagccccgggggcagggaaagcctaaattacggaattaccgcgagcaaggagcgcggaatcggggagcgtccggagctagctggatcctctaggcaggatggtgatgggaatctttgcaaattgtatcttctgtttgaaagtgaagtacttacctcagcagcagaagaaaaagctacaaactgacattaaggaaaatggcggaaagttttccttttcgttaaatcctcagtgcacacatataatcttagataatgctgatgttctgagtcagtaccaactgaattctatccaaaagaaccacgttcatattgcaaacccagattttatatggaaatctatcagagaaaagagactcttggatgtaaagaattatgatccttataagcccctggacatcacaccacctcctgatcagaaggcgagcagttctgaagtgaaaacagaaggtctatgcccggacagtgccacagaggaggaagacactgtggaactcactgagtttggtatgcagaatgttgaaattcctcatcttcctcaagattttgaagttgcaaaatataacaccttggagaaagtgggaatggagggaggccaggaagctgtggtggtggagcttcagtgttcgcgggactccagggactgtcctttcctgatatcctcacacttcctcctggatgatggcatggagactagaagacagtttgctataaagaaaacctctgaagatgcaagtgaatactttgaaaattacattgaagaactgaagaaacaaggatttctactaagagaacatttcacacctgaagcaacccaattagcatctgaacaattgcaagcattgcttttggaggaagtcatgaattcaagcactctgagccaagaggtgagcgatttagtagagatgatttgggcagaggccctgggccacctggaacacatgcttctcaagccagtgaacaggattagcctcaacgatgtgagcaaggcagaggggattctccttctagtaaaggcagcactgaaaaatggagaaacagcagagcaattgcaaaagatgatgacagagttttacagactgatacctcacaaaggcacaatgcccaaagaagtgaacctgggactattggctaagaaagcagacctctgccagctaataagagacatggttaatgtctgtgaaactaatttgtccaaacccaacccaccatccctggccaaataccgagctttgaggtgcaaaattgagcatgttgaacagaatactgaagaatttctcagggttagaaaagaggttttgcagaatcatcacagtaagagcccagtggatgtcttgcagatatttagagttggcagagtgaatgaaaccacagagtttttgagcaaacttggtaatgtgaggcccttgttgcatggttctcctgtacaaaacatcgtgggaatcttgtgtcgagggttgcttttacccaaagtagtggaagatcgtggtgtgcaaagaacagacgtcggaaaccttggaagtgggatttatttcagtgattcgctcagtacaagtatcaagtactcacacccgggagagacagatggcaccagactcctgctcatttgtgacgtagccctcggaaagtgtatggacttacatgagaaggacttttccttaactgaagcaccaccaggctacgacagtgtgcatggagtttcacaaacagcctctgtcaccacagactttgaggatgatgaatttgttgtctataaaaccaatcaggttaaaatgaaatatattattaaattttccatgcctggagatcagataaaggactttcatcctagtgatcatactgaattagaggaatacagacctgagttttcaaatttttcaaaggttgaagattaccagttaccagatgccaaaacttccagcagcaccaaggccggcctccaggatgcctctgggaacttggttcctctggaggatgtccacatcaaagggagaatcatagacactgtagcccaggtcattgtttttcagacatacacaaataaaagtcacgtgcccattgaggcaaaatatatctttcctttggatgacaaggccgctgtgtgtggcttcgaagccttcatcaatgggaagcacatagttggagagattaaagagaaggaagaagcccagcaagagtacctagaagccgtgacccagggccatggcgcttacctgatgagtcaggatgctccggacgtttttactgtaagtgttggaaacttaccccctaaggctaaggttcttataaaaattacctacatcacagaactcagcatcctgggcactgttggtgtctttttcatgcccgccaccgtagcaccctggcaacaggacaaggctttgaatgaaaaccttcaggatacagtagagaagatttgtataaaagaaataggaacaaagcaaagcttctctttgactatgtctattgagatgccgtatgtgattgaattcattttcagtgatacacatgaactgaaacaaaagcgcacagactgcaaagctgtcattagcaccatggaaggcagctccttagacagcagtggattttctctccacatcggtttgtctgctgcctatctcccaagaatgtgggttgaaaaacatccagaaaaagaaagcgaggcttgcatgcttgtctttcaacccgatctcgatgtcgacctccctgacctagccaatgagagcgaagtgattatttgtcttgactgctccagttccatggagggtgtgacattcttgcaagccaagcaaatcgccttgcatgcgctgtccttggtgggtgagaagcagaaagtaaatattatccagttcggcacaggttacaaggagctattttcgtatcctaagcatatcacaagcaataccacggcagcagagttcatcatgtctgccacacctaccatggggaacacagacttctggaaaacactccgatatcttagcttattgtaccctgctcgagggtcacggaacatcctcctggtgtctgatgggcacctccaggatgagagcctgacattacagctcgtgaagaggagccgcccgcacaccaggttattcgcctgcggtatcggttctacagcaaatcgtcacgtcttaaggattttgtcccagtgtggtgccggagtatttgaatattttaatgcaaaatccaagcatagttggagaaaacagatagaagaccaaatgaccaggctatgttctccgagttgccactctgtctccgtcaaatggcagcaactcaatccagatgcgcccgaggccctgcaggccccagcccaggtgccatccttgtttcgcaatgatcgactccttgtctatggattcattcctcactgcacacaggcaactctgtgtgcactaattcaagagaaagaattttgtacaatggtgtcgactactgagcttcagaagacaactggaactatgatccacaagctggcagcccgagctctaatcagagattatgaagatggcattcttcacgaaaatgaaaccagtcatgagatgaaaaaacaaaccttgaaatctctgattattaaactcagtaaagaaaactctctcataacacaatttacaagctttgtggcagttgagaaaagggatgagaatgagtcaccttttcctgatattccaaaagtttctgaacttattgccaaagaagatgtagacttcctgccctacatgagctggcagggggaaccccaagaagccgtcaggaaccagtctcttttagcatcctctgagtggccagaattacgtttatccaaacgaaaacataggaaaattccattttccaaaagaaaaatggaattatctcagccagaagtttctgaagattttgaagaggatggcttaggtgtactaccagctttcacatcaaatttggaacgtggaggtgtggaaaagctattggatttaagttggacagagtcatgtaaaccaacagcaactgaaccactatttaagaaagtcagtccatgggaaacatctacttctagcttttttcctattttggctccggccgttggttcctatcttcccccgactgcccgcgctcacagtcctgcttccttgtcttttgcctcatatcgtcaggtagctagtttcggttcagctgctcctcccagacagtttgatgcatctcaattcagccaaggccctgtgcctggcacttgtgctgactggatcccacagtcggcgtcttgtcccacaggacctccccagaacccaccttctgcaccctattgtggcattgttttttcagggagctcattaagctctgcacagtctgctccactgcaacatcctggaggctttactaccaggccttctgctggcaccttccctgagctggattctccccagcttcatttctctcttcctacagaccctgatcccatcagaggttttgggtcttatcatccctctgcttactctccttttcattttcaaccttccgcagcctctttgactgccaaccttaggctgccaatggcctctgctttacctgaggctctttgcagtcagtcccggactaccccagtagatctctgtcttctagaagaatcagtaggcagtctcgaaggaagtcgatgtcctgtctttgcttttcaaagttctgacacagaaagtgatgagctatcagaagtacttcaagacagctgctttttacaaataaaatgtgatacaaaagatgacagtatcccgtgctttctggaagtaaaagaagaggatgaaatagtgtgcacacaacactggcaggatgctgtgccttggacagaactcctcagtctacagacagaggatggcttctggaaacttacaccagaactgggacttatattaaatcttaatacaaatggtttgcacagctttcttaaacaaaaaggcattcaatctctaggtgtaaaaggaagagaatgtctcctggacctaattgccacaatgctggtactacagtttattcgcaccaggttggaaaaagagggaatagtgttcaaatcactgatgaaaatggatgacccttctatttccaggaatattccctgggcttttgaggcaataaagcaagcaagtgaatgggtaagaagaactgaaggacagtacccatctatctgcccacggcttgaactggggaacgactgggactctgccaccaagcagttgctgggactccagcccataagcactgtgtcccctcttcatagagtcctccattacagtcaaggctaagtcaaatgaaactgaattttaaactttttgcatgcttctatgtagaaaataatcaaatgataatagatacttataatgaaacttcattaaggtttcattcagtgtagcaattactgtctttaaaaattaagtggaagaagaattactttaatcaactaacaagcaataataaaatgaaacttaaaataaaaaaaaaaaaaaaaaaaaaaaaaaaaaaaaaaaaaaaaaaaagaaaaaaaaaaaaaaacaaaaagaagaggagggggcgcgggcgcgccggataaaagataatctcccgcagcgaggggagcacgcaacaaaaagacgaccgaccaaacacacaatatatgtgagacaaagagggggggccgaccagagtgagggagcacttctaaaacaacagaaggagcgagggcgcgcgcgctaaaacaacaggggggaggggggaaaaacacggcgcagggggaaaacgtggggaaacaagaccagctatgggagggggaagcaaaactaggcgaaacaacgag

SEQ ID NO: 293648 - DNA, 1419 bp, Homo sapiens
ggatctcgtcaggagagagaactggagttgaagccccagggagcccccacttaggccaagtcctgcttccttgtcttttgcctcatatcgtcaggtagctagtttcggttcagctgctcctcccagacagtttgatgcatctcaattcagccaaggccctgtgcctggcacttgtgctgactggatcccacagtcggcgtcttgtcccacaggacctccccagaacccaccttctgcaccctattgtggcattgttttttcagggagctcattaagctctgcacagtctgctccactgcaacatcctggaggctttactaccaggccttctgctggcaccttccctgagctggattctccccagcttcatttctctcttcctacagaccctgatcccatcagaggttttgggtcttatcatccctctgcttactctccttttcattttcaaccttccgcagcctctttgactgccaaccttaggctgccaatggcctctgctttacctgaggctctttgcagtcagtcccggactaccccagtagatctctgtcttctagaagaatcagtaggcagtctcgaaggaagtcgatgtcctgtctttgcttttcaaagttctgacacagaaagtgatgagctatcagaagtacttcaagacagctgctttttacaaataaaatgtgatacaaaagatgacagtatcccgtgctttctggaagtaaaagaagaggatgaaatagtgtgcacacaacactggcaggatgctgtgccttggacagaactcctcagtctacagacagaggatggcttctggaaacttacaccagaactgggacttatattaaatcttaatacaaatggtttgcacagctttcttaaacaaaaaggcattcaatctctaggtgtaaaaggaagagaatgtctcctggacctaattgccacaatgctggtactacagtttattcgcaccaggttggaaaaagagggaatagtgttcaaatcactgatgaaaatggatgacccttctatttccaggaatattccctgggcttttgaggcaataaagcaagcaagtgaatgggtaagaagaactgaaggacagtacccatctatctgcccacggcttgaactggggaacgactgggactctgccaccaagcagttgctgggactccagcccataagcactgtgtcccctcttcatagagtcctccattacagtcaaggctaagtcaaatgaaactgaattttaaactttttgcatgcttctatgtagaaaataatcaaatgataatagatacttataatgaaacttcattaaggtttcattcagtgtagcaattactgtctttaaaaattaagtggaagaagaattactttaatcaactaacaagcaataataaaatgaaacttaaaata

SEQ ID NO: 293649 - DNA, 867 bp, Homo sapiens
gaaacatttatcacataacttcttttttcatttaatttgttaaagttttattttagatgcagaggtacacgtacaggtttattacatgggcataccgtgtggtgctgaggtttgggcttctaattgtcttgttgcccaagtagtgaaaatatgtttttcaacccttgccccactccttcccccactacgtaacttcttatgtgataaaatgtgaataacataacttatttttgtttccttaattttgtaggatggcttctggaaacttacaccagaactgggacttatattaaatcttaatacaaatggtttgcacagctttcttaaacaaaaaggcattcaatctctaggtgtaaaaggaagagaatgtctcctggacctaattgccacaatgctggtactacagtttattcgcaccaggttggaaaaagagggaatagtgttcaaatcactgatgaaaatggatgacccttctatttccaggaatattccctgggcttttgaggcaataaagcaagcaagtgaatgggtaagaagaactgaaggacagtacccatctatctgcccacggcttgaactggggaacgactgggactctgccaccaagcagttgctgggactccagcccataagcactgtgtcccctcttcatagagtcctccattacagtcaaggctaagtcaaatgaaactgaattttaaactttttgcatgcttctatgtagaaaataatcaaatgataatagatacttataatgaaacttcattaaggtttcattcagtgtagcaattactgtctttaaaaattaagtggaagaagaattactttaatcaactaacaagcaataataaaatgaaacttaaaata

SEQ ID NO: 293650 - DNA, 3963 bp, Homo sapiens
  misc_feature (3891)..(3892): n is a, c, g, or t
  misc_feature (3960)..(3963): n is a, c, g, or t
gaaggcttaaagtaaatttattatctcactctcctgtttccacgaactttcccgaaattttcttctttcccggccttgtgaatcccttccatttctcagttaaaggacagcaccatccacccacctctctcaaagccgagctttgtattaatcctcattgacaaaatccctcctgaaatatgaaactgaaagccctgaaccctccggctgatcttggaagagaaaccccgccagaggccggggacccgctccccacctggcggacccgattccgggcgcgttccggctatcgtccctgcttgggacgctgcgcccgcctggtgcggggcggggttccggcgcagtggcgcccgcccagccccgggggcagggaaagcctaaattacggaattaccgcgagcaaggagcgcggaatcggggagcgtccggagctagctggatcctctaggcaggatggtgatgggaatctttgcaaattgtatcttctgtttgaaagtgaagtacttacctcagcagcagaagaaaaagctacaaactgacattaaggaaaatggcggaaagttttccttttcgttaaatcctcagtgcacacatataatcttagataatgctgatgttctgagtcagtaccaactgaattctatccaaaagaaccacgttcatattgcaaacccagattttatatggaaatctatcagagaaaagagactcttggatgtaaagaattatgatccttataagcccctggacatcacaccacctcctgatcagaaggcgagcagttctgaagtgaaaacagaaggtctatgcccggacagtgccacagaggaggaagacactgtggaactcactgagtttggtatgcagaatgttgaaattcctcatcttcctcaagattttgaagttgcaaaatataacaccttggagaaagtgggaatggagggaggccaggaagctgtggtggtggagcttcagtgttcgcgggactccagggactgtcctttcctgatatcctcacacttcctcctggatgatggcatggagactagaagacagtttgctataaagaaaacctctgaagatgcaagtgaatactttgaaaattacattgaagaactgaagaaacaaggatttctactaagagaacatttcacacctgaagcaacccaattagcatctgaacaattgcaagcattgcttttggaggaagtcatgaattcaagcactctgagccaagaggtgagcgatttagtagagatgatttgggcagaggccctgggccacctggaacacatgcttctcaagccagtgaacaggattagcctcaacgatgtgagcaaggcagaggggattctccttctagtaaaggcagcactgaaaaatggagaaacagcagagcaattgcaaaagatgatgacagagttttacagactgatacctcacaaaggcacaatgcccaaagaagtgaacctgggactattggctaagaaagcagacctctgccagctaataagagacatggttaatgtctgtgaaactaatttgtccaaacccaacccaccatccctggccaaataccgagctttgaggtgcaaaattgagcatgttgaacagaatactgaagaatttctcagggttagaaaagaggttttgcagaatcatcacagtaagagcccagtggatgtcttgcagatatttagagttggcagagtgaatgaaaccacagagtttttgagcaaacttggtaatgtgaggcccttgttgcatggttctcctgtacaaaacatcgtgggaatcttgtgtcgagggttgcttttacccaaagtagtggaagatcgtggtgtgcaaagaacagacgtcggaaaccttggaagtgggatttatttcagtgattcgctcagtacaagtatcaagtactcacacccgggagagacagatggcaccagactcctgctcatttgtgacgtagccctcggaaagtgtatggacttacatgagaaggacttttccttaactgaagcaccaccaggctacgacagtgtgcatggagtttcacaaacagcctctgtcaccacagactttgaggatgatgaatttgttgtctataaaaccaatcaggttaaaatgaaatatattattaaattttccatgcctggagatcagataaaggactttcatcctagtgatcatactgaattagaggaatacagacctgagttttcaaatttttcaaaggttgaagattaccagttaccagatgccaaaacttccagcagcaccaaggccggcctccaggatgcctctgggaacttggttcctctggaggatgtccacatcaaagggagaatcatagacactgtagcccaggtcattgtttttcagacatacacaaataaaagtcacgtgcccattgaggcaaaatatatctttcctttggatgacaaggccgctgtgtgtggcttcgaagccttcatcaatgggaagcacatagttggagagattaaagagaaggaagaagcccagcaagagtacctagaagccgtgacccagggccatggcgcttacctgatgagtcaggatgctccggacgtttttactgtaagtgttggaaacttaccccctaaggctaaggttcttataaaaattacctacatcacagaactcagcatcctgggcactgttggtgtctttttcatgcccgccaccgtagcaccctggcaacaggacaaggctttgaatgaaaaccttcaggatacagtagagaagatttgtataaaagaaataggaacaaagcaaagcttctctttgactatgtctattgagatgccgtatgtgattgaattcattttcagtgatacacatgaactgaaacaaaagcgcacagactgcaaagctgtcattagcaccatggaaggcagctccttagacagcagtggattttctctccacatcggtttgtctgctgcctatctcccaagaatgtgggttgaaaaacatccagaaaaagaaagcgaggcttgcatgcttgtctttcaacccgatctcgatgtcgacctccctgacctagccaatgagagcgaagtgattatttgtcttgactgctccagttccatggagggtgtgacattcttgcaagccaagcaaatcgccttgcatgcgctgtccttggtgggtgagaagcagaaagtaaatattatccagttcggcacaggttacaaggagctattttcgtatcctaagcatatcacaagcaataccacggcagcagagttcatcatgtctgccacacctaccatggggaacacagacttctggaaaacactccgatatcttagcttattgtaccctgctcgagggtcacggaacatcctcctggtgtctgatgggcacctccaggatgagagcctgacattacagctcgtgaagaggagccgcccgcacaccaggttattcgcctgcggtatcgggtgagtctcagagagctggtcacatagtccagacccacggggaggtcgtcttgttgccctgcaggggactttggcaagcttggaagttgacactagaatacagaagccttacagcatagagggatggggctccgggctcccagccagactgcctgagtctcagaacctgggttggccactcattagcttagccgtgaccttgagcaagttccttaacctctcatctgtaaaaccaaggtgataatgaaaatacctacctcctaggattgctgaggaataaatgagctcatacatagaaagcactcagaacagaactgaaccaaaagcaccaaatcagttagatgttattatttagcataagaatccaagcacctagcctcgctcttggcaggtactcagcgaatgaatgctgtatatgttgggnncaaagttccctacttcctgtgacttcagctctgttttacaataaaatcttgaaaatgccaaaaaaggnnnn

SEQ ID NO: 293651 - DNA, 3919 bp, Homo sapiens
gaaggcttaaagtaaatttattatctcactctcctgtttccacgaactttcccgaaattttcttctttcccggccttgtgaatcccttccatttctcagttaaaggacagcaccatccacccacctctctcaaagccgagctttgtattaatcctcattgacaaaatccctcctgaaatatgaaactgaaagccctgaaccctccggctgatcttggaagagaaaccccgccagaggccggggacccgctccccacctggcggacccgattccgggcgcgttccggctatcgtccctgcttgggacgctgcgcccgcctggtgcggggcggggttccggcgcagtggcgcccgcccagccccgggggcagggaaagcctaaattacggaattaccgcgagcaaggagcgcggaatcggggagcgtccggagctagctggatcctctaggcaggatggtgatgggaatctttgcaaattgtatcttctgtttgaaagtgaagtacttacctcagcagcagaagaaaaagctacaaactgacattaaggaaaatggcggaaagttttccttttcgttaaatcctcagtgcacacatataatcttagataatgctgatgttctgagtcagtaccaactgaattctatccaaaagaaccacgttcatattgcaaacccagattttatatggaaatctatcagagaaaagagactcttggatgtaaagaattatgatccttataagcccctggacatcacaccacctcctgatcagaaggcgagcagttctgaagtgaaaacagaaggtctatgcccggacagtgccacagaggaggaagacactgtggaactcactgagtttggtatgcagaatgttgaaattcctcatcttcctcaagattttgaagttgcaaaatataacaccttggagaaagtgggaatggagggaggccaggaagctgtggtggtggagcttcagtgttcgcgggactccagggactgtcctttcctgatatcctcacacttcctcctggatgatggcatggagactagaagacagtttgctataaagaaaacctctgaagatgcaagtgaatactttgaaaattacattgaagaactgaagaaacaaggatttctactaagagaacatttcacacctgaagcaacccaattagcatctgaacaattgcaagcattgcttttggaggaagtcatgaattcaagcactctgagccaagaggtgagcgatttagtagagatgatttgggcagaggccctgggccacctggaacacatgcttctcaagccagtgaacaggattagcctcaacgatgtgagcaaggcagaggggattctccttctagtaaaggcagcactgaaaaatggagaaacagcagagcaattgcaaaagatgatgacagagttttacagactgatacctcacaaaggcacaatgcccaaagaagtgaacctgggactattggctaagaaagcagacctctgccagctaataagagacatggttaatgtctgtgaaactaatttgtccaaacccaacccaccatccctggccaaataccgagctttgaggtgcaaaattgagcatgttgaacagaatactgaagaatttctcagggttagaaaagaggttttgcagaatcatcacagtaagagcccagtggatgtcttgcagatatttagagttggcagagtgaatgaaaccacagagtttttgagcaaacttggtaatgtgaggcccttgttgcatggttctcctgtacaaaacatcgtgggaatcttgtgtcgagggttgcttttacccaaagtagtggaagatcgtggtgtgcaaagaacagacgtcggaaaccttggaagtgggatttatttcagtgattcgctcagtacaagtatcaagtactcacacccgggagagacagatggcaccagactcctgctcatttgtgacgtagccctcggaaagtgtatggacttacatgagaaggacttttccttaactgaagcaccaccaggctacgacagtgtgcatggagtttcacaaacagcctctgtcaccacagactttgaggatgatgaatttgttgtctataaaaccaatcaggttaaaatgaaatatattattaaattttccatgcctggagatcagataaaggactttcatcctagtgatcatactgaattagaggaatacagacctgagttttcaaatttttcaaaggttgaagattaccagttaccagatgccaaaacttccagcagcaccaaggccggcctccaggatgcctctgggaacttggttcctctggaggatgtccacatcaaagggagaatcatagacactgtagcccaggtcattgtttttcagacatacacaaataaaagtcacgtgcccattgaggcaaaatatatctttcctttggatgacaaggccgctgtgtgtggcttcgaagccttcatcaatgggaagcacatagttggagagattaaagagaaggaagaagcccagcaagagtacctagaagccgtgacccagggccatggcgcttacctgatgagtcaggatgctccggacgtttttactgtaagtgttggaaacttaccccctaaggctaaggttcttataaaaattacctacatcacagaactcagcatcctgggcactgttggtgtctttttcatgcccgccaccgtagcaccctggcaacaggacaaggctttgaatgaaaaccttcaggatacagtagagaagatttgtataaaagaaataggaacaaagcaaagcttctctttgactatgtctattgagatgccgtatgtgattgaattcattttcagtgatacacatgaactgaaacaaaagcgcacagactgcaaagctgtcattagcaccatggaaggcagctccttagacagcagtggattttctctccacatcggtttgtctgctgcctatctcccaagaatgtgggttgaaaaacatccagaaaaagaaagcgaggcttgcatgcttgtctttcaacccgatctcgatgtcgacctccctgacctagccaatgagagcgaagtgattatttgtcttgactgctccagttccatggagggtgtgacattcttgcaagccaagcaaatcgccttgcatgcgctgtccttggtgggtgagaagcagaaagtaaatattatccagttcggcacaggttacaaggagctattttcgtatcctaagcatatcacaagcaataccacggcagcagagttcatcatgtctgccacacctaccatggggaacacagacttctggaaaacactccgatatcttagcttattgtaccctgctcgagggtcacggaacatcctcctggtgtctgatgggcacctccaggatgagagcctgacattacagctcgtgaagaggagccgcccgcacaccaggttattcgcctgcggtatcgggtgagtctcagagagctggtcacatagtccagacccacggggaggtcgtcttgttgccctgcaggggactttggcaagcttggaagttgacactagaatacagaagccttacagcatagagggatggggctccgggctcccagccagactgcctgagtctcagaacctgggttggccactcattagcttagccgtgaccttgagcaagttccttaacctctcatctgtaaaaccaaggtgataatgaaaatacctacctcctaggattgctgaggaataaatgagctcatacatagaaagcactcagaacagaactgaaccaaaagcaccaaatcagttagatgttattatttagcataagaatccaaatctccgcttgtcccgaaggcctgggtaaacctcctcactggctgtgctggactcgtgctgggggcatgtgacctccaggcaga

SEQ ID NO: 293652 - DNA, 960 bp, Homo sapiens
gttccggtccggaattccagggtcgactactactactaaattcccggccgcgtcgaccacagacttgactcgatatgcttattctaccaagttgttcctggtttacgtgacacaactgaatgtatgccagtttcatgggggactctcagatattctgaaggtacctaatcaagtcagtacagtgggaaggagagagaaacagaagcctcatttgtgaaatagtacttgagtttgtgcgtgaagaatggataggatttagactgagaagcgtggaaaggggacaaccataaacaactgtagagcggctggaacgtgagctgtgctccaggcatccctgatgcctgcagtcgacgtggaagccaggaggtggcgggcacagggcacttgacaatgcagtgcataagctcaaggtcagacgggcagaagaacttccgtaagatgccaaggaaaactgcttttattaaatatcttaatttttggcagaatcattttgtctgatataatgtgatgggtttagtaccacattacatttcacatgttatattctgaaatctgaaacttttttttttaatctaggaatattccctgggcttttgaggcaataaagcaagcaagtgaatgggtaagaagaactgaaggacagtacccatctatctgcccacggcttgaactggggaacgactgggactctgccaccaagcagttgctgggactccagcccataagcactgtgtcccctcttcatagagtcctccattacagtcaaggctaagtcaaatgaaactgaattttaaactttttgcatgcttctatgtagaaaataatcaaatgataatagatacttataatgaaacttcattaaggtttcattcagtgtagcaattactgtctttaaaaattaagtggaagaagaattactttaatcaactaacaagcaataataaaatgaaacttaaaata

SEQ ID NO: 293653 - DNA, 3728 bp, Homo sapiens
gaaggcttaaagtaaatttattatctcactctcctgtttccacgaactttcccgaaattttcttctttcccggccttgtgaatcccttccatttctcagttaaaggacagcaccatccacccacctctctcaaagccgagctttgtattaatcctcattgacaaaatccctcctgaaatatgaaactgaaagccctgaaccctccggctgatcttggaagagaaaccccgccagaggccggggacccgctccccacctggcggacccgattccgggcgcgttccggctatcgtccctgcttgggacgctgcgcccgcctggtgcggggcggggttccggcgcagtggcgcccgcccagccccgggggcagggaaagcctaaattacggaattaccgcgagcaaggagcgcggaatcggggagcgtccggagctagctggatcctctaggcaggatggtgatgggaatctttgcaaattgtatcttctgtttgaaagtgaagtacttacctcagcagcagaagaaaaagctacaaactgacattaaggaaaatggcggaaagttttccttttcgttaaatcctcagtgcacacatataatcttagataatgctgatgttctgagtcagtaccaactgaattctatccaaaagaaccacgttcatattgcaaacccagattttatatggaaatctatcagagaaaagagactcttggatgtaaagaattatgatccttataagcccctggacatcacaccacctcctgatcagaaggcgagcagttctgaagtgaaaacagaaggtctatgcccggacagtgccacagaggaggaagacactgtggaactcactgagtttggtatgcagaatgttgaaattcctcatcttcctcaagattttgaagttgcaaaatataacaccttggagaaagtgggaatggagggaggccaggaagctgtggtggtggagcttcagtgttcgcgggactccagggactgtcctttcctgatatcctcacacttcctcctggatgatggcatggagactagaagacagtttgctataaagaaaacctctgaagatgcaagtgaatactttgaaaattacattgaagaactgaagaaacaaggatttctactaagagaacatttcacacctgaagcaacccaattagcatctgaacaattgcaagcattgcttttggaggaagtcatgaattcaagcactctgagccaagaggtgagcgatttagtagagatgatttgggcagaggccctgggccacctggaacacatgcttctcaagccagtgaacaggattagcctcaacgatgtgagcaaggcagaggggattctccttctagtaaaggcagcactgaaaaatggagaaacagcagagcaattgcaaaagatgatgacagagttttacagactgatacctcacaaaggcacaatgcccaaagaagtgaacctgggactattggctaagaaagcagacctctgccagctaataagagacatggttaatgtctgtgaaactaatttgtccaaacccaacccaccatccctggccaaataccgagctttgaggtgcaaaattgagcatgttgaacagaatactgaagaatttctcagggttagaaaagaggttttgcagaatcatcacagtaagagcccagtggatgtcttgcagatatttagagttggcagagtgaatgaaaccacagagtttttgagcaaacttggtaatgtgaggcccttgttgcatggttctcctgtacaaaacatcgtgggaatcttgtgtcgagggttgcttttacccaaagtagtggaagatcgtggtgtgcaaagaacagacgtcggaaaccttggaagtgggatttatttcagtgattcgctcagtacaagtatcaagtactcacacccgggagagacagatggcaccagactcctgctcatttgtgacgtagccctcggaaagtgtatggacttacatgagaaggacttttccttaactgaagcaccaccaggctacgacagtgtgcatggagtttcacaaacagcctctgtcaccacagactttgaggatgatgaatttgttgtctataaaaccaatcaggttaaaatgaaatatattattaaattttccatgcctggagatcagataaaggactttcatcctagtgatcatactgaattagaggaatacagacctgagttttcaaatttttcaaaggttgaagattaccagttaccagatgccaaaacttccagcagcaccaaggccggcctccaggatgcctctgggaacttggttcctctggaggatgtccacatcaaagggagaatcatagacactgtagcccaggtcattgtttttcagacatacacaaataaaagtcacgtgcccattgaggcaaaatatatctttcctttggatgacaaggccgctgtgtgtggcttcgaagccttcatcaatgggaagcacatagttggagagattaaagagaaggaagaagcccagcaagagtacctagaagccgtgacccagggccatggcgcttacctgatgagtcaggatgctccggacgtttttactgtaagtgttggaaacttaccccctaaggctaaggttcttataaaaattacctacatcacagaactcagcatcctgggcactgttggtgtctttttcatgcccgccaccgtagcaccctggcaacaggacaaggctttgaatgaaaaccttcaggatacagtagagaagatttgtataaaagaaataggaacaaagcaaagcttctctttgactatgtctattgagatgccgtatgtgattgaattcattttcagtgatacacatgaactgaaacaaaagcgcacagactgcaaagctgtcattagcaccatggaaggcagctccttagacagcagtggattttctctccacatcggtttgtctgctgcctatctcccaagaatgtgggttgaaaaacatccagaaaaagaaagcgaggtatactcctttttacttagacataggagacactattgaaaaaatgtttcagaataagctggttaaacttgcaaattattgattgtcctgaaaaactagcattacaaaatgaactctcacatctcaagattctgcaactaaaaatatttatgatatcaagcatgccaaacttctgacgtttcatccaaaacccttatgtggatgatttgcctgtacaaattcgcatttttaccttaagctccaccaaaagaacatgtgccatcagacattacattgggtattctctataacttgttatagttttaaaatactgatactggaaaaacaaataagcagttatttgtggttggtaataagatcattttgtgtggctgtgacaaagagtctcttcttaagttaaaataaaaatagaaacttaggctgggtgtggtggctcacacctgtaatcccagcactttgagaggccaaggcagatggattgcttgagctcaggagtttgaaaccagcctgggaaacatagtgagacctcgtctctgtaaaaaattaagaaaaaaaattagccaggtgtggtcatgcacacctgtggtttcagcttctcaggaggctaagacagggcgatcacttgagtccaggaggttgaggttgaactgagctgtgatcgtgccactgcataccagcctggacaacagagggagaccctgtctcaaaaaaaa

SEQ ID NO: 293654 - DNA, 443 bp, Homo sapiens
gtgtggcttcgaagccttcatcaatgggaagcacatagttggagaggtaaggcaagaagatgcatcgtgcccgctctcggctttcaaagtcagcttccatttcccagaacctttgtttttggagtccccatggctacaaggttgagtagcagccttatcataaaacgagaatattctttgaagaatcagttcttgcgcagtgagcctccctcaagcatccctccgtgatgaagggtttctacccccatctgtccagtcttcatcttcagtgtcttgcacattctttgccttggcaccgtaagagtgatttcagtatgaaaagttaaagagggccgggtgcagtggctcatgcctgtaatcccagcacttcgggaggctgaggcaggtggatcacttgaggtcaggggttcgagctgaaatgaaagctattgtaactttctaaa

SEQ ID NO: 293655 - DNA, 221 bp, Homo sapiens
ccctcggaaagtgtatggacttacatgagaaggacttttccttaactgaagcaccaccaggctacgacagtgtgcatggagtttcacaaacagcctctgtcaccacagactttgaggtatttttatttcaaggaagaagcaaagagggtcttgaatgctcaaagaaaggccttagttttttgctcctattttcattaaatatgcttaagtttaaataattg

SEQ ID NO: 293656 - DNA, 392 bp, Homo sapiens
agtcttgtcccttcactctgcagggcattgggcggaaggtgatggagcggcagggctgggctgagggccagggcctgggctgcaggtgctcaggggtgcctgaggccctggatagtgatggccaacaccccagatgcaagcgtggattggggtaagtgtgactgagggacttccctgggggcccaagcctttcagctatgccctggtttccctcttcccactggttttggcatggctgctgggtactcgtgcgggatgaaattcaaaacagttaagaggaaaaagtggatctgggccaggcacggtggctcaagcctgtaatcccagctacttgggaggctgagacaggagaatcacttaaacccaggaggcagaggttgcagtgagccgag

SEQ ID NO: 293657 - DNA, 2145 bp, Homo sapiens
atccccccccccccccccccgatgtgacaatccaagatggcggtgcccggcgaggcggaggaggaggcgacagtttacctggtagtgagcggtatcccctccgtgttgcgctcggcccatttacggagctattttagccagttccgagaagagcgcggcggtggcttcctctgtttccactaccggcatcggcctgagcgggcccctccgcaggccgctcctaactctgccctaattcctaccgacccagccgctgagggccagcttctctctcagacttcggccaccgatgtccggcctctctccactcgagactctactccaatccagacccgcacctgctgctgcgtcatctcggtaagggggttggctcaagctcagaggcttattcgcatgtactcgggccgccggtggctggattctcacgggacttggctaccgggtcgctgtctcatccgcagacttcggctacctacggaggcatcaggtctgggctcctttcccttcaagacccggaaggaactgcagagttggaaggcagagaatgaagccttcaccctggctgacctgaagcaactgccggagctgaacccaccagtgctgatgcccagagggaatgtggggactcccctgcgggtctttttggagttgatccgggcctgccgcctaccccctcggatcatcacccagctgcagctccagttccccaagacaggttcctcccggcgctacggcaatgtgccttttgagtatgaggactcagagactgtggagcaggaagagcttgtgtatacagcagagggtgaagaaataccccaaggaacctacctggcagatataccagccagcccctgtggagagcctgaggaagaagtggggaaggaagaggaagaagagtctcactcagatgaggacgatgaccggggtgaggaatgggaacggcatgaagcgctgcatgaggacgtgaccgggcaggagcggaccactgagcagctctttgaggaggagattgagctcaagtgggagaagggtggctctggcctggtgttttatactgatgcccagttctggcaggaggaagaaggagattttgatgaacagacagccgatgactgggatgtggacatgagtgtgtactatgacagagatggtggagacaaggatgcccgagactctgtccaaatgcgtctggaacagagactccgagatggacaggaagatggctctgtgatcgaacgccaggtgggcacctttgagcgccacaccaagggcattgggcggaaggtgatggagcggcagggctgggctgagggccagggcctgggctgcaggtgctcaggggtgcctgaggccctggatagtgatggccaacaccccagatgcaagcgtggattggggtaccatggagagaagctacagccatttgggcaactgaagaggccccgtagaaatggcttggggctcatctccaccatctatgatgagcctctaccccaagaccagacggagtcactgctccgccgccagccacccaccagcatgaagtttcggacagacatggcctttgtgaggggttccagttgtgcttcagacagcccctcattgcctgactgaccgggttgggggcttcctttcatagctacatgatgaaaaccctctgccctggcctcatctaccactgaagcagaaaggagtctgggagcagcagtcttcgtggctggttcagggtgttttgttccgagcctgcctgcctgccggttctatacctcaggggcatttttacaaaaagccccctcccgtcccctccccttggatattaggggtaacgaccgcttgtctttggtctctaaccctaatctctgggcttgccctttgcctcctgcagaactttgaaaagctgggttgagtgaggctatcagcacagccttccttggggactctgaaggtgtccccacgaaggccagaaagggggaaagggacctgggcgaggagaggatttgtggtgcttggaagagccggccttgggtgggccctccaccgcctctaccctcactgggtgggactgccagcggagagtccgcgggaggtggcttgggtgtgcgacgtcacggaagaataaagacgtttactactggaaaaaaaaaa

SEQ ID NO: 293658 - DNA, 1825 bp, Homo sapiens
atccccccccccccccccccgatgtgacaatccaagatggcggtgcccggcgaggcggaggaggaggcgacagtttacctggtagtgagcggtatcccctccgtgttgcgctcggcccatttacggagctattttagccagttccgagaagagcgcggcggtggcttcctctgtttccactaccggcatcggcctgagcgggcccctccgcaggccgctcctaactctgccctaattcctaccgacccagccgctgagggccagcttctctctcagacttcggccaccgatgtccggcctctctccactcgagactctactccaatccagacccgcacctgctgctgcgtcatctcggatcatcacccagctgcagctccagttccccaagacaggttcctcccggcgctacggcaatgtgccttttgagtatgaggactcagagactgtggagcaggaagagcttgtgtatacagcagagggtgaagaaataccccaaggaacctacctggcagatataccagccagcccctgtggagagcctgaggaagaagtggggaaggaagaggaagaagagtctcactcagatgaggacgatgaccggggtgaggaatgggaacggcatgaagcgctgcatgaggacgtgaccgggcaggagcggaccactgagcagctctttgaggaggagattgagctcaagtgggagaagggtggctctggcctggtgttttatactgatgcccagttctggcaggaggaagaaggagattttgatgaacagacagccgatgactgggatgtggacatgagtgtgtactatgacagagatggtggagacaaggatgcccgagactctgtccaaatgcgtctggaacagagactccgagatggacaggaagatggctctgtgatcgaacgccaggtgggcacctttgagcgccacaccaagggcattgggcggaaggtgatggagcggcagggctgggctgagggccagggcctgggctgcaggtgctcaggggtgcctgaggccctggatagtgatggccaacaccccagatgcaagcgtggattggggtaccatggagagaagctacagccatttgggcaactgaagaggccccgtagaaatggcttggggctcatctccaccatctatgatgagcctctaccccaagaccagacggagtcactgctccgccgccagccacccaccagcatgaagtttcggacagacatggcctttgtgaggggttccagttgtgcttcagacagcccctcattgcctgactgaccgggttgggggcttcctttcatagctacatgatgaaaaccctctgccctggcctcatctaccactgaagcagaaaggagtctgggagcagcagtcttcgtggctggttcagggtgttttgttccgagcctgcctgcctgccggttctatacctcaggggcatttttacaaaaagccccctcccgtcccctccccttggatattaggggtaacgaccgcttgtctttggtctctaaccctaatctctgggcttgccctttgcctcctgcagaactttgaaaagctgggttgagtgaggctatcagcacagccttccttggggactctgaaggtgtccccacgaaggccagaaagggggaaagggacctgggcgaggagaggatttgtggtgcttggaagagccggccttgggtgggccctccaccgcctctaccctcactgggtgggactgccagcggagagtccgcgggaggtggcttgggtgtgcgacgtcacggaagaataaagacgtttactactggaaaaaaaaaa

SEQ ID NO: 293659 - DNA, 1903 bp, Homo sapiens
gcggggggaggcgcgtcgaggcagcgtcctccttttgtgcgagcgccggcggctcggcttctcgaaggagaagaaactgaggcctggaatttgattaactcattcaaggttacccagttggtaattcatttgcacacctgttagcaagaaacagaagttgaaggactggaacaagtgaactaggaaagagggaacgccaatccaaggatagaaggacaaggacagaatcaccagcactggctgaaggtaccttaacatggggaatcttcttaaagttttgacatgcacagaccttgagcaggggccaaattttttccttgattttgaaaatgcccagcctacagagtctgagaaggaaatttataatcaggtgaatgtagtattaaaagatgcagaaggcatcttggaggacttgcagtcatacagaggagctggccacgaaatacgagaggcaatccagcatccagcagatgagaagttgcaagagaaggcatggggtgcagttgttccactagtaggcaaattaaagaaattttacgaattttctcagaggttagaagcagcattaagaggtcttctgggagccttaacaagtaccccatattctcccacccagcatctagagcgagagcaggctcttgctaaacagtttgcagaaattcttcatttcacactccggtttgatgaactcaagatgacaaatcctgccatacagaatgatttcagctattatagaagaacattgagtcgtatgaggattaacaatgtaccggcagaaggagaaaatgaagtaaataatgaattggcaaatcgaatgtctttgttttatgctgaggcaactccaatgctgaaaaccttgagtgatgccacaacaaaatttgtatcagagaataaaaatttaccaatagaaaataccacagattgtttaagcacaatggctagtgtatgcagagtcatgctggaaacaccggaatacagaagcagatttacaaatgaagagacagtgtcattctgcttgagggtaatggtgggtgtcataatactctatgaccacgtacatccagtgggagcatttgctaaaacttccaaaattgatatgaaaggttgtatcaaagttcttaaggaccaacctcctaatagtgtggaaggtcttctaaatgctctcaggtacacaacaaaacatttgaatgatgagactacctccaagcaaattaaatccatgctgcaataacaattctggaataagcacctgctgtagacagaagacagtattctgcaatgactgagaatgcagttttttagtgattgcaattactatctcatttattcttgcttttatttctttcctctgttcctcttccctcttttttaatcatgttcttaagacttcttttctgtgccaaaatcagtaaagttacactctgaagggatatcatcctttcaaacgggccatctaaggcagctaattatgcattgcattggggtctctactgagaaaaattctgtgacttgaactaaatatttttaaatgtggattttttttgaaactaatatttaatattgcttctcctgcatggcaaaactgcctattctgctatttaaaaaccctcaatgactttattttctactgccgcctttttcatgtgcaaccaaaatgaaaatgtttaaattaactgtgttgtacaaatggtacccaacacaaactttttttaaattagtaatacttttgtttaaagttttaagtttgcattttgactttttttgtaaggatgtatgttgtgtgtttaacctttattaactaacgttaaaagctgtgatgtgtgcgtagaatattacgtatgcatgttcatgtctaaagaatggctgttgatgataaaataaaaatcagctttcatttttctaa

SEQ ID NO: 293660 - DNA, 1990 bp, Homo sapiens
cgggtcacttgccctccccgctcggagctgccgcctggcttgtcgcggctctgccacaggggcaggtgttgaggggctcccggtccggctgccgccgctcccccgctccggacccggggctccccctagcgccgctgaggagccgcctctgcggctccaggagggcgcaggagcgggactgagagcgcctggaggctcgagcggagggtaattcatttgcacacctgttagcaagaaacagaagttgaaggactggaacaagtgaactaggaaagagggaacgccaatccaaggatagaaggacaaggacagaatcaccagcactggctgaaggtaccttaacatggggaatcttcttaaagttttgacatgcacagaccttgagcaggggccaaattttttccttgattttgaaaatgcccagcctacagagtctgagaaggaaatttataatcaggtgaatgtagtattaaaagatgcagaaggcatcttggaggacttgcagtcatacagaggagctggccacgaaatacgagaggcaatccagcatccagcagatgagaagttgcaagagaaggcatggggtgcagttgttccactagtaggcaaattaaagaaattttacgaattttctcagaggttagaagcagcattaagaggtcttctgggagccttaacaagtaccccatattctcccacccagcatctagagcgagagcaggctcttgctaaacagtttgcagaaattcttcatttcacactccggtttgatgaactcaagatgacaaatcctgccatacagaatgatttcagctattatagaagaacattgagtcgtatgaggattaacaatgtaccggcagaaggagaaaatgaagtaaataatgaattggcaaatcgaatgtctttgttttatgctgaggcaactccaatgctgaaaaccttgagtgatgccacaacaaaatttgtatcagagaataaaaatttaccaatagaaaataccacagattgtttaagcacaatggctagtgtatgcagagtcatgctggaaacaccggaatacagaagcagatttacaaatgaagagacagtgtcattctgcttgagggtaatggtgggtgtcataatactctatgaccacgtacatccagtgggagcatttgctaaaacttccaaaattgatatgaaaggttgtatcaaagttcttaaggaccaacctcctaatagtgtggaaggtcttctaaatgctctcaggtacacaacaaaacatttgaatgatgagactacctccaagcaaattaaatccatgctgcaataacaattctggaataagcacctgctgtagacagaagacagtattctgcaatgactgagaatgcagttttttagtgattgcaattactatctcatttattcttgcttttatttctttcctctgttcctcttccctcttttttaatcatgttcttaagacttcttttctgtgccaaaatcagtaaagttacactctgaagggatatcatcctttcaaacgggccatctaaggcagctaattatgcattgcattggggtctctactgagaaaaattctgtgacttgaactaaatatttttaaatgtggattttttttgaaactaatatttaatattgcttctcctgcatggcaaaactgcctattctgctatttaaaaaccctcaatgactttattttctactgccgcctttttcatgtgcaaccaaaatgaaaatgtttaaattaactgtgttgtacaaatggtacccaacacaaactttttttaaattagtaatacttttgtttaaagttttaagtttgcattttgactttttttgtaaggatgtatgttgtgtgtttaacctttattaactaacgttaaaagctgtgatgtgtgcgtagaatattacgtatgcatgttcatgtctaaagaatggctgttgatgataaaataaaaatcagctttcatttttctaa

SEQ ID NO: 293661 - DNA, 874 bp, Homo sapiens
tcagcactttgggacgagggctggtggatcacttgaggtcaggagttcaagaccagcctggccaacatgatgaaaccctgtctctactaaaaataaaaaatattagccaggcatgcttgcttgaacctgggaggcagaggttgcagtgagccgagatcgtgccactgcactccagcctaggcgacagagcaagactatgtcttaaaaacaaaccaaacaatcaaacaaacaaatgctatttggagttgttattcccaaactgtacctctactatgggaaaattgcttaatccttgctataactcttttacaggagaagaaactgaggcctggaatttgattaactcattcaaggttacccagttggtaagtaacagagctggaatttgaccatggtcatctggctccagagccagcactcttaaccacacttcctatgaggaaaaattaaagtggatggtgatggctacaagatggatttcagttgcatagaaataagaacctcctacctctgttgaaatcagaatacatatacaccccttcattcactctatgaatattcattcattccatgaacctacaaggtttttaggtcaaattattagtttaaataagaactataggctgggcgcagtggctcacacctgtaatcccaacactttgggaggctgaggtgggtggatcacttgaggtcaggagttcaagaccagcctggccaacatggtgaaatcccgtctctactaaaaatacaaaatttactaaaaatactaaaaatacaaaatactcacttgaacccaggaggcggaggttgcagtgagctgagattgcgccgctgcactccagcctgagtgacagagcaagactccgtctcaaaa

SEQ ID NO: 293662 - DNA, 843 bp, Homo sapiens
cgggtcacttgccctccccgctcggagctgccgcctggcttgtcgcggctctgccacaggggcaggtgttgaggggctcccggtccggctgccgccgctcccccgctccggacccggggctccccctagcgccgctgaggagccgcctctgcggctccaggagggcgcaggagcgggactgagagcgcctggaggctcgagcggagggcaatccagcatccagcagatgagaagttgcaagagaaggcatggggtgcagttgttccactagtaggcaaattaaagaaattttacgaattttctcagaggttagaagcagcattaagaggtcttctgggagccttaacaagtaccccatattctcccacccagcatctagagcgagagcaggctcttgctaaacagtttgcagaaattcttcatttcacactccggtttgatgaactcaagatgacaaatcctgccatacagaatgatttcagctattatagaagaacattgagtcgtatgaggattaacaatgtaccggcagaaggagaaaatgaagtaaataatgaattggcaaatcgaatgtctttgttttatgctgaggcaactccaatgctgaaaaccttgagtgatgccacaacaaaatttgtatcagagaataaaaatttaccaatagaaaataccacagattgtttaagcacaatggctagtgtatgcagagtcatgctggaaacaccggaatacagaagcagattaccacctggaggagacgcggtcatctgctgaggtaaggggggtgtctaaactcttgtacccgtgatccggggcgccttggcaacctccaaatgcgattaa

SEQ ID NO: 293663 - DNA, 612 bp, Homo sapiens
cgggtcacttgccctccccgctcggagctgccgcctggcttgtcgcggctctgccacaggggcaggtgttgaggggctcccggtccggctgccgccgctcccccgctccggacccggggctccccctagcgccgctgaggagccgcctctgcggctccaggagggcgcaggagcgggactgagagcgcctggaggctcgagcggagggtgagtgattggtttttgccattttcccctcttccttcacactcctagctttcctgctctgcgaccccattttggcgaagaggcgggtgcggcggggcccgcgctggcgcggggcttcctcctttccaggcgcgctgggcccgcccccggccccgcgacgccccgggcccgcttcctctgtggccccgcggccccggcctgcccccggcgctcattcattcgggtcttcctttcttccgcccccttccttccattggcacctccacgcgcgctctcgccgccccctcccaccccagatcctgcgcccgccagtgactcctggctcgttggctcgtcccttcccgtgtcggcgttgtcccccctccccaatcctggctcccaccactccttcctcttcgcggccgc

SEQ ID NO: 293664 - DNA, 2246 bp, Homo sapiens
gcggggggaggcgcgtcgaggcagcgtcctccttttgtgcgagcgccggcggctcggcttctcgaaggtaaacagcgcttcctcttcctcctcgccgcgcctcttccttttatagttatttctcgcctggcactcgcccgggctgctgctgctgctgctgctgccgccgcggcgggggcagctcgcaaacctgtggcggtgacgtgagccccgccaacccggaaacggcggcggcggcggcaccggaggctccgaggctcctgcgctcccgcgccgcgctcccctcgcccgcccgggccgccaggagaagaaactgaggcctggaatttgattaactcattcaaggttacccagttggtaattcatttgcacacctgttagcaagaaacagaagttgaaggactggaacaagtgaactaggaaagagggaacgccaatccaaggatagaaggacaaggacagaatcaccagcactggctgaaggcctcctgtttcctgcgctttctccttttcctgtgaaatctccgaggagaagaaagaatgatggacagtttatcctttcactgccacaaggcctgtttacttggcagtaccttaacatggggaatcttcttaaagttttgacatgcacagaccttgagcaggggccaaattttttccttgattttgaaaatgcccagcctacagagtctgagaaggaaatttataatcaggtgaatgtagtattaaaagatgcagaaggcatcttggaggacttgcagtcatacagaggagctggccacgaaatacgagaggcaatccagcatccagcagatgagaagttgcaagagaaggcatggggtgcagttgttccactagtaggcaaattaaagaaattttacgaattttctcagaggttagaagcagcattaagaggtcttctgggagccttaacaagtaccccatattctcccacccagcatctagagcgagagcaggctcttgctaaacagtttgcagaaattcttcatttcacactccggtttgatgaactcaagatgacaaatcctgccatacagaatgatttcagctattatagaagaacattgagtcgtatgaggattaacaatgtaccggcagaaggagaaaatgaagtaaataatgaattggcaaatcgaatgtctttgttttatgctgaggcaactccaatgctgaaaaccttgagtgatgccacaacaaaatttgtatcagagaataaaaatttaccaatagaaaataccacagattgtttaagcacaatggctagtgtatgcagagtcatgctggaaacaccggaatacagaagcagatttacaaatgaagagacagtgtcattctgcttgagggtaatggtgggtgtcataatactctatgaccacgtacatccagtgggagcatttgctaaaacttccaaaattgatatgaaaggttgtatcaaagttcttaaggaccaacctcctaatagtgtggaaggtcttctaaatgctctcaggtacacaacaaaacatttgaatgatgagactacctccaagcaaattaaatccatgctgcaataacaattctggaataagcacctgctgtagacagaagacagtattctgcaatgactgagaatgcagttttttagtgattgcaattactatctcatttattcttgcttttatttctttcctctgttcctcttccctcttttttaatcatgttcttaagacttcttttctgtgccaaaatcagtaaagttacactctgaagggatatcatcctttcaaacgggccatctaaggcagctaattatgcattgcattggggtctctactgagaaaaattctgtgacttgaactaaatatttttaaatgtggattttttttgaaactaatatttaatattgcttctcctgcatggcaaaactgcctattctgctatttaaaaaccctcaatgactttattttctactgccgcctttttcatgtgcaaccaaaatgaaaatgtttaaattaactgtgttgtacaaatggtacccaacacaaactttttttaaattagtaatacttttgtttaaagttttaagtttgcattttgactttttttgtaaggatgtatgttgtgtgtttaacctttattaactaacgttaaaagctgtgatgtgtgcgtagaatattacgtatgcatgttcatgtctaaagaatggctgttgatgataaaataaaaatcagctttcatttttctaa

SEQ ID NO: 293665 - DNA, 1903 bp, Homo sapiens
cgggtcacttgccctccccgctcggagctgccgcctggcttgtcgcggctctgccacaggggcaggtgttgaggggctcccggtccggctgccgccgctcccccgctccggacccggggctccccctagcgccgctgaggagccgcctctgcggctccaggagggcgcaggagcgggactgagagcgcctggaggctcgagcggaggatagaaggacaaggacagaatcaccagcactggctgaaggtaccttaacatggggaatcttcttaaagttttgacatgcacagaccttgagcaggggccaaattttttccttgattttgaaaatgcccagcctacagagtctgagaaggaaatttataatcaggtgaatgtagtattaaaagatgcagaaggcatcttggaggacttgcagtcatacagaggagctggccacgaaatacgagaggcaatccagcatccagcagatgagaagttgcaagagaaggcatggggtgcagttgttccactagtaggcaaattaaagaaattttacgaattttctcagaggttagaagcagcattaagaggtcttctgggagccttaacaagtaccccatattctcccacccagcatctagagcgagagcaggctcttgctaaacagtttgcagaaattcttcatttcacactccggtttgatgaactcaagatgacaaatcctgccatacagaatgatttcagctattatagaagaacattgagtcgtatgaggattaacaatgtaccggcagaaggagaaaatgaagtaaataatgaattggcaaatcgaatgtctttgttttatgctgaggcaactccaatgctgaaaaccttgagtgatgccacaacaaaatttgtatcagagaataaaaatttaccaatagaaaataccacagattgtttaagcacaatggctagtgtatgcagagtcatgctggaaacaccggaatacagaagcagatttacaaatgaagagacagtgtcattctgcttgagggtaatggtgggtgtcataatactctatgaccacgtacatccagtgggagcatttgctaaaacttccaaaattgatatgaaaggttgtatcaaagttcttaaggaccaacctcctaatagtgtggaaggtcttctaaatgctctcaggtacacaacaaaacatttgaatgatgagactacctccaagcaaattaaatccatgctgcaataacaattctggaataagcacctgctgtagacagaagacagtattctgcaatgactgagaatgcagttttttagtgattgcaattactatctcatttattcttgcttttatttctttcctctgttcctcttccctcttttttaatcatgttcttaagacttcttttctgtgccaaaatcagtaaagttacactctgaagggatatcatcctttcaaacgggccatctaaggcagctaattatgcattgcattggggtctctactgagaaaaattctgtgacttgaactaaatatttttaaatgtggattttttttgaaactaatatttaatattgcttctcctgcatggcaaaactgcctattctgctatttaaaaaccctcaatgactttattttctactgccgcctttttcatgtgcaaccaaaatgaaaatgtttaaattaactgtgttgtacaaatggtacccaacacaaactttttttaaattagtaatacttttgtttaaagttttaagtttgcattttgactttttttgtaaggatgtatgttgtgtgtttaacctttattaactaacgttaaaagctgtgatgtgtgcgtagaatattacgtatgcatgttcatgtctaaagaatggctgttgatgataaaataaaaatcagctttcatttttctaa

SEQ ID NO: 293666 - DNA, 2053 bp, Homo sapiens
gcggggggaggcgcgtcgaggcagcgtcctccttttgtgcgagcgccggcggctcggcttctcgaaggtaaacagcgcttcctcttcctcctcgccgcgcctcttccttttatagttatttctcgcctggcactcgcccgggctgctgctgctgctgctgctgccgccgcggcgggggcagctcgcaaacctgtggcggtgacgtgagccccgccaacccggaaacggcggcggcggcggcaccggaggctccgaggctcctgcgctcccgcgccgcgctcccctcgcccgcccgggccgccaggagaagaaactgaggcctggaatttgattaactcattcaaggttacccagttgatagaaggacaaggacagaatcaccagcactggctgaaggtaccttaacatggggaatcttcttaaagttttgacatgcacagaccttgagcaggggccaaattttttccttgattttgaaaatgcccagcctacagagtctgagaaggaaatttataatcaggtgaatgtagtattaaaagatgcagaaggcatcttggaggacttgcagtcatacagaggagctggccacgaaatacgagaggcaatccagcatccagcagatgagaagttgcaagagaaggcatggggtgcagttgttccactagtaggcaaattaaagaaattttacgaattttctcagaggttagaagcagcattaagaggtcttctgggagccttaacaagtaccccatattctcccacccagcatctagagcgagagcaggctcttgctaaacagtttgcagaaattcttcatttcacactccggtttgatgaactcaagatgacaaatcctgccatacagaatgatttcagctattatagaagaacattgagtcgtatgaggattaacaatgtaccggcagaaggagaaaatgaagtaaataatgaattggcaaatcgaatgtctttgttttatgctgaggcaactccaatgctgaaaaccttgagtgatgccacaacaaaatttgtatcagagaataaaaatttaccaatagaaaataccacagattgtttaagcacaatggctagtgtatgcagagtcatgctggaaacaccggaatacagaagcagatttacaaatgaagagacagtgtcattctgcttgagggtaatggtgggtgtcataatactctatgaccacgtacatccagtgggagcatttgctaaaacttccaaaattgatatgaaaggttgtatcaaagttcttaaggaccaacctcctaatagtgtggaaggtcttctaaatgctctcaggtacacaacaaaacatttgaatgatgagactacctccaagcaaattaaatccatgctgcaataacaattctggaataagcacctgctgtagacagaagacagtattctgcaatgactgagaatgcagttttttagtgattgcaattactatctcatttattcttgcttttatttctttcctctgttcctcttccctcttttttaatcatgttcttaagacttcttttctgtgccaaaatcagtaaagttacactctgaagggatatcatcctttcaaacgggccatctaaggcagctaattatgcattgcattggggtctctactgagaaaaattctgtgacttgaactaaatatttttaaatgtggattttttttgaaactaatatttaatattgcttctcctgcatggcaaaactgcctattctgctatttaaaaaccctcaatgactttattttctactgccgcctttttcatgtgcaaccaaaatgaaaatgtttaaattaactgtgttgtacaaatggtacccaacacaaactttttttaaattagtaatacttttgtttaaagttttaagtttgcattttgactttttttgtaaggatgtatgttgtgtgtttaacctttattaactaacgttaaaagctgtgatgtgtgcgtagaatattacgtatgcatgttcatgtctaaagaatggctgttgatgataaaataaaaatcagctttcatttttctaa

SEQ ID NO: 293667 - DNA, 1816 bp, Homo sapiens
gcggggggaggcgcgtcgaggcagcgtcctccttttgtgcgagcgccggcggctcggcttctcgaaggagaagaaactgaggcctggaatttgattaactcattcaaggttacccagttgatagaaggacaaggacagaatcaccagcactggctgaaggtaccttaacatggggaatcttcttaaagttttgacatgcacagaccttgagcaggggccaaattttttccttgattttgaaaatgcccagcctacagagtctgagaaggaaatttataatcaggtgaatgtagtattaaaagatgcagaaggcatcttggaggacttgcagtcatacagaggagctggccacgaaatacgagaggcaatccagcatccagcagatgagaagttgcaagagaaggcatggggtgcagttgttccactagtaggcaaattaaagaaattttacgaattttctcagaggttagaagcagcattaagaggtcttctgggagccttaacaagtaccccatattctcccacccagcatctagagcgagagcaggctcttgctaaacagtttgcagaaattcttcatttcacactccggtttgatgaactcaagatgacaaatcctgccatacagaatgatttcagctattatagaagaacattgagtcgtatgaggattaacaatgtaccggcagaaggagaaaatgaagtaaataatgaattggcaaatcgaatgtctttgttttatgctgaggcaactccaatgctgaaaaccttgagtgatgccacaacaaaatttgtatcagagaataaaaatttaccaatagaaaataccacagattgtttaagcacaatggctagtgtatgcagagtcatgctggaaacaccggaatacagaagcagatttacaaatgaagagacagtgtcattctgcttgagggtaatggtgggtgtcataatactctatgaccacgtacatccagtgggagcatttgctaaaacttccaaaattgatatgaaaggttgtatcaaagttcttaaggaccaacctcctaatagtgtggaaggtcttctaaatgctctcaggtacacaacaaaacatttgaatgatgagactacctccaagcaaattaaatccatgctgcaataacaattctggaataagcacctgctgtagacagaagacagtattctgcaatgactgagaatgcagttttttagtgattgcaattactatctcatttattcttgcttttatttctttcctctgttcctcttccctcttttttaatcatgttcttaagacttcttttctgtgccaaaatcagtaaagttacactctgaagggatatcatcctttcaaacgggccatctaaggcagctaattatgcattgcattggggtctctactgagaaaaattctgtgacttgaactaaatatttttaaatgtggattttttttgaaactaatatttaatattgcttctcctgcatggcaaaactgcctattctgctatttaaaaaccctcaatgactttattttctactgccgcctttttcatgtgcaaccaaaatgaaaatgtttaaattaactgtgttgtacaaatggtacccaacacaaactttttttaaattagtaatacttttgtttaaagttttaagtttgcattttgactttttttgtaaggatgtatgttgtgtgtttaacctttattaactaacgttaaaagctgtgatgtgtgcgtagaatattacgtatgcatgttcatgtctaaagaatggctgttgatgataaaataaaaatcagctttcatttttctaa

SEQ ID NO: 293668 - DNA, 2306 bp, Homo sapiens
tggacgacagagcaagaatttatctgaaaaaaaaaaaaaagagatgagtttccttaagacattgcaaagccaacaacccccccggggagccatattaaagcaccaatgggaaatttcgtcagcagtgcttaatcaaaggcattgattgttttctgggccccactggttcctgtcccattattgtccttaattgtggaaacttgttcattagggtttcattaaggctggccctggctgttacccctcctttgctctctttgatctctgcaaacaaacaatcaaacaaacaaatgctatttggagttgttattcccaaactgtacctctactatgggaaaaaaacaatagctaggatttaccgggggctttctgtgtactgagaactgttgtaacttgcttaatccttgctataactcttttacaggagaagaaactgaggcctggaatttgattaactcattcaaggttacccagttgggtggtgaaaacagtaggtattctgaaccaaccttgcacttctcaggtaattcatttgcacacctgttagcaagaaacagaagttgaaggactggaacaagtgaactaggaaagagggaacgccaatccaaggatagaaggacaaggacagaatcaccagcactggctgaaggtaccttaacatggggaatcttcttaaagttttgacatgcacagaccttgagcaggggccaaattttttccttgattttgaaaatgcccagcctacagagtctgagaaggaaatttataatcaggtgaatgtagtattaaaagatgcagaaggcatcttggaggacttgcagtcatacagaggagctggccacgaaatacgagaggcaatccagcatccagcagatgagaagttgcaagagaaggcatggggtgcagttgttccactagtaggcaaattaaagaaattttacgaattttctcagaggttagaagcagcattaagaggtcttctgggagccttaacaagtaccccatattctcccacccagcatctagagcgagagcaggctcttgctaaacagtttgcagaaattcttcatttcacactccggtttgatgaactcaagatgacaaatcctgccatacagaatgatttcagctattatagaagaacattgagtcgtatgaggattaacaatgtaccggcagaaggagaaaatgaagtaaataatgaattggcaaatcgaatgtctttgttttatgctgaggcaactccaatgctgaaaaccttgagtgatgccacaacaaaatttgtatcagagaataaaaatttaccaatagaaaataccacagattgtttaagcacaatggctagtgtatgcagagtcatgctggaaacaccggaatacagaagcagatttacaaatgaagagacagtgtcattctgcttgagggtaatggtgggtgtcataatactctatgaccacgtacatccagtgggagcatttgctaaaacttccaaaattgatatgaaaggttgtatcaaagttcttaaggaccaacctcctaatagtgtggaaggtcttctaaatgctctcaggtacacaacaaaacatttgaatgatgagactacctccaagcaaattaaatccatgctgcaataacaattctggaataagcacctgctgtagacagaagacagtattctgcaatgactgagaatgcagttttttagtgattgcaattactatctcatttattcttgcttttatttctttcctctgttcctcttccctcttttttaatcatgttcttaagacttcttttctgtgccaaaatcagtaaagttacactctgaagggatatcatcctttcaaacgggccatctaaggcagctaattatgcattgcattggggtctctactgagaaaaattctgtgacttgaactaaatatttttaaatgtggattttttttgaaactaatatttaatattgcttctcctgcatggcaaaactgcctattctgctatttaaaaaccctcaatgactttattttctactgccgcctttttcatgtgcaaccaaaatgaaaatgtttaaattaactgtgttgtacaaatggtacccaacacaaactttttttaaattagtaatacttttgtttaaagttttaagtttgcattttgactttttttgtaaggatgtatgttgtgtgtttaacctttattaactaacgttaaaagctgtgatgtgtgcgtagaatattacgtatgcatgttcatgtctaaagaatggctgttgatgataaaataaaaatcagctttcatttttctaa

SEQ ID NO: 293669 - DNA, 2279 bp, Homo sapiens
tggacgacagagcaagaatttatctgaaaaaaaaaaaaaagagatgagtttccttaagacattgcaaagccaacaacccccccggggagccatattaaagcaccaatgggaaatttcgtcagcagtgcttaatcaaaggcattgattgttttctgggccccactggttcctgtcccattattgtccttaattgtggaaacttgttcattagggtttcattaaggctggccctggctgttacccctcctttgctctctttgatctctgcaaacaaacaatcaaacaaacaaatgctatttggagttgttattcccaaactgtacctctactatgggaaaaaaacaatagctaggatttaccgggggctttctgtgtactgagaactgttgtaacttgcttaatccttgctataactcttttacaggagaagaaactgaggcctggaatttgattaactcattcaaggttacccagttgatagaaggacaaggacagaatcaccagcactggctgaaggcctcctgtttcctgcgctttctccttttcctgtgaaatctccgaggagaagaaagaatgatggacagtttatcctttcactgccacaaggcctgtttacttggcagtaccttaacatggggaatcttcttaaagttttgacatgcacagaccttgagcaggggccaaattttttccttgattttgaaaatgcccagcctacagagtctgagaaggaaatttataatcaggtgaatgtagtattaaaagatgcagaaggcatcttggaggacttgcagtcatacagaggagctggccacgaaatacgagaggcaatccagcatccagcagatgagaagttgcaagagaaggcatggggtgcagttgttccactagtaggcaaattaaagaaattttacgaattttctcagaggttagaagcagcattaagaggtcttctgggagccttaacaagtaccccatattctcccacccagcatctagagcgagagcaggctcttgctaaacagtttgcagaaattcttcatttcacactccggtttgatgaactcaagatgacaaatcctgccatacagaatgatttcagctattatagaagaacattgagtcgtatgaggattaacaatgtaccggcagaaggagaaaatgaagtaaataatgaattggcaaatcgaatgtctttgttttatgctgaggcaactccaatgctgaaaaccttgagtgatgccacaacaaaatttgtatcagagaataaaaatttaccaatagaaaataccacagattgtttaagcacaatggctagtgtatgcagagtcatgctggaaacaccggaatacagaagcagatttacaaatgaagagacagtgtcattctgcttgagggtaatggtgggtgtcataatactctatgaccacgtacatccagtgggagcatttgctaaaacttccaaaattgatatgaaaggttgtatcaaagttcttaaggaccaacctcctaatagtgtggaaggtcttctaaatgctctcaggtacacaacaaaacatttgaatgatgagactacctccaagcaaattaaatccatgctgcaataacaattctggaataagcacctgctgtagacagaagacagtattctgcaatgactgagaatgcagttttttagtgattgcaattactatctcatttattcttgcttttatttctttcctctgttcctcttccctcttttttaatcatgttcttaagacttcttttctgtgccaaaatcagtaaagttacactctgaagggatatcatcctttcaaacgggccatctaaggcagctaattatgcattgcattggggtctctactgagaaaaattctgtgacttgaactaaatatttttaaatgtggattttttttgaaactaatatttaatattgcttctcctgcatggcaaaactgcctattctgctatttaaaaaccctcaatgactttattttctactgccgcctttttcatgtgcaaccaaaatgaaaatgtttaaattaactgtgttgtacaaatggtacccaacacaaactttttttaaattagtaatacttttgtttaaagttttaagtttgcattttgactttttttgtaaggatgtatgttgtgtgtttaacctttattaactaacgttaaaagctgtgatgtgtgcgtagaatattacgtatgcatgttcatgtctaaagaatggctgttgatgataaaataaaaatcagctttcatttttctaa

SEQ ID NO: 293670 - DNA, 2443 bp, Homo sapiens
tggacgacagagcaagaatttatctgaaaaaaaaaaaaaagagatgagtttccttaagacattgcaaagccaacaacccccccggggagccatattaaagcaccaatgggaaatttcgtcagcagtgcttaatcaaaggcattgattgttttctgggccccactggttcctgtcccattattgtccttaattgtggaaacttgttcattagggtttcattaaggctggccctggctgttacccctcctttgctctctttgatctctgcaaacaaacaatcaaacaaacaaatgctatttggagttgttattcccaaactgtacctctactatgggaaaaaaacaatagctaggatttaccgggggctttctgtgtactgagaactgttgtaacttgcttaatccttgctataactcttttacaggagaagaaactgaggcctggaatttgattaactcattcaaggttacccagttggtaattcatttgcacacctgttagcaagaaacagaagttgaaggactggaacaagtgaactaggaaagagggaacgccaatccaaggatagaaggacaaggacagaatcaccagcactggctgaaggcctcctgtttcctgcgctttctccttttcctgtgaaatctccgaggagaagaaagaatgatggacagtttatcctttcactgccacaaggcctgtttacttggcagtaggtccttaagttccttgcttttttgctgctgtttggtgactggaagaggcaccagagactctcactctggggaggtaccttaacatggggaatcttcttaaagttttgacatgcacagaccttgagcaggggccaaattttttccttgattttgaaaatgcccagcctacagagtctgagaaggaaatttataatcaggtgaatgtagtattaaaagatgcagaaggcatcttggaggacttgcagtcatacagaggagctggccacgaaatacgagaggcaatccagcatccagcagatgagaagttgcaagagaaggcatggggtgcagttgttccactagtaggcaaattaaagaaattttacgaattttctcagaggttagaagcagcattaagaggtcttctgggagccttaacaagtaccccatattctcccacccagcatctagagcgagagcaggctcttgctaaacagtttgcagaaattcttcatttcacactccggtttgatgaactcaagatgacaaatcctgccatacagaatgatttcagctattatagaagaacattgagtcgtatgaggattaacaatgtaccggcagaaggagaaaatgaagtaaataatgaattggcaaatcgaatgtctttgttttatgctgaggcaactccaatgctgaaaaccttgagtgatgccacaacaaaatttgtatcagagaataaaaatttaccaatagaaaataccacagattgtttaagcacaatggctagtgtatgcagagtcatgctggaaacaccggaatacagaagcagatttacaaatgaagagacagtgtcattctgcttgagggtaatggtgggtgtcataatactctatgaccacgtacatccagtgggagcatttgctaaaacttccaaaattgatatgaaaggttgtatcaaagttcttaaggaccaacctcctaatagtgtggaaggtcttctaaatgctctcaggtacacaacaaaacatttgaatgatgagactacctccaagcaaattaaatccatgctgcaataacaattctggaataagcacctgctgtagacagaagacagtattctgcaatgactgagaatgcagttttttagtgattgcaattactatctcatttattcttgcttttatttctttcctctgttcctcttccctcttttttaatcatgttcttaagacttcttttctgtgccaaaatcagtaaagttacactctgaagggatatcatcctttcaaacgggccatctaaggcagctaattatgcattgcattggggtctctactgagaaaaattctgtgacttgaactaaatatttttaaatgtggattttttttgaaactaatatttaatattgcttctcctgcatggcaaaactgcctattctgctatttaaaaaccctcaatgactttattttctactgccgcctttttcatgtgcaaccaaaatgaaaatgtttaaattaactgtgttgtacaaatggtacccaacacaaactttttttaaattagtaatacttttgtttaaagttttaagtttgcattttgactttttttgtaaggatgtatgttgtgtgtttaacctttattaactaacgttaaaagctgtgatgtgtgcgtagaatattacgtatgcatgttcatgtctaaagaatggctgttgatgataaaataaaaatcagctttcatttttctaa

SEQ ID NO: 293671 - DNA, 1817 bp, Homo sapiens
gtctgctcctccttgttcccatgatgccccagaggagccaaggccaagaggagccaagcccagagcaggagaagaaactgaggcctggaatttgattaactcattcaaggttacccagttgatagaaggacaaggacagaatcaccagcactggctgaaggtaccttaacatggggaatcttcttaaagttttgacatgcacagaccttgagcaggggccaaattttttccttgattttgaaaatgcccagcctacagagtctgagaaggaaatttataatcaggtgaatgtagtattaaaagatgcagaaggcatcttggaggacttgcagtcatacagaggagctggccacgaaatacgagaggcaatccagcatccagcagatgagaagttgcaagagaaggcatggggtgcagttgttccactagtaggcaaattaaagaaattttacgaattttctcagaggttagaagcagcattaagaggtcttctgggagccttaacaagtaccccatattctcccacccagcatctagagcgagagcaggctcttgctaaacagtttgcagaaattcttcatttcacactccggtttgatgaactcaagatgacaaatcctgccatacagaatgatttcagctattatagaagaacattgagtcgtatgaggattaacaatgtaccggcagaaggagaaaatgaagtaaataatgaattggcaaatcgaatgtctttgttttatgctgaggcaactccaatgctgaaaaccttgagtgatgccacaacaaaatttgtatcagagaataaaaatttaccaatagaaaataccacagattgtttaagcacaatggctagtgtatgcagagtcatgctggaaacaccggaatacagaagcagatttacaaatgaagagacagtgtcattctgcttgagggtaatggtgggtgtcataatactctatgaccacgtacatccagtgggagcatttgctaaaacttccaaaattgatatgaaaggttgtatcaaagttcttaaggaccaacctcctaatagtgtggaaggtcttctaaatgctctcaggtacacaacaaaacatttgaatgatgagactacctccaagcaaattaaatccatgctgcaataacaattctggaataagcacctgctgtagacagaagacagtattctgcaatgactgagaatgcagttttttagtgattgcaattactatctcatttattcttgcttttatttctttcctctgttcctcttccctcttttttaatcatgttcttaagacttcttttctgtgccaaaatcagtaaagttacactctgaagggatatcatcctttcaaacgggccatctaaggcagctaattatgcattgcattggggtctctactgagaaaaattctgtgacttgaactaaatatttttaaatgtggattttttttgaaactaatatttaatattgcttctcctgcatggcaaaactgcctattctgctatttaaaaaccctcaatgactttattttctactgccgcctttttcatgtgcaaccaaaatgaaaatgtttaaattaactgtgttgtacaaatggtacccaacacaaactttttttaaattagtaatacttttgtttaaagttttaagtttgcattttgactttttttgtaaggatgtatgttgtgtgtttaacctttattaactaacgttaaaagctgtgatgtgtgcgtagaatattacgtatgcatgttcatgtctaaagaatggctgttgatgataaaataaaaatcagctttcatttttctaa

SEQ ID NO: 293672 - DNA, 2087 bp, Homo sapiens
gcggggggaggcgcgtcgaggcagcgtcctccttttgtgcgagcgccggcggctcggcttctcgaaggtaaacagcgcttcctcttcctcctcgccgcgcctcttccttttatagttatttctcgcctggcactcgcccgggctgctgctgctgctgctgctgccgccgcggcgggggcagctcgcaaacctgtggcggtgacgtgagccccgccaacccggaaacggcggcggcggcggcaccggaggctccgaggctcctgcgctcccgcgccgcgctcccctcgcccgcccgggccgccaggtaattcatttgcacacctgttagcaagaaacagaagttgaaggactggaacaagtgaactaggaaagagggaacgccaatccaaggatagaaggacaaggacagaatcaccagcactggctgaaggtaccttaacatggggaatcttcttaaagttttgacatgcacagaccttgagcaggggccaaattttttccttgattttgaaaatgcccagcctacagagtctgagaaggaaatttataatcaggtgaatgtagtattaaaagatgcagaaggcatcttggaggacttgcagtcatacagaggagctggccacgaaatacgagaggcaatccagcatccagcagatgagaagttgcaagagaaggcatggggtgcagttgttccactagtaggcaaattaaagaaattttacgaattttctcagaggttagaagcagcattaagaggtcttctgggagccttaacaagtaccccatattctcccacccagcatctagagcgagagcaggctcttgctaaacagtttgcagaaattcttcatttcacactccggtttgatgaactcaagatgacaaatcctgccatacagaatgatttcagctattatagaagaacattgagtcgtatgaggattaacaatgtaccggcagaaggagaaaatgaagtaaataatgaattggcaaatcgaatgtctttgttttatgctgaggcaactccaatgctgaaaaccttgagtgatgccacaacaaaatttgtatcagagaataaaaatttaccaatagaaaataccacagattgtttaagcacaatggctagtgtatgcagagtcatgctggaaacaccggaatacagaagcagatttacaaatgaagagacagtgtcattctgcttgagggtaatggtgggtgtcataatactctatgaccacgtacatccagtgggagcatttgctaaaacttccaaaattgatatgaaaggttgtatcaaagttcttaaggaccaacctcctaatagtgtggaaggtcttctaaatgctctcaggtacacaacaaaacatttgaatgatgagactacctccaagcaaattaaatccatgctgcaataacaattctggaataagcacctgctgtagacagaagacagtattctgcaatgactgagaatgcagttttttagtgattgcaattactatctcatttattcttgcttttatttctttcctctgttcctcttccctcttttttaatcatgttcttaagacttcttttctgtgccaaaatcagtaaagttacactctgaagggatatcatcctttcaaacgggccatctaaggcagctaattatgcattgcattggggtctctactgagaaaaattctgtgacttgaactaaatatttttaaatgtggattttttttgaaactaatatttaatattgcttctcctgcatggcaaaactgcctattctgctatttaaaaaccctcaatgactttattttctactgccgcctttttcatgtgcaaccaaaatgaaaatgtttaaattaactgtgttgtacaaatggtacccaacacaaactttttttaaattagtaatacttttgtttaaagttttaagtttgcattttgactttttttgtaaggatgtatgttgtgtgtttaacctttattaactaacgttaaaagctgtgatgtgtgcgtagaatattacgtatgcatgttcatgtctaaagaatggctgttgatgataaaataaaaatcagctttcatttttctaa

SEQ ID NO: 293673 - DNA, 1983 bp, Homo sapiens
cgggtcacttgccctccccgctcggagctgccgcctggcttgtcgcggctctgccacaggggcaggtgttgaggggctcccggtccggctgccgccgctcccccgctccggacccggggctccccctagcgccgctgaggagccgcctctgcggctccaggagggcgcaggagcgggactgagagcgcctggaggctcgagcggaggatagaaggacaaggacagaatcaccagcactggctgaaggtttgctggcatgggtaatctcattaaggtgctaaccagggacatagaccacaatgcagcacattttttcttggactttggtaccttaacatggggaatcttcttaaagttttgacatgcacagaccttgagcaggggccaaattttttccttgattttgaaaatgcccagcctacagagtctgagaaggaaatttataatcaggtgaatgtagtattaaaagatgcagaaggcatcttggaggacttgcagtcatacagaggagctggccacgaaatacgagaggcaatccagcatccagcagatgagaagttgcaagagaaggcatggggtgcagttgttccactagtaggcaaattaaagaaattttacgaattttctcagaggttagaagcagcattaagaggtcttctgggagccttaacaagtaccccatattctcccacccagcatctagagcgagagcaggctcttgctaaacagtttgcagaaattcttcatttcacactccggtttgatgaactcaagatgacaaatcctgccatacagaatgatttcagctattatagaagaacattgagtcgtatgaggattaacaatgtaccggcagaaggagaaaatgaagtaaataatgaattggcaaatcgaatgtctttgttttatgctgaggcaactccaatgctgaaaaccttgagtgatgccacaacaaaatttgtatcagagaataaaaatttaccaatagaaaataccacagattgtttaagcacaatggctagtgtatgcagagtcatgctggaaacaccggaatacagaagcagatttacaaatgaagagacagtgtcattctgcttgagggtaatggtgggtgtcataatactctatgaccacgtacatccagtgggagcatttgctaaaacttccaaaattgatatgaaaggttgtatcaaagttcttaaggaccaacctcctaatagtgtggaaggtcttctaaatgctctcaggtacacaacaaaacatttgaatgatgagactacctccaagcaaattaaatccatgctgcaataacaattctggaataagcacctgctgtagacagaagacagtattctgcaatgactgagaatgcagttttttagtgattgcaattactatctcatttattcttgcttttatttctttcctctgttcctcttccctcttttttaatcatgttcttaagacttcttttctgtgccaaaatcagtaaagttacactctgaagggatatcatcctttcaaacgggccatctaaggcagctaattatgcattgcattggggtctctactgagaaaaattctgtgacttgaactaaatatttttaaatgtggattttttttgaaactaatatttaatattgcttctcctgcatggcaaaactgcctattctgctatttaaaaaccctcaatgactttattttctactgccgcctttttcatgtgcaaccaaaatgaaaatgtttaaattaactgtgttgtacaaatggtacccaacacaaactttttttaaattagtaatacttttgtttaaagttttaagtttgcattttgactttttttgtaaggatgtatgttgtgtgtttaacctttattaactaacgttaaaagctgtgatgtgtgcgtagaatattacgtatgcatgttcatgtctaaagaatggctgttgatgataaaataaaaatcagctttcatttttctaa

SEQ ID NO: 293674 - DNA, 1777 bp, Homo sapiens
gcggggggaggcgcgtcgaggcagcgtcctccttttgtgcgagcgccggcggctcggcttctcgaaggagaagaaactgaggcctggaatttgattaactcattcaaggttacccagttggtaccttaacatggggaatcttcttaaagttttgacatgcacagaccttgagcaggggccaaattttttccttgattttgaaaatgcccagcctacagagtctgagaaggaaatttataatcaggtgaatgtagtattaaaagatgcagaaggcatcttggaggacttgcagtcatacagaggagctggccacgaaatacgagaggcaatccagcatccagcagatgagaagttgcaagagaaggcatggggtgcagttgttccactagtaggcaaattaaagaaattttacgaattttctcagaggttagaagcagcattaagaggtcttctgggagccttaacaagtaccccatattctcccacccagcatctagagcgagagcaggctcttgctaaacagtttgcagaaattcttcatttcacactccggtttgatgaactcaagatgacaaatcctgccatacagaatgatttcagctattatagaagaacattgagtcgtatgaggattaacaatgtaccggcagaaggagaaaatgaagtaaataatgaattggcaaatcgaatgtctttgttttatgctgaggcaactccaatgctgaaaaccttgagtgatgccacaacaaaatttgtatcagagaataaaaatttaccaatagaaaataccacagattgtttaagcacaatggctagtgtatgcagagtcatgctggaaacaccggaatacagaagcagatttacaaatgaagagacagtgtcattctgcttgagggtaatggtgggtgtcataatactctatgaccacgtacatccagtgggagcatttgctaaaacttccaaaattgatatgaaaggttgtatcaaagttcttaaggaccaacctcctaatagtgtggaaggtcttctaaatgctctcaggtacacaacaaaacatttgaatgatgagactacctccaagcaaattaaatccatgctgcaataacaattctggaataagcacctgctgtagacagaagacagtattctgcaatgactgagaatgcagttttttagtgattgcaattactatctcatttattcttgcttttatttctttcctctgttcctcttccctcttttttaatcatgttcttaagacttcttttctgtgccaaaatcagtaaagttacactctgaagggatatcatcctttcaaacgggccatctaaggcagctaattatgcattgcattggggtctctactgagaaaaattctgtgacttgaactaaatatttttaaatgtggattttttttgaaactaatatttaatattgcttctcctgcatggcaaaactgcctattctgctatttaaaaaccctcaatgactttattttctactgccgcctttttcatgtgcaaccaaaatgaaaatgtttaaattaactgtgttgtacaaatggtacccaacacaaactttttttaaattagtaatacttttgtttaaagttttaagtttgcattttgactttttttgtaaggatgtatgttgtgtgtttaacctttattaactaacgttaaaagctgtgatgtgtgcgtagaatattacgtatgcatgttcatgtctaaagaatggctgttgatgataaaataaaaatcagctttcatttttctaa

SEQ ID NO: 293675 - DNA, 2253 bp, Homo sapiens
cgggtcacttgccctccccgctcggagctgccgcctggcttgtcgcggctctgccacaggggcaggtgttgaggggctcccggtccggctgccgccgctcccccgctccggacccggggctccccctagcgccgctgaggagccgcctctgcggctccaggagggcgcaggagcgggactgagagcgcctggaggctcgagcggagggtaattcatttgcacacctgttagcaagaaacagaagttgaaggactggaacaagtgaactaggaaagagggaacgccaatccaaggatagaaggacaaggacagaatcaccagcactggctgaaggcctcctgtttcctgcgctttctccttttcctgtgaaatctccgaggagaagaaagaatgatggacagtttatcctttcactgccacaaggcctgtttacttggcagtaggtccttaagttccttgcttttttgctgctgtttggtgactggaagaggcaccagagactctcactctggggaggtttgctggcatgggtaatctcattaaggtgctaaccagggacatagaccacaatgcagcacattttttcttggactttggtaccttaacatggggaatcttcttaaagttttgacatgcacagaccttgagcaggggccaaattttttccttgattttgaaaatgcccagcctacagagtctgagaaggaaatttataatcaggtgaatgtagtattaaaagatgcagaaggcatcttggaggacttgcagtcatacagaggagctggccacgaaatacgagaggcaatccagcatccagcagatgagaagttgcaagagaaggcatggggtgcagttgttccactagtaggcaaattaaagaaattttacgaattttctcagaggttagaagcagcattaagaggtcttctgggagccttaacaagtaccccatattctcccacccagcatctagagcgagagcaggctcttgctaaacagtttgcagaaattcttcatttcacactccggtttgatgaactcaagatgacaaatcctgccatacagaatgatttcagctattatagaagaacattgagtcgtatgaggattaacaatgtaccggcagaaggagaaaatgaagtaaataatgaattggcaaatcgaatgtctttgttttatgctgaggcaactccaatgctgaaaaccttgagtgatgccacaacaaaatttgtatcagagaataaaaatttaccaatagaaaataccacagattgtttaagcacaatggctagtgtatgcagagtcatgctggaaacaccggaatacagaagcagatttacaaatgaagagacagtgtcattctgcttgagggtaatggtgggtgtcataatactctatgaccacgtacatccagtgggagcatttgctaaaacttccaaaattgatatgaaaggttgtatcaaagttcttaaggaccaacctcctaatagtgtggaaggtcttctaaatgctctcaggtacacaacaaaacatttgaatgatgagactacctccaagcaaattaaatccatgctgcaataacaattctggaataagcacctgctgtagacagaagacagtattctgcaatgactgagaatgcagttttttagtgattgcaattactatctcatttattcttgcttttatttctttcctctgttcctcttccctcttttttaatcatgttcttaagacttcttttctgtgccaaaatcagtaaagttacactctgaagggatatcatcctttcaaacgggccatctaaggcagctaattatgcattgcattggggtctctactgagaaaaattctgtgacttgaactaaatatttttaaatgtggattttttttgaaactaatatttaatattgcttctcctgcatggcaaaactgcctattctgctatttaaaaaccctcaatgactttattttctactgccgcctttttcatgtgcaaccaaaatgaaaatgtttaaattaactgtgttgtacaaatggtacccaacacaaactttttttaaattagtaatacttttgtttaaagttttaagtttgcattttgactttttttgtaaggatgtatgttgtgtgtttaacctttattaactaacgttaaaagctgtgatgtgtgcgtagaatattacgtatgcatgttcatgtctaaagaatggctgttgatgataaaataaaaatcagctttcatttttctaa

SEQ ID NO: 293676 - DNA, 1820 bp, Homo sapiens
cgggtcacttgccctccccgctcggagctgccgcctggcttgtcgcggctctgccacaggggcaggtgttgaggggctcccggtccggctgccgccgctcccccgctccggacccggggctccccctagcgccgctgaggagccgcctctgcggctccaggagggcgcaggagcgggactgagagcgcctggaggctcgagcggaggatagaaggacaaggacagaatcaccagcactggctgaagatgcccagcctacagagtctgagaaggaaatttataatcaggtgaatgtagtattaaaagatgcagaaggcatcttggaggacttgcagtcatacagaggagctggccacgaaatacgagaggcaatccagcatccagcagatgagaagttgcaagagaaggcatggggtgcagttgttccactagtaggcaaattaaagaaattttacgaattttctcagaggttagaagcagcattaagaggtcttctgggagccttaacaagtaccccatattctcccacccagcatctagagcgagagcaggctcttgctaaacagtttgcagaaattcttcatttcacactccggtttgatgaactcaagatgacaaatcctgccatacagaatgatttcagctattatagaagaacattgagtcgtatgaggattaacaatgtaccggcagaaggagaaaatgaagtaaataatgaattggcaaatcgaatgtctttgttttatgctgaggcaactccaatgctgaaaaccttgagtgatgccacaacaaaatttgtatcagagaataaaaatttaccaatagaaaataccacagattgtttaagcacaatggctagtgtatgcagagtcatgctggaaacaccggaatacagaagcagatttacaaatgaagagacagtgtcattctgcttgagggtaatggtgggtgtcataatactctatgaccacgtacatccagtgggagcatttgctaaaacttccaaaattgatatgaaaggttgtatcaaagttcttaaggaccaacctcctaatagtgtggaaggtcttctaaatgctctcaggtacacaacaaaacatttgaatgatgagactacctccaagcaaattaaatccatgctgcaataacaattctggaataagcacctgctgtagacagaagacagtattctgcaatgactgagaatgcagttttttagtgattgcaattactatctcatttattcttgcttttatttctttcctctgttcctcttccctcttttttaatcatgttcttaagacttcttttctgtgccaaaatcagtaaagttacactctgaagggatatcatcctttcaaacgggccatctaaggcagctaattatgcattgcattggggtctctactgagaaaaattctgtgacttgaactaaatatttttaaatgtggattttttttgaaactaatatttaatattgcttctcctgcatggcaaaactgcctattctgctatttaaaaaccctcaatgactttattttctactgccgcctttttcatgtgcaaccaaaatgaaaatgtttaaattaactgtgttgtacaaatggtacccaacacaaactttttttaaattagtaatacttttgtttaaagttttaagtttgcattttgactttttttgtaaggatgtatgttgtgtgtttaacctttattaactaacgttaaaagctgtgatgtgtgcgtagaatattacgtatgcatgttcatgtctaaagaatggctgttgatgataaaataaaaatcagctttcatttttctaa

SEQ ID NO: 293677 - DNA, 1970 bp, Homo sapiens
gcggggggaggcgcgtcgaggcagcgtcctccttttgtgcgagcgccggcggctcggcttctcgaaggtaaacagcgcttcctcttcctcctcgccgcgcctcttccttttatagttatttctcgcctggcactcgcccgggctgctgctgctgctgctgctgccgccgcggcgggggcagctcgcaaacctgtggcggtgacgtgagccccgccaacccggaaacggcggcggcggcggcaccggaggctccgaggctcctgcgctcccgcgccgcgctcccctcgcccgcccgggccgccaggagaagaaactgaggcctggaatttgattaactcattcaaggttacccagttgatagaaggacaaggacagaatcaccagcactggctgaagatgcccagcctacagagtctgagaaggaaatttataatcaggtgaatgtagtattaaaagatgcagaaggcatcttggaggacttgcagtcatacagaggagctggccacgaaatacgagaggcaatccagcatccagcagatgagaagttgcaagagaaggcatggggtgcagttgttccactagtaggcaaattaaagaaattttacgaattttctcagaggttagaagcagcattaagaggtcttctgggagccttaacaagtaccccatattctcccacccagcatctagagcgagagcaggctcttgctaaacagtttgcagaaattcttcatttcacactccggtttgatgaactcaagatgacaaatcctgccatacagaatgatttcagctattatagaagaacattgagtcgtatgaggattaacaatgtaccggcagaaggagaaaatgaagtaaataatgaattggcaaatcgaatgtctttgttttatgctgaggcaactccaatgctgaaaaccttgagtgatgccacaacaaaatttgtatcagagaataaaaatttaccaatagaaaataccacagattgtttaagcacaatggctagtgtatgcagagtcatgctggaaacaccggaatacagaagcagatttacaaatgaagagacagtgtcattctgcttgagggtaatggtgggtgtcataatactctatgaccacgtacatccagtgggagcatttgctaaaacttccaaaattgatatgaaaggttgtatcaaagttcttaaggaccaacctcctaatagtgtggaaggtcttctaaatgctctcaggtacacaacaaaacatttgaatgatgagactacctccaagcaaattaaatccatgctgcaataacaattctggaataagcacctgctgtagacagaagacagtattctgcaatgactgagaatgcagttttttagtgattgcaattactatctcatttattcttgcttttatttctttcctctgttcctcttccctcttttttaatcatgttcttaagacttcttttctgtgccaaaatcagtaaagttacactctgaagggatatcatcctttcaaacgggccatctaaggcagctaattatgcattgcattggggtctctactgagaaaaattctgtgacttgaactaaatatttttaaatgtggattttttttgaaactaatatttaatattgcttctcctgcatggcaaaactgcctattctgctatttaaaaaccctcaatgactttattttctactgccgcctttttcatgtgcaaccaaaatgaaaatgtttaaattaactgtgttgtacaaatggtacccaacacaaactttttttaaattagtaatacttttgtttaaagttttaagtttgcattttgactttttttgtaaggatgtatgttgtgtgtttaacctttattaactaacgttaaaagctgtgatgtgtgcgtagaatattacgtatgcatgttcatgtctaaagaatggctgttgatgataaaataaaaatcagctttcatttttctaa

SEQ ID NO: 293678 - DNA, 1907 bp, Homo sapiens
cgggtcacttgccctccccgctcggagctgccgcctggcttgtcgcggctctgccacaggggcaggtgttgaggggctcccggtccggctgccgccgctcccccgctccggacccggggctccccctagcgccgctgaggagccgcctctgcggctccaggagggcgcaggagcgggactgagagcgcctggaggctcgagcggagggtaattcatttgcacacctgttagcaagaaacagaagttgaaggactggaacaagtgaactaggaaagagggaacgccaatccaaggatagaaggacaaggacagaatcaccagcactggctgaagatgcccagcctacagagtctgagaaggaaatttataatcaggtgaatgtagtattaaaagatgcagaaggcatcttggaggacttgcagtcatacagaggagctggccacgaaatacgagaggcaatccagcatccagcagatgagaagttgcaagagaaggcatggggtgcagttgttccactagtaggcaaattaaagaaattttacgaattttctcagaggttagaagcagcattaagaggtcttctgggagccttaacaagtaccccatattctcccacccagcatctagagcgagagcaggctcttgctaaacagtttgcagaaattcttcatttcacactccggtttgatgaactcaagatgacaaatcctgccatacagaatgatttcagctattatagaagaacattgagtcgtatgaggattaacaatgtaccggcagaaggagaaaatgaagtaaataatgaattggcaaatcgaatgtctttgttttatgctgaggcaactccaatgctgaaaaccttgagtgatgccacaacaaaatttgtatcagagaataaaaatttaccaatagaaaataccacagattgtttaagcacaatggctagtgtatgcagagtcatgctggaaacaccggaatacagaagcagatttacaaatgaagagacagtgtcattctgcttgagggtaatggtgggtgtcataatactctatgaccacgtacatccagtgggagcatttgctaaaacttccaaaattgatatgaaaggttgtatcaaagttcttaaggaccaacctcctaatagtgtggaaggtcttctaaatgctctcaggtacacaacaaaacatttgaatgatgagactacctccaagcaaattaaatccatgctgcaataacaattctggaataagcacctgctgtagacagaagacagtattctgcaatgactgagaatgcagttttttagtgattgcaattactatctcatttattcttgcttttatttctttcctctgttcctcttccctcttttttaatcatgttcttaagacttcttttctgtgccaaaatcagtaaagttacactctgaagggatatcatcctttcaaacgggccatctaaggcagctaattatgcattgcattggggtctctactgagaaaaattctgtgacttgaactaaatatttttaaatgtggattttttttgaaactaatatttaatattgcttctcctgcatggcaaaactgcctattctgctatttaaaaaccctcaatgactttattttctactgccgcctttttcatgtgcaaccaaaatgaaaatgtttaaattaactgtgttgtacaaatggtacccaacacaaactttttttaaattagtaatacttttgtttaaagttttaagtttgcattttgactttttttgtaaggatgtatgttgtgtgtttaacctttattaactaacgttaaaagctgtgatgtgtgcgtagaatattacgtatgcatgttcatgtctaaagaatggctgttgatgataaaataaaaatcagctttcatttttctaa

SEQ ID NO: 293679 - DNA, 2537 bp, Homo sapiens
cgggtcacttgccctccccgctcggagctgccgcctggcttgtcgcggctctgccacaggggcaggtgttgaggggctcccggtccggctgccgccgctcccccgctccggacccggggctccccctagcgccgctgaggagccgcctctgcggctccaggagggcgcaggagcgggactgagagcgcctggaggctcgagcggaggatagaaggacaaggacagaatcaccagcactggctgaaggtaccttaacatggggaatcttcttaaagttttgacatgcacagaccttgagcaggggccaaattttttccttgattttgaaaatgcccagcctacagagtctgagaaggaaatttataatcaggtgaatgtagtattaaaagatgcagaaggcatcttggaggacttgcagtcatacagaggagctggccacgaaatacgagaggcaatccagcatccagcagatgagaagttgcaagagaaggcatggggtgcagttgttccactagtaggcaaattaaagaaattttacgaattttctcagaggttagaagcagcattaagaggtcttctgggagccttaacaagtaccccatattctcccacccagcatctagagcgagagcaggctcttgctaaacagtttgcagaaattcttcatttcacactccggtttgatgaactcaagatgacaaatcctgccatacagaatgatttcagctattatagaagaacattgagtcgtatgaggattaacaatgtaccggcagaaggagaaaatgaagtaaataatgaattggcaaatcgaatgtctttgttttatgctgaggcaactccaatgctgaaaaccttgagtgatgccacaacaaaatttgtatcagagaataaaaatttaccaatagaaaataccacagattgtttaagcacaatggctagtgtatgcagagtcatgctggaaacaccggaatacagaagcagatttacaaatgaagagacagtgtcattctgcttgagggtaatggtgggtgtcataatactctatgaccacgtacatccagtgggagcatttgctaaaacttccaaaattgatatgaaaggttgtatcaaagttcttaaggaccaacctcctaatagtgtggaaggtcttctaaatgctctcaggtacacaacaaaacatttgaatgatgagactacctccaagcaaattaaatccatgctgcaataacaattctggaataagcacctgctgtagacagaagacagtattctgcaatgactgagaatgcagttttttagtgattgcaattactatctcatttattcttgcttttatttctttcctctgttcctcttccctcttttttaatcatgttcttaagacttcttttctgtgccaaaatcagtaaagttacactctgaagggatatcatcctttcaaacgggccatctaaggcagctaattatgcattgcattggggtctctactgagaaaaattctgtgacttgaactaaatatttttaaatgtggattttttttgaaactaatatttaatattgcttctcctgcatggcaaaactgcctattctgctatttaaaaaccctcaatgactttattttctactgccgcctttttcatgtgcaaccaaaatgaaaatgtttaaattaactgtgttgtacaaatggtacccaacacaaactttttttaaattagtaatacttttgtttaaagttttaagtttgcattttgactttttttgtaaggatgtatgttgtgtgtttaacctttattaactaacgttaaaagctgtgatgtgtgcgtagaatattacgtatgcatgttcatgtctaaagaatggctgttgatgataaaataaaaatcagctttcatttttctaaaaaaaaaaacaaaacaaaaaaaaaaaaaacaaaaaaaaaaaaacaaaaaaaaaaaaaaaaaaaaaaaaaaaaaaaaaaaaaaaaaaacaaaaacccaacaaaacagggggggcagaaaacaagcacacagggagcagctcaagcaacatgcgcacacagagtaaaggacaacgagcggaagagagcactcagccaagaagcaaggaacgcgaacacaccgcacgaaacgacagcacgacgagagtagacaacatagaccaaggcagaagcaaaaagaagaaacacaacgacacgagaacagaggaacaagaaaacagcaacaactatcaccctatagggtgtagagtgacaatagccaacagagagaagagaaaagacaaacgcaacggggaagcacgaaaccacgcacggccacggcaagagcgcgcagacgcacaagacgacaaggacaaaaccgagcagagagagctggagaagataggtgaagcaaaaacaaacgagagtacagttaacacagggcagcaggcagaagaggaagacggccagcagcggcacacggaaacataaaaacatgagaaaagaaaaaagacaaaagtgagaagtaacgggaggggccggacagagaggagaagga

SEQ ID NO: 293680 - DNA, 2005 bp, Homo sapiens
cgggtcacttgccctccccgctcggagctgccgcctggcttgtcgcggctctgccacaggggcaggtgttgaggggctcccggtccggctgccgccgctcccccgctccggacccggggctccccctagcgccgctgaggagccgcctctgcggctccaggagggcgcaggagcgggactgagagcgcctggaggctcgagcggaggatagaaggacaaggacagaatcaccagcactggctgaaggtaccttaacatggggaatcttcttaaagttttgacatgcacagaccttgagcaggggccaaattttttccttgattttgaaaatgcccagcctacagagtctgagaaggaaatttataatcaggtgaatgtagtattaaaagatgcagaaggcatcttggaggacttgcagtcatacagaggagctggccacgaaatacgagaggcaatccagcatccagcagatgagaagttgcaagagaaggcatggggtgcagttgttccactagtaggcaaattaaagaaattttacgaattttctcagaggttagaagcagcattaagaggtcttctgggagccttaacaagtaccccatattctcccacccagcatctagagcgagagcaggctcttgctaaacagtttgcagaaattcttcatttcacactccggtttgatgaactcaagatgacaaatcctgccatacagaatgatttcagctattatagaagaacattgagtcgtatgaggattaacaatgtaccggcagaaggagaaaatgaagtaaataatgaattggcaaatcgaatgtctttgttttatgctgaggcaactccaatgctgaaaaccttgagtgatgccacaacaaaatttgtatcagagaataaaaatttaccaatagaaaataccacagattgtttaagcacaatggctagtgtatgcagagtcatgctggaaacaccggaatacagaagcagatttacaaatgaagagacagtgtcattctgcttgagggtaatggtgggtgtcataatactctatgaccacgtacatccagtgggagcatttgctaaaacttccaaaattgatatgaaaggttgtatcaaagttcttaaggaccaacctcctaatagtgtggaaggtcttctaaatgctctcaggtacacaacaaaacatttgaatgatgagactacctccaagcaaattaaatccatgctgcaataacaattctggaataagcacctgctgtagacagaagacagtattctgcaatgactgagaatgcagttttttagtgattgcaattactatctcatttattcttgcttttatttctttcctctgttcctcttccctcttttttaatcatgttcttaagacttcttttctgtgccaaaatcagtaaagttacactctgaagggatatcatcctttcaaacgggccatctaaggcagctaattatgcattgcattggggtctctactgagaaaaattctgtgacttgaactaaatatttttaaatgtggattttttttgaaactaatatttaatattgcttctcctgcatggcaaaactgcctattctgctatttaaaaaccctcaatgactttattttctactgccgcctttttcatgtgcaaccaaaatgaaaatgtttaaattaactgtgttgtacaaatggtacccaacacaaactttttttaaattagtaatacttttgtttaaagttttaagtttgcattttgactttttttgtaaggatgtatgttgtgtgtttaacctttattaactaacgttaaaagctgtgatgtgtgcgtagaatattacgtatgcatgttcatgtctaaagaatggctgttgatgataaaataaaaatcagctttcatttttctaaaaaagtcaaaatgcaaacttaaaactttaaacaaaagtattactaatttaaaaaaagtttgtgttgggtaccgtcgacgcggccgcgaatttagtagtagta

SEQ ID NO: 293681 - DNA, 1922 bp, Homo sapiens
cgggtcacttgccctccccgctcggagctgccgcctggcttgtcgcggctctgccacaggggcaggtgttgaggggctcccggtccggctgccgccgctcccccgctccggacccggggctccccctagcgccgctgaggagccgcctctgcggctccaggagggcgcaggagcgggactgagagcgcctggaggctcgagcggaggatagaaggacaaggacagaatcaccagcactggctgaaggtaccttaacatggggaatcttcttaaagttttgacatgcacagaccttgagcaggggccaaattttttccttgattttgaaaatgcccagcctacagagtctgagaaggaaatttataatcaggtgaatgtagtattaaaagatgcagaaggcatcttggaggacttgcagtcatacagaggagctggccacgaaatacgagaggcaatccagcatccagcagatgagaagttgcaagagaaggcatggggtgcagttgttccactagtaggcaaattaaagaaattttacgaattttctcagaggttagaagcagcattaagaggtcttctgggagccttaacaagtaccccatattctcccacccagcatctagagcgagagcaggctcttgctaaacagtttgcagaaattcttcatttcacactccggtttgatgaactcaagatgacaaatcctgccatacagaatgatttcagctattatagaagaacattgagtcgtatgaggattaacaatgtaccggcagaaggagaaaatgaagtaaataatgaattggcaaatcgaatgtctttgttttatgctgaggcaactccaatgctgaaaaccttgagtgatgccacaacaaaatttgtatcagagaataaaaatttaccaatagaaaataccacagattgtttaagcacaatggctagtgtatgcagagtcatgctggaaacaccggaatacagaagcagatttacaaatgaagagacagtgtcattctgcttgagggtaatggtgggtgtcataatactctatgaccacgtacatccagtgggagcatttgctaaaacttccaaaattgatatgaaaggttgtatcaaagttcttaaggaccaacctcctaatagtgtggaaggtcttctaaatgctctcaggtacacaacaaaacatttgaatgatgagactacctccaagcaaattaaatccatgctgcaataacaattctggaataagcacctgctgtagacagaagacagtattctgcaatgactgagaatgcagttttttagtgattgcaattactatctcatttattcttgcttttatttctttcctctgttcctcttccctcttttttaatcatgttcttaagacttcttttctgtgccaaaatcagtaaagttacactctgaagggatatcatcctttcaaacgggccatctaaggcagctaattatgcattgcattggggtctctactgagaaaaattctgtgacttgaactaaatatttttaaatgtggattttttttgaaactaatatttaatattgcttctcctgcatggcaaaactgcctattctgctatttaaaaaccctcaatgactttattttctactgccgcctttttcatgtgcaaccaaaatgaaaatgtttaaattaactgtgttgtacaaatggtacccaacacaaactttttttaaattagtaatacttttgtttaaagttttaagtttgcattttgactttttttgtaaggatgtatgttgtgtgtttaacctttattaactaacgttaaaagctgtgatgtgtgcgtagaatattacgtatgcatgttcatgtctaaatgcaatcatgattgcatttagacctagtatggtctatatcgggatcgcgacttgttcttttcgtg

SEQ ID NO: 293682 - DNA, 1847 bp, Homo sapiens
cgggtcacttgccctccccgctcggagctgccgcctggcttgtcgcggctctgccacaggggcaggtgttgaggggctcccggtccggctgccgccgctcccccgctccggacccggggctccccctagcgccgctgaggagccgcctctgcggctccaggagggcgcaggagcgggactgagagcgcctggaggctcgagcggaggatagaaggacaaggacagaatcaccagcactggctgaaggtaccttaacatggggaatcttcttaaagttttgacatgcacagaccttgagcaggggccaaattttttccttgattttgaaaatgcccagcctacagagtctgagaaggaaatttataatcaggtgaatgtagtattaaaagatgcagaaggcatcttggaggacttgcagtcatacagaggagctggccacgaaatacgagaggcaatccagcatccagcagatgagaagttgcaagagaaggcatggggtgcagttgttccactagtaggcaaattaaagaaattttacgaattttctcagaggttagaagcagcattaagaggtcttctgggagccttaacaagtaccccatattctcccacccagcatctagagcgagagcaggctcttgctaaacagtttgcagaaattcttcatttcacactccggtttgatgaactcaagatgacaaatcctgccatacagaatgatttcagctattatagaagaacattgagtcgtatgaggattaacaatgtaccggcagaaggagaaaatgaagtaaataatgaattggcaaatcgaatgtctttgttttatgctgaggcaactccaatgctgaaaaccttgagtgatgccacaacaaaatttgtatcagagaataaaaatttaccaatagaaaataccacagattgtttaagcacaatggctagtgtatgcagagtcatgctggaaacaccggaatacagaagcagatttacaaatgaagagacagtgtcattctgcttgagggtaatggtgggtgtcataatactctatgaccacgtacatccagtgggagcatttgctaaaacttccaaaattgatatgaaaggttgtatcaaagttcttaaggaccaacctcctaatagtgtggaaggtcttctaaatgctctcagtgcaataacaattctggaataagcacctgctgtagacagaagacagtattctgcaatgactgagaatgcagttttttagtgattgcaattactatctcatttattcttgcttttatttctttcctctgttcctcttccctcttttttaatcatgttcttaagacttcttttctgtgccaaaatcagtaaagttacactctgaagggatatcatcctttcaaacgggccatctaaggcagctaattatgcattgcattggggtctctactgagaaaaattctgtgacttgaactaaatatttttaaatgtggattttttttgaaactaatatttaatattgcttctcctgcatggcaaaactgcctattctgctatttaaaaaccctcaatgactttattttctactgccgcctttttcatgtgcaaccaaaatgaaaatgtttaaattaactgtgttgtacaaatggtacccaacacaaactttttttaaattagtaatacttttgtttaaagttttaagtttgcattttgactttttttgtaaggatgtatgttgtgtgtttaacctttattaactaacgttaaaagctgtgatgtgtgcgtagaatattacgtatgcatgttcatgtctaaagaatggctgttgatgataaaataaaaatcagctttcatttttctaa

SEQ ID NO: 293683 - DNA, 1859 bp, Homo sapiens
cgggtcacttgccctccccgctcggagctgccgcctggcttgtcgcggctctgccacaggggcaggtgttgaggggctcccggtccggctgccgccgctcccccgctccggacccggggctccccctagcgccgctgaggagccgcctctgcggctccaggagggcgcaggagcgggactgagagcgcctggaggctcgagcggaggatagaaggacaaggacagaatcaccagcactggctgaaggtaccttaacatggggaatcttcttaaagttttgacatgcacagaccttgagcaggggccaaattttttccttgattttgaaaatgcccagcctacagagtctgagaaggaaatttataatcaggtgaatgtagtattaaaagatgcagaaggcatcttggaggacttgcagtcatacagaggagctggccacgaaatacgagaggcaatccagcatccagcagatgagaagttgcaagagaaggcatggggtgcagttgttccactagtaggcaaattaaagaaattttacgaattttctcagaggttagaagcagcattaagaggtcttctgggagccttaacaagtaccccatattctcccacccagcatctagagcgagagcaggctcttgctaaacagtttgcagaaattcttcatttcacactccggtttgatgaactcaagatgacaaatcctgccatacagaatgatttcagctattatagaagaacattgagtcgtatgaggattaacaatgtaccggcagaaggagaaaatgaagtaaataatgaattggcaaatcgaatgtctttgttttatgctgaggcaactccaatgctgaaaaccttgagtgatgccacaacaaaatttgtatcagagaataaaaatttaccaatagaaaataccacagattgtttaagcacaatggctagtgtatgcagagtcatgctggaaacaccggaatacagaagcagatttacaaatgaagagacagtgtcattctgcttgagggtaatggtgggtgtcataatactctatgaccacgtacatccagtgggagcatttgctaaaacttccaaaattgattgtggaaggtcttctaaatgctctcaggtacacaacaaaacatttgaatgatgagactacctccaagcaaattaaatccatgctgcaataacaattctggaataagcacctgctgtagacagaagacagtattctgcaatgactgagaatgcagttttttagtgattgcaattactatctcatttattcttgcttttatttctttcctctgttcctcttccctcttttttaatcatgttcttaagacttcttttctgtgccaaaatcagtaaagttacactctgaagggatatcatcctttcaaacgggccatctaaggcagctaattatgcattgcattggggtctctactgagaaaaattctgtgacttgaactaaatatttttaaatgtggattttttttgaaactaatatttaatattgcttctcctgcatggcaaaactgcctattctgctatttaaaaaccctcaatgactttattttctactgccgcctttttcatgtgcaaccaaaatgaaaatgtttaaattaactgtgttgtacaaatggtacccaacacaaactttttttaaattagtaatacttttgtttaaagttttaagtttgcattttgactttttttgtaaggatgtatgttgtgtgtttaacctttattaactaacgttaaaagctgtgatgtgtgcgtagaatattacgtatgcatgttcatgtctaaagaatggctgttgatgataaaataaaaatcagctttcatttttctaa

SEQ ID NO: 293684 - DNA, 1947 bp, Homo sapiens
cgggtcacttgccctccccgctcggagctgccgcctggcttgtcgcggctctgccacaggggcaggtgttgaggggctcccggtccggctgccgccgctcccccgctccggacccggggctccccctagcgccgctgaggagccgcctctgcggctccaggagggcgcaggagcgggactgagagcgcctggaggctcgagcggaggatagaaggacaaggacagaatcaccagcactggctgaaggtaccttaacatggggaatcttcttaaagttttgacatgcacagaccttgagcaggggccaaattttttccttgattttgaaaatgcccagcctacagagtctgagaaggaaatttataatcaggtgaatgtagtattaaaagatgcagaaggcatcttggaggacttgcagtcatacagaggagctggccacgaaatacgagaggcaatccagcatccagcagatgagaagttgcaagagaaggcatggggtgcagttgttccactagtaggcaaattaaagaaattttacgaattttctcagaggttagaagcagcattaagaggtcttctgggagccttaacaagtaccccatattctcccacccagcatctagagcgagagcaggctcttgctaaacagtttgcagaaattcttcatttcacactccggtttgatgaactcaagatgacaaatcctgccatacagaatgatttcagctattatagaagaacattgagtcgtatgaggattaacaatgtaccggcagaaggagaaaatgaagtaaataatgaattggcaaatcgaatgtctttgttttatgctgaggcaactccaatgctgaaaaccttgagtgatgccacaacaaaatttgtatcagagaataaaaatttaccaatagaaaataccacagattgtttaagcacaatggctagtgtatgcagagtcatgctggaaacaccggaatacagaagcagatttacaaatgaagagacagtgtcattctgcttgagggtaatggtgggtgtcataatactctatgaccacgtacatccagtgggagcatttgctaaaacttccaaaattgatatgaaaggttgtatcaaagttcttaaggaccaacctcctaatagtgtggaaggtcttctaaatgctctcaggtacacaacaaaacatttgaatgatgagactacctccaagcaaattaaatccatgctgcaataacaattctggaataagcacctgctgtagacagaagacagtattctgcaatgactgagaatgcagttttttagtgattgcaattactatctcatttattcttgcttttatttctttcctctgttcctcttccctcttttttaatcatgttcttaagacttcttttctgtgccaaaatcagtaaagttacactctgaagggatatcatcctttcaaacgggccatctaaggcagctaattatgcattgcattggggtgaaactaatatttaatattgcttctcctgcatggcaaaactgcctattctgctatttaaaaaccctcaatgactttattttctactgccgcctttttcatgtgcaaccaaaatgaaaatgtttaaattaactgtgttgtacaaatggtacccaacacaaactttttttaaattagtaatacttttgtttaaagttttaagtttgcattttgactttttttgtaaggatgtatgttgtgtgtttaacctttattaactaacgttaaaagctgtgatgtgtgcgtagaatattacgtatgcatgttcatgtctaaagaatggctgttgatgataaaataaaaatcagctttcatttttctaaaaaagtcaaaatgcaaacttaaaactttaaacaaaagtattactaatttaaaaaaagtttgtgttgggtaccgtcgacgcggccgcgaatttagtagtagta

SEQ ID NO: 293685 - DNA, 1588 bp, Homo sapiens
cgggtcacttgccctccccgctcggagctgccgcctggcttgtcgcggctctgccacaggggcaggtgttgaggggctcccggtccggctgccgccgctcccccgctccggacccggggctccccctagcgccgctgaggagccgcctctgcggctccaggagggcgcaggagcgggactgagagcgcctggaggctcgagcggaggatagaaggacaaggacagaatcaccagcactggctgaaggtaccttaacatggggaatcttcttaaagttttgacatgcacagaccttgagcaggggccaaattttttccttgattttgaaaatgcccagcctacagagtctgagaaggaaatttataatcaggtgaatgtagtattaaaagatgcagaaggcatcttggaggacttgcagtcatacagaggagctggccacgaaatacgagaggcaatccagcatccagcagatgagaagttgcaagagaaggcatggggtgcagttgttccactagtaggcaaattaaagaaattttacgaattttctcagaggttagaagcagcattaagaggtcttctgggagccttaacaagtaccccatattctcccacccagcatctagagcgagagcaggctcttgctaaacagtttgcagaaattcttcatttcacactccggtttgatgaactcaagatgacaaatcctgccatacagaatgatttcagctattatagaagaacattgagtcgtatgaggattaacaatgtaccggcagaaggagaaaatgaagtaaataatgaattggcaaatcgaatgtctttgttttatgctgaggcaactccaatgctgaaaaccttgagtgatgccacaacaaaatttgtatcagagaataaaaatttaccaatagaaaataccacagattgtttaagcacaatggctagtgtatgcagagtcatgctggaaacaccggaatacagaagcagatttacaaatgaagagacagtgtcattctgcttgagggtaatggtgggtgtcataatactctatgaccacgtacatccagtgggagcatttgctaaaacttccaaaattgattgtaagttattgttttatataaataatttcaaacgagtttctccatggaaaccataggattttattttatgataagagccagcaaaccggactctcacaaaactcagatttatagtttgtgaaatggtggactttcatctcctctgtccctgtgctgtttttcttgtggcctgtattcaggtggaatagaatgatcaaaggatgactatattgtctagtgagtacctcctggaaggcttctactacgtatttggcaatataaatagataattagatataaggaattttgagtcatatcctttaattcctttggccaaaggccatttcaaataaaatgtttatttcagaatgcatataaaaagtcagtagtgctgctgggcgtgctggctcatgcctgtagcccaagcactttggcaggctgaagcaggaggatcacttgagcccaggagtagaagaccagcctgggcagcatagtgagacccccatttctac

SEQ ID NO: 293686 - DNA, 1117 bp, Homo sapiens
cgggtcacttgccctccccgctcggagctgccgcctggcttgtcgcggctctgccacaggggcaggtgttgaggggctcccggtccggctgccgccgctcccccgctccggacccggggctccccctagcgccgctgaggagccgcctctgcggctccaggagggcgcaggagcgggactgagagcgcctggaggctcgagcggagggtaattcatttgcacacctgttagcaagaaacagaagttgaaggactggaacaagtgaactaggaaagagggaacgccaatccaaggatagaaggacaaggacagaatcaccagcactggctgaaggtaccttaacatggggaatcttcttaaagttttgacatgcacagaccttgagcaggggccaaattttttccttgattttgaaaatgcccagcctacagagtctgagaaggaaatttataatcaggtgaatgtagtattaaaagatgcagaaggcatcttggaggacttgcagtcatacagaggagctggccacgaaatacgagaggcaatccagcatccagcagatgagaagttgcaagagaaggcatggggtgcagttgttccactagtaggcaaattaaagaaattttacgaattttctcagaggttagaagcagcattaagaggtcttctgggagccttaacaagtaccccatattctcccacccagcatctagagcgagagcaggctcttgctaaacagtttgcagaaattcttcatttcacactccggtttgatgaactcaagatgacaaatcctgccatacagaatgatttcagctattatagaagaacattgagtcgtatgaggattaacaatgtaccggcagaaggagaaaatgaagtaaataatgaattggcaaatcgaatgtctttgttttatgctgaggcaactccaatgctgaaaaccttgagtgatgccacaacaaaatttgtatcagagcaatacacaatttcccttgaaatccccgattgtgttagccccaggtttgtgttccaagtcttctgggaacccggatacaacgcgttacattaaaaacgcccgtgaggaagaggggtaaaacttcacacaacacggggtcta

SEQ ID NO: 293687 - DNA, 1027 bp, Homo sapiens
  misc_feature (842)..(842): n is a, c, g, or t
gcggggggaggcgcgtcgaggcagcgtcctccttttgtgcgagcgccggcggctcggcttctcgaaggtaaacagcgcttcctcttcctcctcgccgcgcctcttccttttatagttatttctcgcctggcactcgcccgggctgctgctgctgctgctgctgccgccgcggcgggggcagctcgcaaacctgtggcggtgacgtgagccccgccaacccggaaacggcggcggcggcggcaccggaggctccgaggctcctgcgctcccgcgccgcgctcccctcgcccgcccgggccgccaggagaagaaactgaggcctggaatttgattaactcattcaaggttacccagttgatagaaggacaaggacagaatcaccagcactggctgaagatgcccagcctacagagtctgagaaggaaatttataatcaggtgaatgtagtattaaaagatgcagaaggcatcttggaggacttgcagtcatacagaggagctggccacgaaatacgagaggcaatccagcatccagcagatgagaagttgcaagagaaggcatggggtgcagttgttccactagtaggcaaattaaagaaattttacgaattttctcagaggttagaagcagcattaagaggtcttctgggagccttaacaagtaccccatattctcccacccagcatctagagcgagagcaggctcttgctaaacagtttgcagaaattcttcatttcacactccggtttgatgaactcaagatgacaaatcctgccatacagaatgatttcagctattatagaagaacattgagtcgtatgaggattaacaatgtaccggcngaaccgcgaacatgacgtccctcctgcattgggcacctcgcctgctcttcgcgccatgcctcgccgcccctccgttgctcgaaccctgcactgctgccccaccccccggctcccacccttccctttcccctttccccctcccccctcgcctcacccccgggtcccgcaccgcccccccgcccccc

SEQ ID NO: 293688 - DNA, 1367 bp, Homo sapiens
tggacgacagagcaagaatttatctgaaaaaaaaaaaaaagagatgagtttccttaagacattgcaaagccaacaacccccccggggagccatattaaagcaccaatgggaaatttcgtcagcagtgcttaatcaaaggcattgattgttttctgggccccactggttcctgtcccattattgtccttaattgtggaaacttgttcattagggtttcattaaggctggccctggctgttacccctcctttgctctctttgatctctgcaaacaaacaatcaaacaaacaaatgctatttggagttgttattcccaaactgtacctctactatgggaaaaaaacaatagctaggatttaccgggggctttctgtgtactgagaactgttgtaacttgcttaatccttgctataactcttttacaggagaagaaactgaggcctggaatttgattaactcattcaaggttacccagttggtaattcatttgcacacctgttagcaagaaacagaagttgaaggactggaacaagtgaactaggaaagagggaacgccaatccaaggatagaaggacaaggacagaatcaccagcactggctgaaggcaatccagcatccagcagatgagaagttgcaagagaaggcatggggtgcagttgttccactagtaggcaaattaaagaaattttacgaattttctcagaggttagaagcagcattaagaggtcttctgggagccttaacaagtaccccatattctcccacccagcatctagagcgagagcaggctcttgctaaacagtttgcagaaattcttcatttcacactccggtttgatgaactcaagatgacaaatcctgccatacagaatgatttcagctattatagaagaacattgagtcgtatgaggattaacaatgtaccggcagaaggagaaaatgaagtaaataatgaattggcaaatcgaatgtctttgttttatgctgaggcaactccaatgctgaaaaccttgagtgatgccacaacaaaatttgtatcagagaataaaaatttaccaaacaaactaaaaaaagaaagtcagagaaaaaagtcaatcgaagttcctcactggatactagaagagggagagagagaaggcgggaagacatagaagaaaggacgaaacagaggaaaaggaagaagaagaaagaaagcacacagcacaaaaaagggaagaagaaaacacaaagagagaacaaggaagagagcaagaacaaagaaagaaaaaaggaggagggtacaaagaaagaagagagaaagagaagaaaggaaaaagcaagcggagaacaaaaaaaagaaagaagaacagaaggaggaaagaaaagcagg

SEQ ID NO: 293689 - DNA, 597 bp, Homo sapiens
gcggggggaggcgcgtcgaggcagcgtcctccttttgtgcgagcgccggcggctcggcttctcgaaggtaaacagcgcttcctcttcctcctcgccgcgcctcttccttttatagttatttctcgcctggcactcgcccgggctgctgctgctgctgctgctgccgccgcggcgggggcagctcgcaaacctgtggcggtgacgtgagccccgccaacccggaaacggcggcggcggcggcaccggaggctccgaggctcctgcgctcccgcgccgcgctcccctcgcccgcccgggccgccaggcccagtcccagggcgcaaggctacttgcgtcagcagcgtgccgaagcaagatagcggaatcaggaagagagccggccggaagacacctgccctggccggaagatacgtacccctgaagatcgagaaagaggccatccgggtatcacgtagcagtttcgtacgactaggagacttcctgttacaggagactatgaaacctttgttccgtcctcacttggggctgacgccattttaggcctcagcccgcctgcatccaggcgctcattaaaacagcatgttgctccacaaaaaa

SEQ ID NO: 293690 - DNA, 481 bp, Homo sapiens
actttattttctactgccgcctttttcatgtgcaaccaaaatgaaaatgtttaaattaactgtgttgtacaaatggtacccaacacaaactttttttaaattagtaatacttttgtttaaagttttaagtttgcattttgactttttttgtaaggatgtatgttgtgtgtttaacctttattaactaacgttaaaagctgtgatgtgtgcgtagaatattacgtatgcatgttcatgtctaaagaatggctgttgatgataaaataaaaatcagctttcatttttctaagtgtggcttggtttactgatgttttgtttttaggcttctgaagttttccccatgtatgtttttatggaatgcatatatacattacatgattttttcttcttttaggggagagccgggtcttttcattagaattttgatcattgtctatgtatatacttttaattgcctttaaaattttgctaagtatattaa

SEQ ID NO: 293691 - DNA, 5074 bp, Homo sapiens
cgagatggtgagtcttctgtggtccctcccccacaaggcccaagtccctgggcagagagtgggcccagaggacagcaggcagcacctaggacctaagcctgggagttgccccctgcagacagcttagacccacgaccagctcccccacccccaccctgcggctgcatcctgggaggtgggcactcttagtgccctgtgacattcattcattccatggcccctcagggagctcaccttctaggagacggcacagaggctctggccctggcaaactgggattcgatgcagcggactcggcagtcctctgccgtctgggccacagcacaccatctcccaacaaccaagagattctcttcgtcccagcctcatcagcccccaggggatgggagagggcaggcaccaggcaacaaggtccaaagagacctcacgacttgctcaaggtggccgagcctgtcccctggaggacagactcagctgccaggcctgtccaggcctggggactgcaaagaacaagaattccattcacacgaagcctcccagcagccccatattgggggggcgccagcctcagagaggggagggacgttaggtttcatccaaagaaagcatttccgtgactcaaaatatctgcaggggggatactgtctagcctcctaatgtttagcccagggctgggcacacagtagggcttcaagacctacgtggggatgacagtggaatcacatttaggtgtcagcacactccatgccgggtcatgagacagaaataagccacctcagagtgatggctgggttcgttcattcatctactcttcagtcaacaaacacttactgagaagtggctgtgtgccaggcacgctttaggtgctggggttgcctccatgaacaaaacaagcagaaaactctgctgctgtgaagcaagctaaggcggagcccagcatggcaggggcgggaggggctggctggcaagacattgcttcctgccctccccccaggggcaccacacagaacagtttacaaagcactcccacggttgcgttcccattaacaagccttcgcccccaacacaagcctttcctctcctagtccccgggacggtgtcagccctgaacatagcccaggctgggagagtggggggcttacacccttgggtgacttaatgtgcccactggcccaccctgcccaagacctaccacttctgccctctcagctctccctggatccatcgggtcccgagtgggattgcccactgggctccaaggacctggaggaagagggcccctggggagggggctctggcctgccgcccacaggctgcttccctggctcctggcgccaggacgtgggcctggactgcaagggatcccccgagggggccgaggcccgggcttggactgtctactactacagcctcctgcagagctgtctgcagcaagctggccttccggagactcaggaccgcggccaggtgccccgcacaggctgtcctggggcggaggtgaccttgtgcgttctgggctcccccagcacctttctgcctgtgctgctggagggtggggtccagagcccgggaaacatgctcctttgcctgtcccctgcttggctgatgaaggtgccagcacccgggcagccgggtgaggcagccctgctagtctccaaggctgtgagcttccaccctgggggcctgacattcctggatgactttgtccccccgcgccgtgccacctactttttggcaggcctgggcctggggcctggccggggccgagaggcagcagaactcgcccgtgacctgacctgccccacaggagcttcggctgagctggcccggctgctggaggaccggctgctgacaaggcagttgctggcccagcagggtggtgtggctgtgccagcaaccctggctttcacctacaagccgccggggctgctgcggggaggggatgccagcctagggctacggctggtggagctgagtggcaaagagggccaggagacgctggtgaaagaggaagtggaggcttttctgcgctccgaggccctgggtgatatcctgcaggtagctgtgaagctcagtggctggcgctggcgggggcggcaggcatggcgtctgcacccgcgggcagagctgggtgcagtggtggacacagtgctggcgctgctggagaagctggaggaggaggagagtgtcctggtggaggctgtgtacccacctgcccagctgccctgctcagatggtccttcacccggccccggcctggccgtgcgaatctgtgctgtggtgtgtcggacacagggtgataggccactgctgagcaaggtggtgtgcggcgtgggccgcggggaccgccctctacggcaccacaactccctgccgaggacgctggaggtggcgctggcccagtgcggcctgggcgaggaggcgcaggtggcggctgtgcggcagcgcgtcaaggcggcggccgaggccgcgctggccgccgtgctggctctggaggccggcctgagtgccgagcagcgcggcgggcgccgggcgcacacggacttcctgggcgtggatttcgcgctgacagcggccggcggcgtgctgaccccagtggccctggagctgaacggcggcctgtgtctggaggcgtgcggcgcgctggaggggctgtgggccgcgccgcggctggggccggcggccgacgaggcggtggcggcgccgctggtggagaccatgcttcggcggtcggcgcgctgcctcatggagggaaaacagctgctggtggtcggcgctggcggcgtcagcaagaagttcgtgtgggaggcggcgcgcgactacgggctccagctgcacctcgtggagtcagaccccaaccactttgcatcccagttggtacagaccttcatccactttgacatgacagagcaccggagggatgaggagaacgcacggctgctggcagagttggtgcgggctcgcggcctcaagctagatggctgcttctcctactgggatgactgcctggtgctcacagccctgctctgccaggagctaggtctgccctgcagctccccagctgccatgcgcctggctaagcagaagagcctcacccagctgcacctgttgcaccaccatggcccaccctggcctgcgccctccctccatgctgtgccctgctgcccactggagagtgaggctgatgtggagagggccgtgcaccaggtacccctgccaggtgtcatgaagctggagttcggggcaggtgcagtgggtgtccggctggtagaggatgcgccacagtgccatgagcacttttcccggattacccgagacttgcagggcgaggccgaccacccaggcattgggctgggctggggcaatgccatgctgctgatggagtttgtggagggcaccgagcacgacgtggacctggtgttgtttggtgggcggttgctggctgcctttgtctccgacaatggccctacgaggctgcctggcttcactgagacggcggcctgcatgcccaccgggctggcaccagagcaggaggcacagatggttcaggcagccttccgctgttgcctgggctgcgggttgctcgatggagtcttcaacgtggagctcaagctgaccggggctgggcctcggcttatcgagatcaacccccgcatgggtggcttctacctgcgtgattggatcctggagctctatggtgttgacctgctgctggctgctgttatggtggcctgtggcttgcgtcctgccctgcccacccgcccacgtgctcgtggccatctggtgggcgtcatgtgccttgtgtcccagcacctgcaggccctgagttccaccgccagccgtgagaccctgcaggccctgcacgaccgtggactgctacgcctcaatctgctggaggaggccctggtgcctggcgagtatgaggagccctactgcagtgtggcctgtgccggacccagccccaccgaggcccgtctccgcctgctgggcctctgccagggcctgggcatcgatgggcccagctaccctgttgcccacttcctgtctcacttcaaatagcactggggtcagggggcagggaagcagtgctgggtggaggcactgtggtgccctctgctccctggagctcttcctgcttctctccccatcaccatgccccagccccagcctggcccgctgcaatgcctaggtctgttccagagcagcagggcaatttagacaccaaggcatcctggactcaagggcctcttgccctcccgaaggccccagtccagcctacagcttccccagcattctagccttggagaaatgacaatggccacacacacacacacacacacacacacacacctctgacgccagctccccaggtgggagtgggcccaaacccagcccctcctgtccacctctccaggtctcactctcttcctgccatctacaagaggagaggacctggctgggccccaagccttggacaaatcctgggaaaacctgagactagaacccttgtcttcctcttacccaaattctaggatagctctgaagcctgctggaaacttggtggcatccaacctgcctcattcggcctgaccggtagaggcaggtggcctgtggacagaagtaatcctctttctgctcaccccaggcagacacaactgcctatgttcccccgatgagaggaaacaggctgagagaagaaaaatgactgctccaggattataccacagtggagagcgggtcacaggacatgatgcagggtccaggtttctgttttgatcaagtcttacatgcccattcagcttctaggcccccctcacctccctgccctcattcacaagtggccctgagacacgtgaacacctccctcctatgcatcacaaaccttctccaccgagctttggtgctttggcctctggcacacctaactagcattggcagaggagagtctacactctcttcctcattcagggaagatgctttaagaaatcctgcctctgtgcagcagaggagctggaggcagctccccaggcatccctccccaaataaaggcttatgtactggtaaaaaaactaga

SEQ ID NO: 293692 - DNA, 775 bp, Homo sapiens
cgagatggtgagtcttctgtggtccctcccccacaaggcccaagtccctgggcagagagtgggcccagaggacagcaggcagcacctaggacctaagcctgggagttgccccctgcagacagcttagacccacgaccagctcccccacccccaccctgcggctgcatcctgggaggtgggcactcttagtgccctgtgacattcattcattccatggcccctcagggagctcaccttctaggagacggcacagaggctctggccctggcaaactgggattcgatgcagcggactcggcagtcctctgccgtctgggccacagcacaccatctcccaacaaccaagagattctcttcgtcccagcctcatcagcccccaggggatgggagagggcaggcaccaggcaacaaggtccaaagagacctcacgacttgctcaaggtggccgagcctgtcccctggaggacagactcagctgccaggcctgtccaggcctggggactgcaaagaacaagaattccattcacacgaagcctcccagcagccccatattgggggggcgccagcctcagagaggggagggacgttaggtttcatccaaagaaagcatttccgtgactcaaaatatctgcaggggggatactgtctagcctcctaatgtttagcccagggctgggcacacagtagggcttcaagacctacgtggggatgacagtggaatcacatttaggtgtcagcacactccatgccgggtccgctgcattgggtcctctaga

SEQ ID NO: 293693 - DNA, 445 bp, Homo sapiens
aatcgagcgctgaccgtctgagcagctgggaaaactctgggggctcagggtggggcgtgggtgtggaggtggtggaaggtgggcagagagacagcaagggcgcccctggtgagctgggccatgttctctttcccgaggctgtcctggggcggaggtgaccttgtgcgttctgggctcccccagcacctttctgcctgtgctgctggagggtggggtccagagcccgggtgagtgtatgctcaagtttccccatccccttctacagaaagggcagccctgccctggcccagccacagaactaatcatattttatatcttcttcgaaaccacacttatccccaccttgggtatcatcacccgatgaggcaaccagccagaacgcctggacgcaggcacatacttcctattctacaccctagtaggctcccttcccagcttgctcaga

SEQ ID NO: 293694 - DNA, 2350 bp, Homo sapiens
gtgtttgtgtactcgtatcccctgaaggggccatcctaggccccatcctatccccctagcacccagtactagctgacctggatatgccccaccctgtggcttctgcagctgcacctcgtggagtcagaccccaaccactttgcatcccagttggtacagaccttcatccactttgacatgacagagcaccggagggatgaggagaacgcacggctgctggcagagttggtgcgggctcgcggcctcaagctagatggctgcttctcctactgggatgactgcctggtgctcacagccctgctctgccaggagctaggtctgccctgcagctccccagctgccatgcgcctggctaagcagaagagcctcacccagctgcacctgttgcaccaccatggcccaccctggcctgcgccctccctccatgctgtgccctgctgcccactggagagtgaggctgatgtggagagggccgtgcaccaggtacccctgccaggtgtcatgaagctggagttcggggcaggtgcagtgggtgtccggctggtagaggatgcgccacagtgccatgagcacttttcccggattacccgagacttgcagggcgaggccgaccacccaggcattgggctgggctggggcaatgccatgctgctgatggagtttgtggagggcaccgagcacgacgtggacctggtgttgtttggtgggcggttgctggctgcctttgtctccgacaatggccctacgaggctgcctggcttcactgagacggcggcctgcatgcccaccgggctggcaccagagcaggaggcacagatggttcaggcagccttccgctgttgcctgggctgcgggttgctcgatggagtcttcaacgtggagctcaagctgaccggggctgggcctcggcttatcgagatcaacccccgcatgggtggcttctacctgcgtgattggatcctggagctctatggtgttgacctgctgctggctgctgttatggtggcctgtggcttgcgtcctgccctgcccacccgcccacgtgctcgtggccatctggtgggcgtcatgtgccttgtgtcccagcacctgcaggccctgagttccaccgccagccgtgagaccctgcaggccctgcacgaccgtggactgctacgcctcaatctgctggaggaggccctggtgcctggcgagtatgaggagccctactgcagtgtggcctgtgccggacccagccccaccgaggcccgtctccgcctgctgggcctctgccagggcctgggcatcgatgggcccagctaccctgttgcccacttcctgtctcacttcaaatagcactggggtcagggggcagggaagcagtgctgggtggaggcactgtggtgccctctgctccctggagctcttcctgcttctctccccatcaccatgccccagccccagcctggcccgctgcaatgcctaggtctgttccagagcagcagggcaatttagacaccaaggcatcctggactcaagggcctcttgccctcccgaaggccccagtccagcctacagcttccccagcattctagccttggagaaatgacaatggccacacacacacacacacacacacacacacacctctgacgccagctccccaggtgggagtgggcccaaacccagcccctcctgtccacctctccaggtctcactctcttcctgccatctacaagaggagaggacctggctgggccccaagccttggacaaatcctgggaaaacctgagactagaacccttgtcttcctcttacccaaattctaggatagctctgaagcctgctggaaacttggtggcatccaacctgcctcattcggcctgaccggtagaggcaggtggcctgtggacagaagtaatcctctttctgctcaccccaggcagacacaactgcctatgttcccccgatgagaggaaacaggctgagagaagaaaaatgactgctccaggattataccacagtggagagcgggtcacaggacatgatgcagggtccaggtttctgttttgatcaagtcttacatgcccattcagcttctaggcccccctcacctccctgccctcattcacaagtggccctgagacacgtgaacacctccctcctatgcatcacaaaccttctccaccgagctttggtgctttggcctctggcacacctaactagcattggcagaggagagtctacactctcttcctcattcagggaagatgctttaagaaatcctgcctctgtgcagcagaggagctggaggcagctccccaggcatccctccccaaataaaggcttatgtactggtaaaaaaactaga

SEQ ID NO: 293695 - DNA, 3956 bp, Homo sapiens
cgggcgctgtgccactgccaccgccgccgccgctgcatcccgcccggtccgaatccgcccgccacgcccgccgagccgctgccgccgccagctctccctggatccatcgggtcccgagtgggattgcccactgggctccaaggacctggaggaagagggcccctggggagggggctctggcctgccgcccacaggctgcttccctggctcctggcgccaggacgtgggcctggactgcaagggatcccccgagggggccgaggcccgggcttggactgtctactactacagcctcctgcagagctgtctgcagcaagctggccttccggagactcaggaccgcggccaggtgccccgcacaggctgtcctggggcggaggtgaccttgtgcgttctgggctcccccagcacctttctgcctgtgctgctggagggtggggtccagagcccgggaaacatgctcctttgcctgtcccctgcttggctgatgaaggtgccagcacccgggcagccgggtgaggcagccctgctagtctccaaggctgtgagcttccaccctgggggcctgacattcctggatgactttgtccccccgcgccgtgccacctactttttggcaggcctgggcctggggcctggccggggccgagaggcagcagaactcgcccgtgacctgacctgccccacaggagcttcggctgagctggcccggctgctggaggaccggctgctgacaaggcagttgctggcccagcagggtggtgtggctgtgccagcaaccctggctttcacctacaagccgccggggctgctgcggggaggggatgccagcctagggctacggctggtggagctgagtggcaaagagggccaggagacgctggtgaaagaggaagtggaggcttttctgcgctccgaggccctgggtgatatcctgcaggtagctgtgaagctcagtggctggcgctggcgggggcggcaggcatggcgtctgcacccgcgggcagagctgggtgcagtggtggacacagtgctggcgctgctggagaagctggaggaggaggagagtgtcctggtggaggctgtgtacccacctgcccagctgccctgctcagatggtccttcacccggccccggcctggccgtgcgaatctgtgctgtggtgtgtcggacacagggtgataggccactgctgagcaaggtggtgtgcggcgtgggccgcggggaccgccctctacggcaccacaactccctgccgaggacgctggaggtggcgctggcccagtgcggcctgggcgaggaggcgcaggtggcggctgtgcggcagcgcgtcaaggcggcggccgaggccgcgctggccgccgtgctggctctggaggccggcctgagtgccgagcagcgcggcgggcgccgggcgcacacggacttcctgggcgtggatttcgcgctgacagcggccggcggcgtgctgaccccagtggccctggagctgaacggcggcctgtgtctggaggcgtgcggcgcgctggaggggctgtgggccgcgccgcggctggggccggcggccgacgaggcggtggcggcgccgctggtggagaccatgcttcggcggtcggcgcgctgcctcatggagggaaaacagctgctggtggtcggcgctggcggcgtcagcaagaagttcgtgtgggaggcggcgcgcgactacgggctccagctgcacctcgtggagtcagaccccaaccactttgcatcccagttggtacagaccttcatccactttgacatgacagagcaccggagggatgaggagaacgcacggctgctggcagagttggtgcgggctcgcggcctcaagctagatggctgcttctcctactgggatgactgcctggtgctcacagccctgctctgccaggagctaggtctgccctgcagctccccagctgccatgcgcctggctaagcagaagagcctcacccagctgcacctgttgcaccaccatggcccaccctggcctgcgccctccctccatgctgtgccctgctgcccactggagagtgaggctgatgtggagagggccgtgcaccaggtacccctgccaggtgtcatgaagctggagttcggggcaggtgcagtgggtgtccggctggtagaggatgcgccacagtgccatgagcacttttcccggattacccgagacttgcagggcgaggccgaccacccaggcattgggctgggctggggcaatgccatgctgctgatggagtttgtggagggcaccgagcacgacgtggacctggtgttgtttggtgggcggttgctggctgcctttgtctccgacaatggccctacgaggctgcctggcttcactgagacggcggcctgcatgcccaccgggctggcaccagagcaggaggcacagatggttcaggcagccttccgctgttgcctgggctgcgggttgctcgatggagtcttcaacgtggagctcaagctgaccggggctgggcctcggcttatcgagatcaacccccgcatgggtggcttctacctgcgtgattggatcctggagctctatggtgttgacctgctgctggctgctgttatggtggcctgtggcttgcgtcctgccctgcccacccgcccacgtgctcgtggccatctggtgggcgtcatgtgccttgtgtcccagcacctgcaggccctgagttccaccgccagccgtgagaccctgcaggccctgcacgaccgtggactgctacgcctcaatctgctggaggaggccctggtgcctggcgagtatgaggagccctactgcagtgtggcctgtgccggacccagccccaccgaggcccgtctccgcctgctgggcctctgccagggcctgggcatcgatgggcccagctaccctgttgcccacttcctgtctcacttcaaatagcactggggtcagggggcagggaagcagtgctgggtggaggcactgtggtgccctctgctccctggagctcttcctgcttctctccccatcaccatgccccagccccagcctggcccgctgcaatgcctaggtctgttccagagcagcagggcaatttagacaccaaggcatcctggactcaagggcctcttgccctcccgaaggccccagtccagcctacagcttccccagcattctagccttggagaaatgacaatggccacacacacacacacacacacacacacacacctctgacgccagctccccaggtgggagtgggcccaaacccagcccctcctgtccacctctccaggtctcactctcttcctgccatctacaagaggagaggacctggctgggccccaagccttggacaaatcctgggaaaacctgagactagaacccttgtcttcctcttacccaaattctaggatagctctgaagcctgctggaaacttggtggcatccaacctgcctcattcggcctgaccggtagaggcaggtggcctgtggacagaagtaatcctctttctgctcaccccaggcagacacaactgcctatgttcccccgatgagaggaaacaggctgagagaagaaaaatgactgctccaggattataccacagtggagagcgggtcacaggacatgatgcagggtccaggtttctgttttgatcaagtcttacatgcccattcagcttctaggcccccctcacctccctgccctcattcacaagtggccctgagacacgtgaacacctccctcctatgcatcacaaaccttctccaccgagctttggtgctttggcctctggcacacctaactagcattggcagaggagagtctacactctcttcctcattcagggaagatgctttaagaaatcctgcctctgtgcagcagaggagctggaggcagctccccaggcatccctccccaaataaaggcttatgtactggtaaaaaaactaga

SEQ ID NO: 293696 - DNA, 4867 bp, Homo sapiens
  misc_feature (4857)..(4857): n is a, c, g, or t
  misc_feature (4860)..(4860): n is a, c, g, or t
cgagatggtgagtcttctgtggtccctcccccacaaggcccaagtccctgggcagagagtgggcccagaggacagcaggcagcacctaggacctaagcctgggagttgccccctgcagacagcttagacccacgaccagctcccccacccccaccctgcggctgcatcctgggaggtgggcactcttagtgccctgtgacattcattcattccatggcccctcagggagctcaccttctaggagacggcacagaggctctggccctggcaaactgggattcgatgcagcggactcggcagtcctctgccgtctgggccacagcacaccatctcccaacaaccaagagattctcttcgtcccagcctcatcagcccccaggggatgggagagggcaggcaccaggcaacaaggtccaaagagacctcacgacttgctcaaggtggccgagcctgtcccctggaggacagactcagctgccaggcctgtccaggcctggggactgcaaagaacaagaattccattcacacgaagcctcccagcagccccatattgggggggcgccagcctcagagaggggagggacgttaggtttcatccaaagaaagcatttccgtgactcaaaatatctgcaggggggatactgtctagcctcctaatgtttagcccagggctgggcacacagtagggcttcaagacctacgtggggatgacagtggaatcacatttaggtgtcagcacactccatgccgggtcatgagacagaaataagccacctcagagtgatggctgggttcgttcattcatctactcttcagtcaacaaacacttactgagaagtggctgtgtgccaggcacgctttaggtgctggggttgcctccatgaacaaaacaagcagaaaactctgctgctgtgaagcaagctaaggcggagcccagcatggcaggggcgggaggggctggctggcaagacattgcttcctgccctccccccaggggcaccacacagaacagtttacaaagcactcccacggttgcgttcccattaacaagccttcgcccccaacacaagcctttcctctcctagtccccgggacggtgtcagccctgaacatagcccaggctgggagagtggggggcttacacccttgggtgacttaatgtgcccactggcccaccctgcccaagacctaccacttctgccctctcagctctccctggatccatcgggtcccgagtgggattgcccactgggctccaaggacctggaggaagagggcccctggggagggggctctggcctgccgcccacaggctgcttccctggctcctggcgccaggacgtgggcctggactgcaagggatcccccgagggggccgaggcccgggcttggactgtctactactacagcctcctgcagagctgtctgcagcaagctggccttccggagactcaggaccgcggccaggtgccccgcacaggctgtcctggggcggaggtgaccttgtgcgttctgggctcccccagcacctttctgcctgtgctgctggagggtggggtccagagcccgggaaacatgctcctttgcctgtcccctgcttggctgatgaaggtgccagcacccgggcagccgggtgaggcagccctgctagtctccaaggctgtgagcttccaccctgggggcctgacattcctggatgactttgtccccccgcgccgtgccacctactttttggcaggcctgggcctggggcctggccggggccgagaggcagcagaactcgcccgtgacctgacctgccccacaggagcttcggctgagctggcccggctgctggaggaccggctgctgacaaggcagttgctggcccagcagggtggtgtggctgtgccagcaaccctggctttcacctacaagccgccggggctgctgcggggaggggatgccagcctagggctacggctggtggagctgagtggcaaagagggccaggagacgctggtgaaagaggaagtggaggcttttctgcgctccgaggccctgggtgatatcctgcaggtagctgtgaagctcagtggctggcgctggcgggggcggcaggcatggcgtctgcacccgcgggcagagctgggtgcagtggtggacacagtgctggcgctgctggagaagctggaggaggaggagagtgtcctggtggaggctgtgtacccacctgcccagctgccctgctcagatggtccttcacccggccccggcctggccgtgcgaatctgtgctgtggtgtgtcggacacagggtgataggccactgctgagcaaggtggtgtgcggcgtgggccgcggggaccgccctctacggcaccacaactccctgccgaggacgctggaggtggcgctggcccagtgcggcctgggcgaggaggcgcaggtggcggctgtgcggcagcgcgtcaaggcggcggccgaggccgcgctggccgccgtgctggctctggaggccggcctgagtgccgagcagcgcggcgggcgccgggcgcacacggacttcctgggcgtggatttcgcgctgacagcggccggcggcgtgctgaccccagtggccctggagctgaacggcggcctgtgtctggaggcgtgcggcgcgctggaggggctgtgggccgcgccgcggctggggccggcggccgacgaggcggtggcggcgccgctggtggagaccatgcttcggcggtcggcgcgctgcctcatggagggaaaacagctgctggtggtcggcgctggcggcgtcagcaagaagttcgtgtgggaggcggcgcgcgactacgggctccagctgcacctcgtggagtcagaccccaaccactttgcatcccagttggtacagaccttcatccactttgacatgacagagcaccggagggatgaggagaacgcacggctgctggcagagttggtgcgggctcgcggcctcaagctagatggctgcttctcctactgggatgactgcctggtgctcacagccctgctctgccaggagctaggtctgccctgcagctccccagctgccatgcgcctggctaagcagaagagcctcacccagctgcacctgttgcaccaccatggcccaccctggcctgcgccctccctccatgctgtgccctgctgcccactggagagtgaggctgatgtggagagggccgtgcaccaggtacccctgccaggtgtcatgaagctggagttcggggcaggtgcagtgggtgtccggctggtagaggatgcgccacagtgccatgagcacttttcccggattacccgagacttgcagggcgaggccgaccacccaggcattgggctgggctggggcaatgccatgctgctgatggagtttgtggagggcaccgagcacgacgtggacctggtgttgtttggtgggcggttgctggctgcctttgtctccgacaatggccctacgaggctgcctggcttcactgagacggcggcctgcatgcccaccgggctggcaccagagcaggaggcacagatggttcaggcagccttccgctgttgcctgggctgcgggttgctcgatggagtcttcaacgtggagctcaagctgaccggggctgggcctcggcttatcgagatcaacccccgcatgggtggcttctacctgcgtgattggatcctggagctctatggtgttgacctgctgctggctgctgttatggtggcctgtggcttgcgtcctgccctgcccacccgcccacgtgctcgtggccatctggtgggcgtcatgtgccttgtgtcccagcacctgcaggccctgagttccaccgccagccgtgagaccctgcaggccctgcacgaccgtggactgctacgcctcaatctgctggaggaggccctggtgcctggcgagtatgaggagccctactgcagtgtggcctgtgccggacccagccccaccgaggcccgtctccgcctgctgggcctctgccagggcctgggcatcgatgggcccagctaccctgttgcccacttcctgtctcacttcaaatagcactggggtcagggggcagggaagcagtgctgggtggaggcactgtggtgccctctgctccctggagctcttcctgcttctctccccatcaccatgccccagccccagcctggcccgctgcaatgcctaggtctgttccagagcagcagggcaatttagacaccaaggcatcctggactcaagggcctcttgccctcccgaaggccccagtccagcctacagcttccccagcattctagccttggagaaatgacaatggccacacacacacacacacacacacacacacacctctgacgccagctccccaggtgggagtgggcccaaacccagcccctcctgtccacctctccaggtctcactctcttcctgccatctacaagaggagaggacctggctgggccccaagccttggacaaatcctgggaaaacctgagactagaacccttgtcttcctcttacccaaattctaggatagctctgaagcctgctggaaacttggtggcatccaacctgcctcattcggcctgaccggtagaggcaggtggcctgtggacagaagtaatcctctttctgctcaccccaggcagacacaactgcctatgttcccccgatgagaggaaacaggctgagagaagaaaaatgactgctccaggattataccacagtggagagcgggtcacaggacatgatgcagggtccaggtttctgttttgatcaagtcttacatgcccattcagcttctaggcccccctcacctcccctcctctgtcttccacctcctctgtgctgggatcntcnagatcac

SEQ ID NO: 293697 - DNA, 452 bp, Homo sapiens
aggtggagaccctaagtaggacagttattttggaagggctaccctctggctggctttcctgatccgtgcgctcagagctggaaggtggcccacgtcctacttttgcggttgggtcatatcaaatctgtatcggctaacgggaaggaagttacgagcaagttccaccggaaagaaaatctagcgcggggactgcactcgaggccgaggagagggcagcgcgtccgtggtggggtcgcccagcactgcgagccgcgctgaaccccacccccggcctgcagggtgcggctccctggctgccccgtggacccggccagcccgggacgaggacgcaggacctcggcagggacgccggagccagcccttcgccatccccacacgccccgcggcacagtggccgcgcgcacgttacctgcggagcccggccctgcccgcccgtctgggctgccgccctc

SEQ ID NO: 293698 - DNA, 4862 bp, Homo sapiens
ggcggcgcgcgcctggctgggccctggggagcgggagggaaggagcgaaggagcgaaggagcaagcggagcggccgtcgcccaagccaagccgcgctgccaaccctcccgcccgcccgcgctcctgtccgccgtgtctagcagcggggcccagcatggtcatggcggatggcccgaggcacttgcagcgcgggccggtccgggtggggttctacgacatcgagggcacgctgggcaagggcaacttcgctgtggtgaagctggggcggcaccggatcaccaagacggaggtggcaataaaaataatcgataagtctcagctggatgcagtgaaccttgagaaaatctaccgagaagtacaaataatgaaaatgttagaccaccctcacataatcaaactttatcaggtaatggagaccaaaagtatgttgtaccttgtgacagaatatgccaaaaatggagaaatttttgactatcttgctaatcatggccggttaaatgagtctgaagccaggcgaaaattctggcaaatcctgtctgctgttgattattgtcatggtcggaagattgtgcaccgtgacctcaaagctgaaaatctcctgctggataacaacatgaatatcaaaatagcagatttcggttttggaaatttctttaaaagtggtgaactgctggcaacatggtgtggcagccccccttatgcagccccagaagtctttgaagggcagcagtatgaaggaccacagctggacatctggagtatgggagttgttctttatgtccttgtctgtggagctctgccctttgatggaccgactcttccaattttgaggcagagggttctggaaggaagattccggattccgtatttcatgtcagaagattgcgagcaccttatccgaaggatgttggtcctagacccatccaaacggctaaccatagcccaaatcaaggagcataaatggatgctcatagaagttcctgtccagagacctgttctctatccacaagagcaagaaaatgagccatccatcggggagtttaatgagcaggttctgcgactgatgcacagccttggaatagatcagcagaaaaccattgagtctttgcagaacaagagctataaccactttgctgccatttatttcttgttggtggagcgcctgaaatcacatcggagcagtttcccagtggagcagagacttgatggccgccagcgtcggcctagcaccattgctgagcaaacagttgccaaggcacagactgtggggctcccagtgaccatgcattcaccgaacatgaggctgctgcgatctgccctcctcccccaggcatccaacgtggaggccttttcatttccagcatctggctgtcaggcggaagctgcattcatggaagaagagtgtgtggacactccaaaggtcaatggctgtctgcttgaccctgtgcctcctgtcctggtgcggaagggatgccagtcactgcccagcaacatgatggagacctccattgacgaagggctggagacagaaggagaggccgaggaagaccccgctcatgcctttgaggcatttcagtccacacgcagcgggcagagacggcacactctgtcagaagtgaccaatcaactggtcgtgatgcctggggcagggaaaattttctccatgaatgacagcccctcccttgacagtgtggactctgagtatgatatggggtctgttcagagggacctgaactttctggaagacaacccttcccttaaggacatcatgttagccaatcagccttcaccccgcatgacatctcccttcataagcctgagacctaccaacccagccatgcaggctctgagctcccagaaacgagaggtccacaacaggtctccagtgagcttcagagagggccgcagagcatcagatacctccctcacccagggaattgtagcatttagacaacatcttcagaatctggctagaaccaaaggaattctagagttgaacaaagtgcagttgttgtatgaacaaataggaccggaggcagaccctaacctggcgccggcggctcctcagctccaggaccttgctagcagctgccctcaggaagaagtttctcagcagcaggaaagcgtctccactctccctgccagcgtgcatccccagctgtccccacggcagagcctggagacccagtacctgcagcacagactccagaagcccagccttctgtcaaaggcccagaacacctgtcagctttattgcaaagaaccaccgcggagccttgagcagcagctgcaggaacataggctccagcagaagcgactctttcttcagaagcagtctcaactgcaggcctattttaatcagatgcagatagcagagagctcctacccacagccaagtcagcagctgccccttccccgccaggagactccaccgccttctcagcaggccccaccgttcagcctgacccagcccctgagccccgtcctggagccttcctccgagcagatgcaatacagccctttcctcagccagtaccaagagatgcagcttcagcccctgccctccacttccggtccccgggctgctcctcctctgcccacgcagctacagcagcagcagccgccaccgccaccaccccctccaccaccacgacagccaggagctgccccagcccccttacagttctcctatcagacttgtgagctgccaagcgctgcttcccctgcgccagactatcccactccctgtcagtatcctgtggatggagcccagcagagcgacctaacggggccagactgtcccagaagcccaggactgcaagaggccccctccagctacgacccactagccctctctgagctacctggactctttgattgtgaaatgctagacgctgtggatccacaacacaacgggtatgtcctggtgaattagtctcagcacaggaattgaggtgggtcaggtgaaggaagagtgtatgttcctatttttattccagccttttaaatttaaagcttattttcttgccctctccctaacggggagaaatcgagccacccaactggaatcagagggtctggctggggtggatgttgcttcctcctggttctgccccaccacaaagttttctgtggcaagtgctggaacatagttgtaggctgaggctcctgcccttcggtcgagtggagcaagctctcgagggcagcactgacaaatgtgttcctaagaagacattcagacccaggtcttatgcaggattacatccgtttattatcaagggcaaccttggtgaaagcagaaagggtgtgtgctattgcatatatatgggggaaaaggcaatatatttttcactgaagctgagcaaccacatattgctacaaggcaaatcaagaagacatcaggaaatcagatgcacaggaaataaaggaaagctgtgctttgtcattgaatcctaagttcttagctgctgatgcaagttgtcccccaaggccatcacaaagcagtggggcatgagctgtgtttcaggggccactaaataacagctggtactgaccccagaaaccgccttcatctccattcggaagcaggtgacacaccccttcagaaggtgccctgggttgccgagtgtcagaatatactcaggactccagaggtgtcacacgtggaactgacaggagacccgccaccgtggaggcagggggcaagaaactcaagaacgcatcaagagcaccagccctgggccagggaagacaggctcttcctgcagtttctcgtggacactgctggcttgcgggcagtcggtctccagggtacctgttgtctcttttccgatgtaataactactttgaccttacactatatgttgctagtagtttattgagctttgtatatttggacagtttcatatagggcttagagattttaaggacatgataaatgaacttttctgtcccatgtgaagtggtagtgcggtgcctttcccccagatcatgctttaattctttcttttctgtagaaaccaacagtttccatttatgtcaatgctaaatccaaagtcacttcagagtttgttttccaccatgtgggaatcagcattcttaatttcgttaaagttttgacttgtaatgaaatgttcaagtattacagcaatattcaaagaaagaaccacagatgtgttaaccatttaagcagatcatctgccaaacattatattactaataaaacttaaccaacacttacaattcagtcatcaaagtaagtaaaaattagatgctacagctagctaactgtatccctagaaatgatgaataatttgccatttggacagttaacatccaggtgttacaaagtcagtgttaattctaaagatgatcatttctgccctttagaatggcttgtcccatcagcagatgaatgtgttaagcacaaagcatcttccttaaagcacaaagagagggactaactgatgctgcatctagaaaacacctttaagttgcctttcctctttgtagttagcgttcaggcaggtgacgtgtggaaagtctagggggttccattctggccatgcgagcccagctcctaccaacgtcggtaacttgagcagtccctgttgctggccagagactgcctggtcgccagcgctcaccatgggtgccaggatgcttcgcagaggcactgtgctcacggttggacttggtgtcagtgggaaagggcagtgtggggactgtcatttttgtgatttaataacacacagtgaaaatccaggaagaatgaattaagcttcttctgggagttgtttattcctgctcgtgcttaagattgatgatttcgtgaaataaagaacatcatttcatttaagaga

SEQ ID NO: 293699 - DNA, 2269 bp, Homo sapiens
ggcggcgcgcgcctggctgggccctggggagcgggagggaaggagcgaaggagcgaaggagcaagcggagcggccgtcgcccaagccaagccgcgctgccaaccctcccgcccgcccgcgctcctgtccgccgtgtctagcagcggggcccagcatggtcatggcggatggcccgaggcacttgcagcgcgggccggtccgggtggggttctacgacatcgagggcacgctgggcaagggcaacttcgctgtggtgaagctggggcggcaccggatcaccaagacggaggtggcaataaaaataatcgataagtctcagctggatgcagtgaaccttgagaaaatctaccgagaagtacaaataatgaaaatgttagaccaccctcacataatcaaactttatcaggtaatggagaccaaaagtatgttgtaccttgtgacagaatatgccaaaaatggagaaatttttgactatcttgctaatcatggccggttaaatgagtctgaagccaggcgaaaattctggcaaatcctgtctgctgttgattattgtcatggtcggaagattgtgcaccgtgacctcaaagctgaaaatctcctgctggataacaacatgaatatcaaaatagcagatttcggttttggaaatttctttaaaagtggtgaactgctggcaacatggtgtggcagccccccttatgcagccccagaagtctttgaagggcagcagtatgaaggaccacagctggacatctggagtatgggagttgttctttatgtccttgtctgtggagctctgccctttgatggaccgactcttccaattttgaggcagagggttctggaaggaagattccggattccgtatttcatgtcagaagattgcgagcaccttatccgaaggatgttggtcctagacccatccaaacggctaaccatagcccaaatcaaggagcataaatggatgctcatagaagttcctgtccagagacctgttctctatccacaagagcaagaaaatgagccatccatcggggagtttaatgagcaggttctgcgactgatgcacagccttggaatagatcagcagaaaaccattgagtctttgcagaacaagagctataaccactttgctgccatttatttcttgttggtggagcgcctgaaatcacatcggagcagtttcccagtggagcagagacttgatggccgccagcgtcggcctagcaccattgctgagcaaacagttgccaaggcacagactgtggggctcccagtgaccatgcattcaccgaacatgaggctgctgcgatctgccctcctcccccaggcatccaacgtggaggccttttcatttccagcatctggctgtcaggcggaagctgcattcatggaagaagagtgtgtggacactccaaaggtcaatggctgtctgcttgaccctgtgcctcctgtcctggtgcggaagggatgccagtcactgcccagcaacatgatggagacctccattgacgaagggctggagacagaaggagaggccgaggaagaccccgctcatgcctttgaggcatttcagtccacacgcagcgggcagagacggcacactctgtcagaagtgaccaatcaactggtcgtgatgcctggggcagggaaaattttctccatgaatgacagcccctcccttgacagtgtggactctgagtatgatatggggtctgttcagagggacctgaactttctggaagacaacccttcccttaaggacatcatgttagccaatcagccttcaccaaaatctctgaaggggaaagaagtggagagaaaggtttgcttcacttcggggactgcagtttgagaaataaaagggatacagagatatctgcactttgtagaaagggcaagattatttgcttatatctgaagggaggtgggtggttttgctggatgtttggtctgaaagagttacttttgataaagttaatctaattgtagttatattttctgtgtgcttttttttaattactaagaaaaaaattggtgagttcagtagctttggtattatgagtgcaaatcataatagctccaatgtgaaaaaaaaaatcaaaagtataacttgtcacttaatgttagaaaattgcctaaaatgcagtgtaataaataatctctgtaccaaatagtaatttaaatggggtaattttctgcaaggaaaatgtactgtttttatgtttccaaccctcttgaattaaaataaaaacaacttcttttctaa

SEQ ID NO: 293700 - DNA, 3009 bp, Homo sapiens
  misc_feature (13)..(13): n is a, c, g, or t
agcaatgagccangtagttaaaaaaaaaaacaactcatcttccccctcttcatttcccttatttaaaaaaaaataataactggtagtcctcaaactaatatacccctgttcttctggaaaccactaaaaaagttgtttattgtaataatgatgactcagagaaacctgggcagcagtgccagtttgggtcatcatgggcttctgtctcagagttctgagtcctgcagttgacttgccttcacttctaatctatgtgttgtcatgcataataaatatgtgcatgtttaaatattttacttaatttctagttcgccacaagtcttgacatgttttcctttgtggatttttctgtctcagcagtgcagaaactgagtttcctctctcccctggcgtttaggtcaatggctgtctgcttgaccctgtgcctcctgtcctggtgcggaagggatgccagtcactgcccagcaacatgatggagacctccattgacgaagggctggagacagaaggagaggccgaggaagaccccgctcatgcctttgaggcatttcagtccacacgcagcgggcagagacggcacactctgtcagaagtgaccaatcaactggtcgtgatgcctggggcaggtacggtagaggagcgacactagcttgagtcttcatggcatcatgtcatactccaattgccaacaagtggtcacgatgccagccaacacctaaaattgagtcgatagcttattcctttatggattagattcagcaggtatagcagacacagcctggcagcagctatcaaaggtgaattgaaatgtctctgagttggctcccatagtccccaggattcatctgggtgccacgtgattgatcagggactctggctcttttggactggctgagatcttacagatgccacttctggagtgttttccccactaaacttgaagatgactaaattggccagtaaaagggctctgaaaagatgttttgattggaaattaaggacatggtagctgtcaaaactcaagctggttatgctttgtaccctatgttccaaggagatgctattgctgttggttttatctgttctgttttctcttaaagggaaaattttctccatgaatgacagcccctcccttgacagtgtggactctgagtatgatatggggtctgttcagagggacctgaactttctggaagacaacccttcccttaaggacatcatgttagccaatcagccttcaccccgcatgacatctcccttcataagcctgagacctaccaacccagccatgcaggctctgagctcccagaaacgagaggtccacaacaggtctccagtgagcttcagagagggccgcagagcatcagatacctccctcacccagggtgagcacttcctcctctgctttttgaaactcgcgtcgtaggagagcagtttcttgccatgttggtgtggtcacctgtggtcactgaaaggccttgtattttagttaaactgtttggtcttggtgctttctttcaggaattgtagcatttagacaacatcttcagaatctggctagaaccaaaggaattctagagttgaacaaagtgcagttgttgtatgaacaaataggaccggaggcagaccctaacctggcgccggcggctcctcagctccaggaccttgctagcagctgccctcaggtgggtaccttgggcccttccctcaatggctctgtgaggatgaggtgtgagtttgtcctgaagatggtcattttcacttagaggatttcctccagtcctggagcaaacaggctgtttgggaaaacccacagcttctttgccttgttgctgccacctgccactgacgggttcaacccatccacgctgcttccaagtgatcaataccagatggaggcctggacactctcaagctgtttttggctcacagggcagagtacagatgagtgacctcttacagtcgcccttgaactccccttctcctgccacacacacacccaaatgaaaaatacacaaatgaactacacccaaatgagaagcttctcaccactacttttgatgtggtatcactttagtaaatactacaagtggattattcatactaaaaatacaataaatactgctacttacctgattttattttgagcctattttcagtgcatccaagaggattatagttcgaggcccacatgaaggccatagcctcctggtgacaccaagagtctttgctctagtactgactaggtaattgttaactagagataatacatgcataaatgttctgcagagtaatgagccctcagcctactggctctgtaaaagctttgagtattaataagtctcagtggagttggtattcctattggacattgcaaaggtgcttcagctaagaactgagacgtttttccccatggggaattgaaaattgtttccacccccttgctcctcaggaagaagtttctcagcagcaggaaagcgtctccactctccctgccagcgtgcatccccagctgtccccacggcagagcctggagacccagtacctgcagcacagactccaggtgggtccttctccttgcgagtccacctcactctgctcatccagaatctgttcttctgcaaagcagaaacgtgttttgcctggcatttatttagggtagctgcttgattccttataggcaagtagctttgactctgtacttggagtttctagaaacgtgttcagatctagctttgtgctgtgtgttggtggtgggaaaggctttgtcctcaagccccacgaaaggatatgccactgaggggtgggaacgggagacctggcttctttctttctaattgtattcctcttaatgagtaacaaataaaatgaaaaccttaagtctgcagaatttctacatgggctttctatgttggtgcataaaaatcttaaaaagcgataaagcatagatcccgtaaaggatgaatcattcattcagcgggtgctggggcctttgctctcaagatctaa

SEQ ID NO: 293701 - DNA, 640 bp, Homo sapiens
aaagagacaaatatgtttgttgaattgaacgaggaacattcttgattcctcacaaaagctagctttctcgtcacctgcgtgaaagtcaagcatcccctcatgaggcagaaatgaaattctgtacgacctctttcagagtaaccgattgctgagtctgcttcagatcactgtctgcaccatgtatatatttcactaaatctttctggagtttccaataaataaatattcattctttaattgccacaggaagaattattttattcttagaactttgtgtatttatagagaaggtattcatgttcccaaactgtctgttcttgccatatttacaggcacagactgtggggctcccagtgaccatgcattcaccgaacatgaggctgctgcgatctgccctcctcccccaggcatccaacgtggaggccttttcatttccagcatctggctgtcaggcggaagctgcattcatggaagaagagtgtgtggacactccaaaggtacggctatgtttgagagtctcagaactggcagtttggcgagagatttcagtttggtccacaagtgttgtactttggctttattgaactttatcatttcgttaagtcactcaggagtgatgcttttgtggagaaaaacctta

SEQ ID NO: 293702 - DNA, 6950 bp, Homo sapiens
ggcggcgcgcgcctggctgggccctggggagcgggagggaaggagcgaaggagcgaaggagcaagcggagcggccgtcgcccaagccaagccgcgctgccaaccctcccgcccgcccgcgctcctgtccgccgtgtctagcagcggggcccagcatggtcatggcggatggcccgaggcacttgcagcgcgggccggtccgggtggggttctacgacatcgagggcacgctgggcaagggcaacttcgctgtggtgaagctggggcggcaccggatcaccaagacggaggtggcaataaaaataatcgataagtctcagctggatgcagtgaaccttgagaaaatctaccgagaagtacaaataatgaaaatgttagaccaccctcacataatcaaactttatcaggtaatggagaccaaaagtatgttgtaccttgtgacagaatatgccaaaaatggagaaatttttgactatcttgctaatcatggccggttaaatgagtctgaagccaggcgaaaattctggcaaatcctgtctgctgttgattattgtcatggtcggaagattgtgcaccgtgacctcaaagctgaaaatctcctgctggataacaacatgaatatcaaaatagcagatttcggttttggaaatttctttaaaagtggtgaactgctggcaacatggtgtggcagccccccttatgcagccccagaagtctttgaagggcagcagtatgaaggaccacagctggacatctggagtatgggagttgttctttatgtccttgtctgtggagctctgccctttgatggaccgactcttccaattttgaggcagagggttctggaaggaagattccggattccgtatttcatgtcagaagattgcgagcaccttatccgaaggatgttggtcctagacccatccaaacggctaaccatagcccaaatcaaggagcataaatggatgctcatagaagttcctgtccagagacctgttctctatccacaagagcaagaaaatgagccatccatcggggagtttaatgagcaggttctgcgactgatgcacagccttggaatagatcagcagaaaaccattgagtctttgcagaacaagagctataaccactttgctgccatttatttcttgttggtggagcgcctgaaatcacatcggagcagtttcccagtggagcagagacttgatggccgccagcgtcggcctagcaccattgctgagcaaacagttgccaaggcacagactgtggggctcccagtgaccatgcattcaccgaacatgaggctgctgcgatctgccctcctcccccaggcatccaacgtggaggccttttcatttccagcatctggctgtcaggcggaagctgcattcatggaagaagagtgtgtggacactccaaaggtcaatggctgtctgcttgaccctgtgcctcctgtcctggtgcggaagggatgccagtcactgcccagcaacatgatggagacctccattgacgaagggctggagacagaaggagaggccgaggaagaccccgctcatgcctttgaggcatttcagtccacacgcagcgggcagagacggcacactctgtcagaagtgaccaatcaactggtcgtgatgcctggggcagggaaaattttctccatgaatgacagcccctcccttgacagtgtggactctgagtatgatatggggtctgttcagagggacctgaactttctggaagacaacccttcccttaaggacatcatgttagccaatcagccttcaccccgcatgacatctcccttcataagcctgagacctaccaacccagccatgcaggctctgagctcccagaaacgagaggtccacaacaggtctccagtgagcttcagagagggccgcagagcatcagatacctccctcacccagggaattgtagcatttagacaacatcttcagaatctggctagaaccaaaggaattctagagttgaacaaagtgcagttgttgtatgaacaaataggaccggaggcagaccctaacctggcgccggcggctcctcagctccaggaccttgctagcagctgccctcaggaagaagtttctcagcagcaggaaagcgtctccactctccctgccagcgtgcatccccagctgtccccacggcagagcctggagacccagtacctgcagcacagactccagaagcccagccttctgtcaaaggcccagaacacctgtcagctttattgcaaagaaccaccgcggagccttgagcagcagctgcaggaacataggctccagcagaagcgactctttcttcagaagcagtctcaactgcaggcctattttaatcagatgcagatagcagagagctcctacccacagccaagtcagcagctgccccttccccgccaggagactccaccgccttctcagcaggccccaccgttcagcctgacccagcccctgagccccgtcctggagccttcctccgagcagatgcaatacagccctttcctcagccagtaccaagagatgcagcttcagcccctgccctccacttccggtccccgggctgctcctcctctgcccacgcagctacagcagcagcagccgccaccgccaccaccccctccaccaccacgacagccaggagctgccccagcccccttacagttctcctatcagacttgtgagctgccaagcgctgcttcccctgcgccagactatcccactccctgtcagtatcctgtggatggagcccagcagagcgacctaacggggccagactgtcccagaagcccaggactgcaagaggccccctccagctacgacccactagccctctctgagctacctggactctttgattgtgaaatgctagacgctgtggatccacaacacaacgggtatgtcctggtgaattagtctcagcacaggaattgaggtgggtcaggtgaaggaagagtgtatgttcctatttttattccagccttttaaatttaaagcttattttcttgccctctccctaacggggagaaatcgagccacccaactggaatcagagggtctggctggggtggatgttgcttcctcctggttctgccccaccacaaagttttctgtggcaagtgctggaacatagttgtaggctgaggctcctgcccttcggtcgagtggagcaagctctcgagggcagcactgacaaatgtgttcctaagaagacattcagacccaggtcttatgcaggattacatccgtttattatcaagggcaaccttggtgaaagcagaaagggtgtgtgctattgcatatatatgggggaaaaggcaatatatttttcactgaagctgagcaaccacatattgctacaaggcaaatcaagaagacatcaggaaatcagatgcacaggaaataaaggaaagctgtgctttgtcattgaatcctaagttcttagctgctgatgcaagttgtcccccaaggccatcacaaagcagtggggcatgagctgtgtttcaggggccactaaataacagctggtactgaccccagaaaccgccttcatctccattcggaagcaggtgacacaccccttcagaaggtgccctgggttgccgagtgtcagaatatactcaggactccagaggtgtcacacgtggaactgacaggagacccgccaccgtggaggcagggggcaagaaactcaagaacgcatcaagagcaccagccctgggccagggaagacaggctcttcctgcagtttctcgtggacactgctggcttgcgggcagtcggtctccagggtacctgttgtctcttttccgatgtaataactactttgaccttacactatatgttgctagtagtttattgagctttgtatatttggacagtttcatatagggcttagagattttaaggacatgataaatgaacttttctgtcccatgtgaagtggtagtgcggtgcctttcccccagatcatgctttaattctttcttttctgtagaaaccaacagtttccatttatgtcaatgctaaatccaaagtcacttcagagtttgttttccaccatgtgggaatcagcattcttaatttcgttaaagttttgacttgtaatgaaatgttcaagtattacagcaatattcaaagaaagaaccacagatgtgttaaccatttaagcagatcatctgccaaacattatattactaataaaacttaaccaacacttacaattcagtcatcaaagtaagtaaaaattagatgctacagctagctaactgtatccctagaaatgatgaataatttgccatttggacagttaacatccaggtgttacaaagtcagtgttaattctaaagatgatcatttctgccctttagaatggcttgtcccatcagcagatgaatgtgttaagcacaaagcatcttccttaaagcacaaagagagggactaactgatgctgcatctagaaaacacctttaagttgcctttcctctttgtagttagcgttcaggcaggtgacgtgtggaaagtctagggggttccattctggccatgcgagcccagctcctaccaacgtcggtaacttgagcagtccctgttgctggccagagactgcctggtcgccagcgctcaccatgggtgccaggatgcttcgcagaggcactgtgctcacggttggacttggtgtcagtgggaaagggcagtgtggggactgtcatttttgtgatttaataacacacagtgaaaatccaggaagaatgaattaagcttcttctgggagttgtttattcctgctcgtgcttaagattgatgatttcgtgaaataaagaacatcatttcatttaagagatcatttcattaagatctctaatctgttttgagtctttacaaaatagccagttataaaatggggcttgatttgtttagactgaaggaagacgttttcccaaaatatactacagaagtgctacaatatttgcgatattaaaatgcctgcagattgaaaatgggggccactcatttcagaactgcaggaatggtgtagttacagatcgacataaactcctgccccccaacaatgccatgagctgcttagcccaggagacctgggagctatggcaggacggttaggccagccgatgagggactgcagagaggctactggaaggttaaggacccagagagaaatcgagaggtgccctacagcagccaggcctatcaggatccgtcacacacggcagcggcgtggacaccggcctgatgcagagcgtgacccctcctgctgggacctgtgttgtaagctcctatttgcttatcttgtttatttcaagcagaaatcaataaattccataaccctctgtattgactgcaatgtaagctgctgaggagactggttctgttggtcagtcaggtgtttgctcagccctgtctgatcacctgtgctgctctgtccctaactagtgacccatggaagcttccaagcagttttctcttcatcactactaacaaacgaaacactaagaaggcttagtatcgctctttttctgcggggctactctgaagtactgacttgctttccagtctgattcacgttagcagtgtgtacactactgtatcatcatcagcttcatcaccctgtaaaccaggctcctctgaagagactttggtgagatgaacgtgaggtaaaaatttcgttcggcaaaaagtgcaatatgtgtggtactttattttttatgttctttttaaatctggggtattagtctgtgctttgggagaaatgcactagctctgcaattcccagctgggcaagtgtgtctctagtatctccacgcaactgatacactggtccctgtaaggcaaacagcatgttagcccgacaggaagagggggcccactttcacattcccggtgacactgaccgtccccagctgccccctcgccacctctgcctgcactgccttctgtcaccgtgggaaaaggaggctgatggttctctacaccatccaccttgagaatccctgcgtgggagagcatcagggcccaccaggggagtggggatggggctcaggggctgttcatgcccatctgagcaaaccccttctctcttccatccacttttgcctttgtctcaacgaggggcgtaacatttccttacagtcaagccccatcaactagaagtgcttattacttttaggattaaaaaagtaataacagactttgacttaatactctgtcttttcagaggcaaagtgggtgggtagaggggagctttaaaaatagaagtacaaaacaacatcctggaaacatatgaccccagatggaataatgtcacattccccagtgcagataatgggctgctgctggctctgtggtgtctgtctgcagaagatttgctcagtcaaggaaattcaagtggtgagacctttccaccatgggtggtaagagaaacctgccttcaccaaaatctctgaaggggaaagaagtggagagaaaggtttgcttcacttcggggactgcagtttgagaaataaaagggatacagagatatctgcactttgtagaaagggcaagattatttgcttatatctgaagggaggtgggtggttttgctggatgtttggtctgaaagagttacttttgataaagttaatctaattgtagttatattttctgtgtgcttttttttaattactaagaaaaaaattggtgagttcagtagctttggtattatgagtgcaaatcataatagctccaatgtgaaaaaaaaaatcaaaagtataacttgtcacttaatgttagaaaattgcctaaaatgcagtgtaataaataatctctgtaccaaatagtaatttaaatggggtaattttctgcaaggaaaatgtactgtttttatgtttccaaccctcttgaattaaaataaaaacaacttcttttctaa

SEQ ID NO: 293703 - DNA, 7505 bp, Homo sapiens
ggcggcgcgcgcctggctgggccctggggagcgggagggaaggagcgaaggagcgaaggagcaagcggagcggccgtcgcccaagccaagccgcgctgccaaccctcccgcccgcccgcgctcctgtccgccgtgtctagcagcggggcccagcatggtcatggcggatggcccgaggcacttgcagcgcgggccggtccgggtggggttctacgacatcgagggcacgctgggcaagggcaacttcgctgtggtgaagctggggcggcaccggatcaccaagacggaggtggcaataaaaataatcgataagtctcagctggatgcagtgaaccttgagaaaatctaccgagaagtacaaataatgaaaatgttagaccaccctcacataatcaaactttatcaggtaatggagaccaaaagtatgttgtaccttgtgacagaatatgccaaaaatggagaaatttttgactatcttgctaatcatggccggttaaatgagtctgaagccaggcgaaaattctggcaaatcctgtctgctgttgattattgtcatggtcggaagattgtgcaccgtgacctcaaagctgaaaatctcctgctggataacaacatgaatatcaaaatagcagatttcggttttggaaatttctttaaaagtggtgaactgctggcaacatggtgtggcagccccccttatgcagccccagaagtctttgaagggcagcagtatgaaggaccacagctggacatctggagtatgggagttgttctttatgtccttgtctgtggagctctgccctttgatggaccgactcttccaattttgaggcagagggttctggaaggaagattccggattccgtatttcatgtcagaagattgcgagcaccttatccgaaggatgttggtcctagacccatccaaacggctaaccatagcccaaatcaaggagcataaatggatgctcatagaagttcctgtccagagacctgttctctatccacaagagcaagaaaatgagccatccatcggggagtttaatgagcaggttctgcgactgatgcacagccttggaatagatcagcagaaaaccattgagtctttgcagaacaagagctataaccactttgctgccatttatttcttgttggtggagcgcctgaaatcacatcggagcagtttcccagtggagcagagacttgatggccgccagcgtcggcctagcaccattgctgagcaaacagttgccaaggcacagactgtggggctcccagtgaccatgcattcaccgaacatgaggctgctgcgatctgccctcctcccccaggcatccaacgtggaggccttttcatttccagcatctggctgtcaggcggaagctgcattcatggaagaagagtgtgtggacactccaaaggtcaatggctgtctgcttgaccctgtgcctcctgtcctggtgcggaagggatgccagtcactgcccagcaacatgatggagacctccattgacgaagggctggagacagaaggagaggccgaggaagaccccgctcatgcctttgaggcatttcagtccacacgcagcgggcagagacggcacactctgtcagaagtgaccaatcaactggtcgtgatgcctggggcagggaaaattttctccatgaatgacagcccctcccttgacagtgtggactctgagtatgatatggggtctgttcagagggacctgaactttctggaagacaacccttcccttaaggacatcatgttagccaatcagccttcaccccgcatgacatctcccttcataagcctgagacctaccaacccagccatgcaggctctgagctcccagaaacgagaggtccacaacaggtctccagtgagcttcagagagggccgcagagcatcagatacctccctcacccagggaattgtagcatttagacaacatcttcagaatctggctagaaccaaaggaattctagagttgaacaaagtgcagttgttgtatgaacaaataggaccggaggcagaccctaacctggcgccggcggctcctcagctccaggaccttgctagcagctgccctcaggaagaagtttctcagcagcaggaaagcgtctccactctccctgccagcgtgcatccccagctgtccccacggcagagcctggagacccagtacctgcagcacagactccagaagcccagccttctgtcaaaggcccagaacacctgtcagctttattgcaaagaaccaccgcggagccttgagcagcagctgcaggaacataggctccagcagaagcgactctttcttcagaagcagtctcaactgcaggcctattttaatcagatgcagatagcagagagctcctacccacagccaagtcagcagctgccccttccccgccaggagactccaccgccttctcagcaggccccaccgttcagcctgacccagcccctgagccccgtcctggagccttcctccgagcagatgcaatacagccctttcctcagccagtaccaagagatgcagcttcagcccctgccctccacttccggtccccgggctgctcctcctctgcccacgcagctacagcagcagcagccgccaccgccaccaccccctccaccaccacgacagccaggagctgccccagcccccttacagttctcctatcagacttgtgagctgccaagcgctgcttcccctgcgccagactatcccactccctgtcagtatcctgtggatggagcccagcagagcgacctaacggggccagactgtcccagaagcccaggactgcaagaggccccctccagctacgacccactagccctctctgagctacctggactctttgattgtgaaatgctagacgctgtggatccacaacacaacgggtatgtcctggtgaattagtctcagcacaggaattgaggtgggtcaggtgaaggaagagtgtatgttcctatttttattccagccttttaaatttaaagcttattttcttgccctctccctaacggggagaaatcgagccacccaactggaatcagagggtctggctggggtggatgttgcttcctcctggttctgccccaccacaaagttttctgtggcaagtgctggaacatagttgtaggctgaggctcctgcccttcggtcgagtggagcaagctctcgagggcagcactgacaaatgtgttcctaagaagacattcagacccaggtcttatgcaggattacatccgtttattatcaagggcaaccttggtgaaagcagaaagggtgtgtgctattgcatatatatgggggaaaaggcaatatatttttcactgaagctgagcaaccacatattgctacaaggcaaatcaagaagacatcaggaaatcagatgcacaggaaataaaggaaagctgtgctttgtcattgaatcctaagttcttagctgctgatgcaagttgtcccccaaggccatcacaaagcagtggggcatgagctgtgtttcaggggccactaaataacagctggtactgaccccagaaaccgccttcatctccattcggaagcaggtgacacaccccttcagaaggtgccctgggttgccgagtgtcagaatatactcaggactccagaggtgtcacacgtggaactgacaggagacccgccaccgtggaggcagggggcaagaaactcaagaacgcatcaagagcaccagccctgggccagggaagacaggctcttcctgcagtttctcgtggacactgctggcttgcgggcagtcggtctccagggtacctgttgtctcttttccgatgtaataactactttgaccttacactatatgttgctagtagtttattgagctttgtatatttggacagtttcatatagggcttagagattttaaggacatgataaatgaacttttctgtcccatgtgaagtggtagtgcggtgcctttcccccagatcatgctttaattctttcttttctgtagaaaccaacagtttccatttatgtcaatgctaaatccaaagtcacttcagagtttgttttccaccatgtgggaatcagcattcttaatttcgttaaagttttgacttgtaatgaaatgttcaagtattacagcaatattcaaagaaagaaccacagatgtgttaaccatttaagcagatcatctgccaaacattatattactaataaaacttaaccaacacttacaattcagtcatcaaagtaagtaaaaattagatgctacagctagctaactgtatccctagaaatgatgaataatttgccatttggacagttaacatccaggtgttacaaagtcagtgttaattctaaagatgatcatttctgccctttagaatggcttgtcccatcagcagatgaatgtgttaagcacaaagcatcttccttaaagcacaaagagagggactaactgatgctgcatctagaaaacacctttaagttgcctttcctctttgtagttagcgttcaggcaggtgacgtgtggaaagtctagggggttccattctggccatgcgagcccagctcctaccaacgtcggtaacttgagcagtccctgttgctggccagagactgcctggtcgccagcgctcaccatgggtgccaggatgcttcgcagaggcactgtgctcacggttggacttggtgtcagtgggaaagggcagtgtggggactgtcatttttgtgatttaataacacacagtgaaaatccaggaagaatgaattaagcttcttctgggagttgtttattcctgctcgtgcttaagattgatgatttcgtgaaataaagaacatcatttcatttaagagatcatttcattaagatctctaatctgttttgagtctttacaaaatagccagttataaaatggggcttgatttgtttagactgaaggaagacgttttcccaaaatatactacagaagtgctacaatatttgcgatattaaaatgcctgcagattgaaaatgggggccactcatttcagaactgcaggaatggtgtagttacagatcgacataaactcctgccccccaacaatgccatgagctgcttagcccaggagacctgggagctatggcaggacggttaggccagccgatgagggactgcagagaggctactggaaggttaaggacccagagagaaatcgagaggtgccctacagcagccaggcctatcaggatccgtcacacacggcagcggcgtggacaccggcctgatgcagagcgtgacccctcctgctgggacctgtgttgtaagctcctatttgcttatcttgtttatttcaagcagaaatcaataaattccataaccctctgtattgactgcaatgtaagctgctgaggagactggttctgttggtcagtcaggtgtttgctcagccctgtctgatcacctgtgctgctctgtccctaactagtgacccatggaagcttccaagcagttttctcttcatcactactaacaaacgaaacactaagaaggcttagtatcgctctttttctgcggggctactctgaagtactgacttgctttccagtctgattcacgttagcagtgtgtacactactgtatcatcatcagcttcatcaccctgtaaaccaggctcctctgaagagactttggtgagatgaacgtgaggtaaaaatttcgttcggcaaaaagtgcaatatgtgtggtactttattttttatgttctttttaaatctggggtattagtctgtgctttgggagaaatgcactagctctgcaattcccagctgggcaagtgtgtctctagtatctccacgcaactgatacactggtccctgtaaggcaaacagcatgttagcccgacaggaagagggggcccactttcacattcccggtgacactgaccgtccccagctgccccctcgccacctctgcctgcactgccttctgtcaccgtgggaaaaggaggctgatggttctctacaccatccaccttgagaatccctgcgtgggagagcatcagggcccaccaggggagtggggatggggctcaggggctgttcatgcccatctgagcaaaccccttctctcttccatccacttttgcctttgtctcaacgaggggcgtaacatttccttacagtcaagccccatcaactagaagtgcttattacttttaggattaaaaaagtaataacagactttgacttaatactctgtcttttcagaggcaaagtgggtgggtagaggggagctttaaaaatagaagtacaaaacaacatcctggaaacatatgaccccagatggaataatgtcacattccccagtgcagataatgggctgctgctggctctgtggtgtctgtctgcagaagatttgctcagtcaaggaaattcaagtggtgagacctttccaccatgggtggtaagagaaacctgccttcaccaaaatctctgaaggggaaagaagtggagagaaaggtttgcttcacttcggggactgcagtttgagaaataaaagggatacagagatatctgcactttgtagaaagggcaagattatttgcttatatctgaagggaggtgggtggttttgctggatgtttggtctgaaagagttacttttgataaagttaatctaattgtagttatattttctgtgtgcttttttttaattactaagaaaaaaattggtgagttcagtagctttggtattatgagtgcaaatcataatagctccaatgtgaaaaaaaaaatcaaaagtataacttgtcacttaatgttagaaaattgcctaaaatgcagtgtaataaataatctctgtaccaaatagtaatttaaatggggtaattttctgcaaggaaaatgtactgtttttatgtttccaaccctcttgaattaaaataaaaacaacttcttttctaaaaaaaaaaaaaaaaaaaaaaaaaaaaaaaaaaaaaaaaaaaaaaaaaaaaaaaaaaaaaaaaaaaaaaaaaaaaaaaaaaaaaaaaaaaaaaaaaaaaaaaaaaaaaaaaatataaaaaaaaaaaacaaactaaaaaaaaaaaaaaacaaaacacaaactatttcctataaaactttctccatatcatttaaaaaaaacctcttcacctccttttcttactctatatctcttatactctaaacaccccacaattctattcttttttctcctaaaaaacattttctttacatatttattcttacttctctcttccataaaatctacttttatactaaacaatcttttcttcctcctttttaataaaaaaaatttctcttacctccacttttaattttctttttctacaccaatatcttcttcaaatctcttcaacctactttttttaaattacccttcctctaaccatttttttccccatttttaaatcaaatacaactttctccccttctctacctttttcaacaatctcttactattctaaaacctttcaaaaa

SEQ ID NO: 293704 - DNA, 6924 bp, Homo sapiens
ggcggcgcgcgcctggctgggccctggggagcgggagggaaggagcgaaggagcgaaggagcaagcggagcggccgtcgcccaagccaagccgcgctgccaaccctcccgcccgcccgcgctcctgtccgccgtgtctagcagcggggcccagcatggtcatggcggatggcccgaggcacttgcagcgcgggccggtccgggtggggttctacgacatcgagggcacgctgggcaagggcaacttcgctgtggtgaagctggggcggcaccggatcaccaagacggaggtggcaataaaaataatcgataagtctcagctggatgcagtgaaccttgagaaaatctaccgagaagtacaaataatgaaaatgttagaccaccctcacataatcaaactttatcaggtaatggagaccaaaagtatgttgtaccttgtgacagaatatgccaaaaatggagaaatttttgactatcttgctaatcatggccggttaaatgagtctgaagccaggcgaaaattctggcaaatcctgtctgctgttgattattgtcatggtcggaagattgtgcaccgtgacctcaaagctgaaaatctcctgctggataacaacatgaatatcaaaatagcagatttcggttttggaaatttctttaaaagtggtgaactgctggcaacatggtgtggcagccccccttatgcagccccagaagtctttgaagggcagcagtatgaaggaccacagctggacatctggagtatgggagttgttctttatgtccttgtctgtggagctctgccctttgatggaccgactcttccaattttgaggcagagggttctggaaggaagattccggattccgtatttcatgtcagaagattgcgagcaccttatccgaaggatgttggtcctagacccatccaaacggctaaccatagcccaaatcaaggagcataaatggatgctcatagaagttcctgtccagagacctgttctctatccacaagagcaagaaaatgagccatccatcggggagtttaatgagcaggttctgcgactgatgcacagccttggaatagatcagcagaaaaccattgagtctttgcagaacaagagctataaccactttgctgccatttatttcttgttggtggagcgcctgaaatcacatcggagcagtttcccagtggagcagagacttgatggccgccagcgtcggcctagcaccattgctgagcaaacagttgccaaggcacagactgtggggctcccagtgaccatgcattcaccgaacatgaggctgctgcgatctgccctcctcccccaggcatccaacgtggaggccttttcatttccagcatctggctgtcaggcggaagctgcattcatggaagaagagtgtgtggacactccaaaggtcaatggctgtctgcttgaccctgtgcctcctgtcctggtgcggaagggatgccagtcactgcccagcaacatgatggagacctccattgacgaagggctggagacagaaggagaggccgaggaagaccccgctcatgcctttgaggcatttcagtccacacgcagcgggcagagacggcacactctgtcagaagtgaccaatcaactggtcgtgatgcctggggcagggaaaattttctccatgaatgacagcccctcccttgacagtgtggactctgagtatgatatggggtctgttcagagggacctgaactttctggaagacaacccttcccttaaggacatcatgttagccaatcagccttcaccccgcatgacatctcccttcataagcctgagacctaccaacccagccatgcaggctctgagctcccagaaacgagaggtccacaacaggtctccagtgagcttcagagagggccgcagagcatcagatacctccctcacccagggaattgtagcatttagacaacatcttcagaatctggctagaaccaaaggaattctagagttgaacaaagtgcagttgttgtatgaacaaataggaccggaggcagaccctaacctggcgccggcggctcctcagctccaggaccttgctagcagctgccctcaggaagaagtttctcagcagcaggaaagcgtctccactctccctgccagcgtgcatccccagctgtccccacggcagagcctggagacccagtacctgcagcacagactccagaagcccagccttctgtcaaaggcccagaacacctgtcagctttattgcaaagaaccaccgcggagccttgagcagcagctgcaggaacataggctccagcagaagcgactctttcttcagaagcagtctcaactgcaggcctattttaatcagatgcagatagcagagagctcctacccacagccaagtcagcagctgccccttccccgccaggagactccaccgccttctcagcaggccccaccgttcagcctgacccagcccctgagccccgtcctggagccttcctccgagcagatgcaatacagccctttcctcagccagtaccaagagatgcagcttcagcccctgccctccacttccggtccccgggctgctcctcctctgcccacgcagctacagcagcagcagccgccaccgccaccaccccctccaccaccacgacagccaggagctgccccagcccccttacagttctcctatcagacttgtgagctgccaagcgctgcttcccctgcgccagactatcccactccctgtcagtatcctgtggatggagcccagcagagcgacctaacggggccagactgtcccagaagcccaggactgcaagaggccccctccagctacgacccactagccctctctgagctacctggactctttgattgtgaaatgctagacgctgtggatccacaacacaacgggtatgtcctggtgaattagtctcagcacaggaattgaggtgggtcaggtgaaggaagagtgtatgttcctatttttattccagccttttaaatttaaagcttattttcttgccctctccctaacggggagaaatcgagccacccaactggaatcagagggtctggctggggtggatgttgcttcctcctggttctgccccaccacaaagttttctgtggcaagtgctggaacatagttgtaggctgaggctcctgcccttcggtcgagtggagcaagctctcgagggcagcactgacaaatgtgttcctaagaagacattcagacccaggtcttatgcaggattacatccgtttattatcaagggcaaccttggtgaaagcagaaagggtgtgtgctattgcatatatatgggggaaaaggcaatatatttttcactgaagctgagcaaccacatattgctacaaggcaaatcaagaagacatcaggaaatcagatgcacaggaaataaaggaaagctgtgctttgtcattgaatcctaagttcttagctgctgatgcaagttgtcccccaaggccatcacaaagcagtggggcatgagctgtgtttcaggggccactaaataacagctggtactgaccccagaaaccgccttcatctccattcggaagcaggtgacacaccccttcagaaggtgccctgggttgccgagtgtcagaatatactcaggactccagaggtgtcacacgtggaactgacaggagacccgccaccgtggaggcagggggcaagaaactcaagaacgcatcaagagcaccagccctgggccagggaagacaggctcttcctgcagtttctcgtggacactgctggcttgcgggcagtcggtctccagggtacctgttgtctcttttccgatgtaataactactttgaccttacactatatgttgctagtagtttattgagctttgtatatttggacagtttcatatagggcttagagattttaaggacatgataaatgaacttttctgtcccatgtgaagtggtagtgcggtgcctttcccccagatcatgctttaattctttcttttctgtagaaaccaacagtttccatttatgtcaatgctaaatccaaagtcacttcagagtttgttttccaccatgtgggaatcagcattcttaatttcgttaaagttttgacttgtaatgaaatgttcaagtattacagcaatattcaaagaaagaaccacagatgtgttaaccatttaagcagatcatctgccaaacattatattactaataaaacttaaccaacacttacaattcagtcatcaaagtaagtaaaaattagatgctacagctagctaactgtatccctagaaatgatgaataatttgccatttggacagttaacatccaggtgttacaaagtcagtgttaattctaaagatgatcatttctgccctttagaatggcttgtcccatcagcagatgaatgtgttaagcacaaagcatcttccttaaagcacaaagagagggactaactgatgctgcatctagaaaacacctttaagttgcctttcctctttgtagttagcgttcaggcaggtgacgtgtggaaagtctagggggttccattctggccatgcgagcccagctcctaccaacgtcggtaacttgagcagtccctgttgctggccagagactgcctggtcgccagcgctcaccatgggtgccaggatgcttcgcagaggcactgtgctcacggttggacttggtgtcagtgggaaagggcagtgtggggactgtcatttttgtgatttaataacacacagtgaaaatccaggaagaatgaattaagcttcttctgggagttgtttattcctgctcgtgcttaagattgatgatttcgtgaaataaagaacatcatttcatttaagagatcatttcattaagatctctaatctgttttgagtctttacaaaatagccagttataaaatggggcttgatttgtttagactgaaggaagacgttttcccaaaatatactacagaagtgctacaatatttgcgatattaaaatgcctgcagattgaaaatgggggccactcatttcagaactgcaggaatggtgtagttacagatcgacataaactcctgccccccaacaatgccatgagctgcttagcccaggagacctgggagctatggcaggacggttaggccagccgatgagggactgcagagaggctactggaaggttaaggacccagagagaaatcgagaggtgccctacagcagccaggcctatcaggatccgtcacacacggcagcggcgtggacaccggcctgatgcagagcgtgacccctcctgctgggacctgtgttgtaagctcctatttgcttatcttgtttatttcaagcagaaatcaataaattccataaccctctgtattgactgcaatgtaagctgctgaggagactggttctgttggtcagtcaggtgtttgctcagccctgtctgatcacctgtgctgctctgtccctaactagtgacccatggaagcttccaagcagttttctcttcatcactactaacaaacgaaacactaagaaggcttagtatcgctctttttctgcggggctactctgaagtactgacttgctttccagtctgattcacgttagcagtgtgtacactactgtatcatcatcagcttcatcaccctgtaaaccaggctcctctgaagagactttggtgagatgaacgtgaggtaaaaatttcgttcggcaaaaagtgcaatatgtgtggtactttattttttatgttctttttaaatctggggtattagtctgtgctttgggagaaatgcactagctctgcaattcccagctgggcaagtgtgtctctagtatctccacgcaactgatacactggtccctgtaaggcaaacagcatgttagcccgacaggaagagggggcccactttcacattcccggtgacactgaccgtccccagctgccccctcgccacctctgcctgcactgccttctgtcaccgtgggaaaaggaggctgatggttctctacaccatccaccttgagaatccctgcgtgggagagcatcagggcccaccaggggagtggggatggggctcaggggctgttcatgcccatctgagcaaaccccttctctcttccatccacttttgcctcctaggaaagaaaaagtcagtggccctttcttcctcagatatcaagaactcccaagtgtttaaaccgtatgctggagtcagtggttgggacagacaggagcccaagactgaagccagcccttgcctcttgtgtcccttcccaactctggtgctggagtaatggggtgctctgcattttgatggggagcaaggggggaccccccctgtaggagtatcggcctctcccctgccccctaccctctctcgtggaccaaagtctccagcagaagggactcatcataagactgacgactcccccacctccacccacacaccgagtgtcatcagtcctaaaggcagggaaacgctcacagaattctgcccacgggttagatgtggggagaaggatattctcagctccagagtgattaggtgatcagccagaaactaaggcaaggtgacaagcagcagcctggagtcacagttggtcccaggcgtgtgggcactaagcagcctctggagacatgcgggcagttgaggatgcaaggacacagtgagtgagtggcgctcctttttggggtcctccagcctctagtcaagccccaggttcgtaaatatgtttgtattacattttaaaacctgtatcaacagtcacatttaagctccctattggtttaaagaaaattcatactccaggtaactttttcccattcgacctcctatagagacaatatgcagtgtgtcatttcacagtctcagtccctgtgaacagtggctgacaccggtgccagggctgacctgctacactca

SEQ ID NO: 293705 - DNA, 5099 bp, Homo sapiens
ggcggcgcgcgcctggctgggccctggggagcgggagggaaggagcgaaggagcgaaggagcaagcggagcggccgtcgcccaagccaagccgcgctgccaaccctcccgcccgcccgcgctcctgtccgccgtgtctagcagcggggcccagcatggtcatggcggatggcccgaggcacttgcagcgcgggccggtccgggtggggttctacgacatcgagggcacgctgggcaagggcaacttcgctgtggtgaagctggggcggcaccggatcaccaagacggaggtggcaataaaaataatcgataagtctcagctggatgcagtgaaccttgagaaaatctaccgagaagtacaaataatgaaaatgttagaccaccctcacataatcaaactttatcaggtaatggagaccaaaagtatgttgtaccttgtgacagaatatgccaaaaatggagaaatttttgactatcttgctaatcatggccggttaaatgagtctgaagccaggcgaaaattctggcaaatcctgtctgctgttgattattgtcatggtcggaagattgtgcaccgtgacctcaaagctgaaaatctcctgctggataacaacatgaatatcaaaatagcagatttcggttttggaaatttctttaaaagtggtgaactgctggcaacatggtgtggcagccccccttatgcagccccagaagtctttgaagggcagcagtatgaaggaccacagctggacatctggagtatgggagttgttctttatgtccttgtctgtggagctctgccctttgatggaccgactcttccaattttgaggcagagggttctggaaggaagattccggattccgtatttcatgtcagaagattgcgagcaccttatccgaaggatgttggtcctagacccatccaaacggctaaccatagcccaaatcaaggagcataaatggatgctcatagaagttcctgtccagagacctgttctctatccacaagagcaagaaaatgagccatccatcggggagtttaatgagcaggttctgcgactgatgcacagccttggaatagatcagcagaaaaccattgagtctttgcagaacaagagctataaccactttgctgccatttatttcttgttggtggagcgcctgaaatcacatcggagcagtttcccagtggagcagagacttgatggccgccagcgtcggcctagcaccattgctgagcaaacagttgccaaggcacagactgtggggctcccagtgaccatgcattcaccgaacatgaggctgctgcgatctgccctcctcccccaggcatccaacgtggaggccttttcatttccagcatctggctgtcaggcggaagctgcattcatggaagaagagtgtgtggacactccaaaggtcaatggctgtctgcttgaccctgtgcctcctgtcctggtgcggaagggatgccagtcactgcccagcaacatgatggagacctccattgacgaagggctggagacagaaggagaggccgaggaagaccccgctcatgcctttgaggcatttcagtccacacgcagcgggcagagacggcacactctgtcagaagtgaccaatcaactggtcgtgatgcctggggcagggaaaattttctccatgaatgacagcccctcccttgacagtgtggactctgagtatgatatggggtctgttcagagggacctgaactttctggaagacaacccttcccttaaggacatcatgttagccaatcagccttcaccccgcatgacatctcccttcataagcctgagacctaccaacccagccatgcaggctctgagctcccagaaacgagaggtccacaacaggtctccagtgagcttcagagagggccgcagagcatcagatacctccctcacccagggaattgtagcatttagacaacatcttcagaatctggctagaaccaaaggaattctagagttgaacaaagtgcagttgttgtatgaacaaataggaccggaggcagaccctaacctggcgccggcggctcctcagctccaggaccttgctagcagctgccctcaggaagaagtttctcagcagcaggaaagcgtctccactctccctgccagcgtgcatccccagctgtccccacggcagagcctggagacccagtacctgcagcacagactccagaagcccagccttctgtcaaaggcccagaacacctgtcagctttattgcaaagaaccaccgcggagccttgagcagcagctgcaggaacataggctccagcagaagcgactctttcttcagaagcagtctcaactgcaggcctattttaatcagatgcagatagcagagagctcctacccacagccaagtcagcagctgccccttccccgccaggagactccaccgccttctcagcaggccccaccgttcagcctgacccagcccctgagccccgtcctggagccttcctccgagcagatgcaatacagccctttcctcagccagtaccaagagatgcagcttcagcccctgccctccacttccggtccccgggctgctcctcctctgcccacgcagctacagcagcagcagccgccaccgccaccaccccctccaccaccacgacagccaggagctgccccagcccccttacagttctcctatcagacttgtgagctgccaagcgctgcttcccctgcgccagactatcccactccctgtcagtatcctgtggatggagcccagcagagcgacctaacggggccagactgtcccagaagcccaggactgcaagaggccccctccagctacgacccactagccctctctgagctacctggactctttgattgtgaaatgctagacgctgtggatccacaacacaacgggtatgtcctggtgaattagtctcagcacaggaattgaggtgggtcaggtgaaggaagagtgtatgttcctatttttattccagccttttaaatttaaagcttattttcttgccctctccctaacggggagaaatcgagccacccaactggaatcagagggtctggctggggtggatgttgcttcctcctggttctgccccaccacaaagttttctgtggcaagtgctggaacatagttgtaggctgaggctcctgcccttcggtcgagtggagcaagctctcgagggcagcactgacaaatgtgttcctaagaagacattcagacccaggtcttatgcaggattacatccgtttattatcaagggcaaccttggtgaaagcagaaagggtgtgtgctattgcatatatatgggggaaaaggcaatatatttttcactgaagctgagcaaccacatattgctacaaggcaaatcaagaagacatcaggaaatcagatgcacaggaaataaaggaaagctgtgctttgtcattgaatcctaagttcttagctgctgatgcaagttgtcccccaaggccatcacaaagcagtggggcatgagctgtgtttcaggggccactaaataacagctggtactgaccccagaaaccgccttcatctccattcggaagcaggtgacacaccccttcagaaggtgccctgggttgccgagtgtcagaatatactcaggactccagaggtgtcacacgtggaactgacaggagacccgccaccgtggaggcagggggcaagaaactcaagaacgcatcaagagcaccagccctgggccagggaagacaggctcttcctgcagtttctcgtggacactgctggcttgcgggcagtcggtctccagggtacctgttgtctcttttccgatgtaataactactttgaccttacactatatgttgctagtagtttattgagctttgtatatttggacagtttcatatagggcttagagattttaaggacatgataaatgaacttttctgtcccatgtgaagtggtagtgcggtgcctttcccccagatcatgctttaattctttcttttctgtagaaaccaacagtttccatttatgtcaatgctaaatccaaagtcacttcagagtttgttttccaccatgtgggaatcagcattcttaatttcgttaaagttttgacttgtaatgaaatgttcaagtattacagcaatattcaaagaaagaaccacagatgtgttaaccatttaagcagatcatctgccaaacattatattactaataaaacttaaccaacacttacaattcagtcatcaaagtaagtaaaaattagatgctacagctagctaactgtatccctagaaatgatgaataatttgccatttggacagttaacatccaggtgttacaaagtcagtgttaattctaaagatgatcatttctgccctttagaatggcttgtcccatcagcagatgaatgtgttaagcacaaagcatcttccttaaagcacaaagagagggactaactgatgctgcatctagaaaacacctttaagttgcctttcctctttgtagttagcgttcaggcaggtgacgtgtggaaagtctagggggttccattctggccatgcgagcccagctcctaccaacgtcggtaacttgagcagtccctgttgctggccagagactgcctggtcgccagcgctcaccatgggtgccaggatgcttcgcagaggcactgtgctcacggttggacttggtgtcagtgggaaagggcagtgtggggactgtcatttttgtgatttaataacacacagtgaaaatccaggaagaatgaattaagcttcttctgggagttgtttattcctgctcgtgcttaagattgatgatttcgtgaaataaagaacatcatttcatttaagagatcatttcattaagatctctaatctgttttgagtctttacaaaatagccagttataaaatggggcttgatttgtttagactgaaggaagacgttttcccaaaattgcctaaaatgcagtgtaataaataatctctgtaccaaatagtaatttaaatggggtaattttctgcaaggaaaatgtactgtttttatgtttccaaccctcttgaattaaaataaaaacaacttcttttctaa

SEQ ID NO: 293706 - DNA, 7086 bp, Homo sapiens
ggcggcgcgcgcctggctgggccctggggagcgggagggaaggagcgaaggagcgaaggagcaagcggagcggccgtcgcccaagccaagccgcgctgccaaccctcccgcccgcccgcgctcctgtccgccgtgtctagcagcggggcccagcatggtcatggcggatggcccgaggcacttgcagcgcgggccggtccgggtggggttctacgacatcgagggcacgctgggcaagggcaacttcgctgtggtgaagctggggcggcaccggatcaccaagacggaggtggcaataaaaataatcgataagtctcagctggatgcagtgaaccttgagaaaatctaccgagaagtacaaataatgaaaatgttagaccaccctcacataatcaaactttatcaggtaatggagaccaaaagtatgttgtaccttgtgacagaatatgccaaaaatggagaaatttttgactatcttgctaatcatggccggttaaatgagtctgaagccaggcgaaaattctggcaaatcctgtctgctgttgattattgtcatggtcggaagattgtgcaccgtgacctcaaagctgaaaatctcctgctggataacaacatgaatatcaaaatagcagatttcggttttggaaatttctttaaaagtggtgaactgctggcaacatggtgtggcagccccccttatgcagccccagaagtctttgaagggcagcagtatgaaggaccacagctggacatctggagtatgggagttgttctttatgtccttgtctgtggagctctgccctttgatggaccgactcttccaattttgaggcagagggttctggaaggaagattccggattccgtatttcatgtcagaagattgcgagcaccttatccgaaggatgttggtcctagacccatccaaacggctaaccatagcccaaatcaaggagcataaatggatgctcatagaagttcctgtccagagacctgttctctatccacaagagcaagaaaatgagccatccatcggggagtttaatgagcaggttctgcgactgatgcacagccttggaatagatcagcagaaaaccattgagtctttgcagaacaagagctataaccactttgctgccatttatttcttgttggtggagcgcctgaaatcacatcggagcagtttcccagtggagcagagacttgatggccgccagcgtcggcctagcaccattgctgagcaaacagttgccaaggcacagactgtggggctcccagtgaccatgcattcaccgaacatgaggctgctgcgatctgccctcctcccccaggcatccaacgtggaggccttttcatttccagcatctggctgtcaggcggaagctgcattcatggaagaagagtgtgtggacactccaaaggtcaatggctgtctgcttgaccctgtgcctcctgtcctggtgcggaagggatgccagtcactgcccagcaacatgatggagacctccattgacgaagggctggagacagaaggagaggccgaggaagaccccgctcatgcctttgaggcatttcagtccacacgcagcgggcagagacggcacactctgtcagaagtgaccaatcaactggtcgtgatgcctggggcagggaaaattttctccatgaatgacagcccctcccttgacagtgtggactctgagtatgatatggggtctgttcagagggacctgaactttctggaagacaacccttcccttaaggacatcatgttagccaatcagccttcaccccgcatgacatctcccttcataagcctgagacctaccaacccagccatgcaggctctgagctcccagaaacgagaggtccacaacaggtctccagtgagcttcagagagggccgcagagcatcagatacctccctcacccagggtgagcacttcctcctctgctttttgaaactcgcgtcgtaggagagcagtttcttgccatgttggtgtggtcacctgtggtcactgaaaggccttgtattttagttaaactgtttggtcttggtgctttctttcaggaattgtagcatttagacaacatcttcagaatctggctagaaccaaaggaattctagagttgaacaaagtgcagttgttgtatgaacaaataggaccggaggcagaccctaacctggcgccggcggctcctcagctccaggaccttgctagcagctgccctcaggaagaagtttctcagcagcaggaaagcgtctccactctccctgccagcgtgcatccccagctgtccccacggcagagcctggagacccagtacctgcagcacagactccagaagcccagccttctgtcaaaggcccagaacacctgtcagctttattgcaaagaaccaccgcggagccttgagcagcagctgcaggaacataggctccagcagaagcgactctttcttcagaagcagtctcaactgcaggcctattttaatcagatgcagatagcagagagctcctacccacagccaagtcagcagctgccccttccccgccaggagactccaccgccttctcagcaggccccaccgttcagcctgacccagcccctgagccccgtcctggagccttcctccgagcagatgcaatacagccctttcctcagccagtaccaagagatgcagcttcagcccctgccctccacttccggtccccgggctgctcctcctctgcccacgcagctacagcagcagcagccgccaccgccaccaccccctccaccaccacgacagccaggagctgccccagcccccttacagttctcctatcagacttgtgagctgccaagcgctgcttcccctgcgccagactatcccactccctgtcagtatcctgtggatggagcccagcagagcgacctaacggggccagactgtcccagaagcccaggactgcaagaggccccctccagctacgacccactagccctctctgagctacctggactctttgattgtgaaatgctagacgctgtggatccacaacacaacgggtatgtcctggtgaattagtctcagcacaggaattgaggtgggtcaggtgaaggaagagtgtatgttcctatttttattccagccttttaaatttaaagcttattttcttgccctctccctaacggggagaaatcgagccacccaactggaatcagagggtctggctggggtggatgttgcttcctcctggttctgccccaccacaaagttttctgtggcaagtgctggaacatagttgtaggctgaggctcctgcccttcggtcgagtggagcaagctctcgagggcagcactgacaaatgtgttcctaagaagacattcagacccaggtcttatgcaggattacatccgtttattatcaagggcaaccttggtgaaagcagaaagggtgtgtgctattgcatatatatgggggaaaaggcaatatatttttcactgaagctgagcaaccacatattgctacaaggcaaatcaagaagacatcaggaaatcagatgcacaggaaataaaggaaagctgtgctttgtcattgaatcctaagttcttagctgctgatgcaagttgtcccccaaggccatcacaaagcagtggggcatgagctgtgtttcaggggccactaaataacagctggtactgaccccagaaaccgccttcatctccattcggaagcaggtgacacaccccttcagaaggtgccctgggttgccgagtgtcagaatatactcaggactccagaggtgtcacacgtggaactgacaggagacccgccaccgtggaggcagggggcaagaaactcaagaacgcatcaagagcaccagccctgggccagggaagacaggctcttcctgcagtttctcgtggacactgctggcttgcgggcagtcggtctccagggtacctgttgtctcttttccgatgtaataactactttgaccttacactatatgttgctagtagtttattgagctttgtatatttggacagtttcatatagggcttagagattttaaggacatgataaatgaacttttctgtcccatgtgaagtggtagtgcggtgcctttcccccagatcatgctttaattctttcttttctgtagaaaccaacagtttccatttatgtcaatgctaaatccaaagtcacttcagagtttgttttccaccatgtgggaatcagcattcttaatttcgttaaagttttgacttgtaatgaaatgttcaagtattacagcaatattcaaagaaagaaccacagatgtgttaaccatttaagcagatcatctgccaaacattatattactaataaaacttaaccaacacttacaattcagtcatcaaagtaagtaaaaattagatgctacagctagctaactgtatccctagaaatgatgaataatttgccatttggacagttaacatccaggtgttacaaagtcagtgttaattctaaagatgatcatttctgccctttagaatggcttgtcccatcagcagatgaatgtgttaagcacaaagcatcttccttaaagcacaaagagagggactaactgatgctgcatctagaaaacacctttaagttgcctttcctctttgtagttagcgttcaggcaggtgacgtgtggaaagtctagggggttccattctggccatgcgagcccagctcctaccaacgtcggtaacttgagcagtccctgttgctggccagagactgcctggtcgccagcgctcaccatgggtgccaggatgcttcgcagaggcactgtgctcacggttggacttggtgtcagtgggaaagggcagtgtggggactgtcatttttgtgatttaataacacacagtgaaaatccaggaagaatgaattaagcttcttctgggagttgtttattcctgctcgtgcttaagattgatgatttcgtgaaataaagaacatcatttcatttaagagatcatttcattaagatctctaatctgttttgagtctttacaaaatagccagttataaaatggggcttgatttgtttagactgaaggaagacgttttcccaaaatatactacagaagtgctacaatatttgcgatattaaaatgcctgcagattgaaaatgggggccactcatttcagaactgcaggaatggtgtagttacagatcgacataaactcctgccccccaacaatgccatgagctgcttagcccaggagacctgggagctatggcaggacggttaggccagccgatgagggactgcagagaggctactggaaggttaaggacccagagagaaatcgagaggtgccctacagcagccaggcctatcaggatccgtcacacacggcagcggcgtggacaccggcctgatgcagagcgtgacccctcctgctgggacctgtgttgtaagctcctatttgcttatcttgtttatttcaagcagaaatcaataaattccataaccctctgtattgactgcaatgtaagctgctgaggagactggttctgttggtcagtcaggtgtttgctcagccctgtctgatcacctgtgctgctctgtccctaactagtgacccatggaagcttccaagcagttttctcttcatcactactaacaaacgaaacactaagaaggcttagtatcgctctttttctgcggggctactctgaagtactgacttgctttccagtctgattcacgttagcagtgtgtacactactgtatcatcatcagcttcatcaccctgtaaaccaggctcctctgaagagactttggtgagatgaacgtgaggtaaaaatttcgttcggcaaaaagtgcaatatgtgtggtactttattttttatgttctttttaaatctggggtattagtctgtgctttgggagaaatgcactagctctgcaattcccagctgggcaagtgtgtctctagtatctccacgcaactgatacactggtccctgtaaggcaaacagcatgttagcccgacaggaagagggggcccactttcacattcccggtgacactgaccgtccccagctgccccctcgccacctctgcctgcactgccttctgtcaccgtgggaaaaggaggctgatggttctctacaccatccaccttgagaatccctgcgtgggagagcatcagggcccaccaggggagtggggatggggctcaggggctgttcatgcccatctgagcaaaccccttctctcttccatccacttttgcctttgtctcaacgaggggcgtaacatttccttacagtcaagccccatcaactagaagtgcttattacttttaggattaaaaaagtaataacagactttgacttaatactctgtcttttcagaggcaaagtgggtgggtagaggggagctttaaaaatagaagtacaaaacaacatcctggaaacatatgaccccagatggaataatgtcacattccccagtgcagataatgggctgctgctggctctgtggtgtctgtctgcagaagatttgctcagtcaaggaaattcaagtggtgagacctttccaccatgggtggtaagagaaacctgccttcaccaaaatctctgaaggggaaagaagtggagagaaaggtttgcttcacttcggggactgcagtttgagaaataaaagggatacagagatatctgcactttgtagaaagggcaagattatttgcttatatctgaagggaggtgggtggttttgctggatgtttggtctgaaagagttacttttgataaagttaatctaattgtagttatattttctgtgtgcttttttttaattactaagaaaaaaattggtgagttcagtagctttggtattatgagtgcaaatcataatagctccaatgtgaaaaaaaaaatcaaaagtataacttgtcacttaatgttagaaaattgcctaaaatgcagtgtaataaataatctctgtaccaaatagtaatttaaatggggtaattttctgcaaggaaaatgtactgtttttatgtttccaaccctcttgaattaaaataaaaacaacttcttttctaa

SEQ ID NO: 293707 - DNA, 7853 bp, Homo sapiens
ggcggcgcgcgcctggctgggccctggggagcgggagggaaggagcgaaggagcgaaggagcaagcggagcggccgtcgcccaagccaagccgcgctgccaaccctcccgcccgcccgcgctcctgtccgccgtgtctagcagcggggcccagcatggtcatggcggatggcccgaggcacttgcagcgcgggccggtccgggtggggttctacgacatcgagggcacgctgggcaagggcaacttcgctgtggtgaagctggggcggcaccggatcaccaagacggaggtggcaataaaaataatcgataagtctcagctggatgcagtgaaccttgagaaaatctaccgagaagtacaaataatgaaaatgttagaccaccctcacataatcaaactttatcaggtaatggagaccaaaagtatgttgtaccttgtgacagaatatgccaaaaatggagaaatttttgactatcttgctaatcatggccggttaaatgagtctgaagccaggcgaaaattctggcaaatcctgtctgctgttgattattgtcatggtcggaagattgtgcaccgtgacctcaaagctgaaaatctcctgctggataacaacatgaatatcaaaatagcagatttcggttttggaaatttctttaaaagtggtgaactgctggcaacatggtgtggcagccccccttatgcagccccagaagtctttgaagggcagcagtatgaaggaccacagctggacatctggagtatgggagttgttctttatgtccttgtctgtggagctctgccctttgatggaccgactcttccaattttgaggcagagggttctggaaggaagattccggattccgtatttcatgtcagaagattgcgagcaccttatccgaaggatgttggtcctagacccatccaaacggctaaccatagcccaaatcaaggagcataaatggatgctcatagaagttcctgtccagagacctgttctctatccacaagagcaagaaaatgagccatccatcggggagtttaatgagcaggttctgcgactgatgcacagccttggaatagatcagcagaaaaccattgagtctttgcagaacaagagctataaccactttgctgccatttatttcttgttggtggagcgcctgaaatcacatcggagcagtttcccagtggagcagagacttgatggccgccagcgtcggcctagcaccattgctgagcaaacagttgccaaggcacagactgtggggctcccagtgaccatgcattcaccgaacatgaggctgctgcgatctgccctcctcccccaggcatccaacgtggaggccttttcatttccagcatctggctgtcaggcggaagctgcattcatggaagaagagtgtgtggacactccaaaggtcaatggctgtctgcttgaccctgtgcctcctgtcctggtgcggaagggatgccagtcactgcccagcaacatgatggagacctccattgacgaagggctggagacagaaggagaggccgaggaagaccccgctcatgcctttgaggcatttcagtccacacgcagcgggcagagacggcacactctgtcagaagtgaccaatcaactggtcgtgatgcctggggcagggaaaattttctccatgaatgacagcccctcccttgacagtgtggactctgagtatgatatggggtctgttcagagggacctgaactttctggaagacaacccttcccttaaggacatcatgttagccaatcagccttcaccccgcatgacatctcccttcataagcctgagacctaccaacccagccatgcaggctctgagctcccagaaacgagaggtccacaacaggtctccagtgagcttcagagagggccgcagagcatcagatacctccctcacccagggtgagcacttcctcctctgctttttgaaactcgcgtcgtaggagagcagtttcttgccatgttggtgtggtcacctgtggtcactgaaaggccttgtattttagttaaactgtttggtcttggtgctttctttcaggaattgtagcatttagacaacatcttcagaatctggctagaaccaaaggaattctagagttgaacaaagtgcagttgttgtatgaacaaataggaccggaggcagaccctaacctggcgccggcggctcctcagctccaggaccttgctagcagctgccctcaggtgggtaccttgggcccttccctcaatggctctgtgaggatgaggtgtgagtttgtcctgaagatggtcattttcacttagaggatttcctccagtcctggagcaaacaggctgtttgggaaaacccacagcttctttgccttgttgctgccacctgccactgacgggttcaacccatccacgctgcttccaagtgatcaataccagatggaggcctggacactctcaagctgtttttggctcacagggcagagtacagatgagtgacctcttacagtcgcccttgaactccccttctcctgccacacacacacccaaatgaaaaatacacaaatgaactacacccaaatgagaagcttctcaccactacttttgatgtggtatcactttagtaaatactacaagtggattattcatactaaaaatacaataaatactgctacttacctgattttattttgagcctattttcagtgcatccaagaggattatagttcgaggcccacatgaaggccatagcctcctggtgacaccaagagtctttgctctagtactgactaggtaattgttaactagagataatacatgcataaatgttctgcagagtaatgagccctcagcctactggctctgtaaaagctttgagtattaataagtctcagtggagttggtattcctattggacattgcaaaggtgcttcagctaagaactgagacgtttttccccatggggaattgaaaattgtttccacccccttgctcctcaggaagaagtttctcagcagcaggaaagcgtctccactctccctgccagcgtgcatccccagctgtccccacggcagagcctggagacccagtacctgcagcacagactccagaagcccagccttctgtcaaaggcccagaacacctgtcagctttattgcaaagaaccaccgcggagccttgagcagcagctgcaggaacataggctccagcagaagcgactctttcttcagaagcagtctcaactgcaggcctattttaatcagatgcagatagcagagagctcctacccacagccaagtcagcagctgccccttccccgccaggagactccaccgccttctcagcaggccccaccgttcagcctgacccagcccctgagccccgtcctggagccttcctccgagcagatgcaatacagccctttcctcagccagtaccaagagatgcagcttcagcccctgccctccacttccggtccccgggctgctcctcctctgcccacgcagctacagcagcagcagccgccaccgccaccaccccctccaccaccacgacagccaggagctgccccagcccccttacagttctcctatcagacttgtgagctgccaagcgctgcttcccctgcgccagactatcccactccctgtcagtatcctgtggatggagcccagcagagcgacctaacggggccagactgtcccagaagcccaggactgcaagaggccccctccagctacgacccactagccctctctgagctacctggactctttgattgtgaaatgctagacgctgtggatccacaacacaacgggtatgtcctggtgaattagtctcagcacaggaattgaggtgggtcaggtgaaggaagagtgtatgttcctatttttattccagccttttaaatttaaagcttattttcttgccctctccctaacggggagaaatcgagccacccaactggaatcagagggtctggctggggtggatgttgcttcctcctggttctgccccaccacaaagttttctgtggcaagtgctggaacatagttgtaggctgaggctcctgcccttcggtcgagtggagcaagctctcgagggcagcactgacaaatgtgttcctaagaagacattcagacccaggtcttatgcaggattacatccgtttattatcaagggcaaccttggtgaaagcagaaagggtgtgtgctattgcatatatatgggggaaaaggcaatatatttttcactgaagctgagcaaccacatattgctacaaggcaaatcaagaagacatcaggaaatcagatgcacaggaaataaaggaaagctgtgctttgtcattgaatcctaagttcttagctgctgatgcaagttgtcccccaaggccatcacaaagcagtggggcatgagctgtgtttcaggggccactaaataacagctggtactgaccccagaaaccgccttcatctccattcggaagcaggtgacacaccccttcagaaggtgccctgggttgccgagtgtcagaatatactcaggactccagaggtgtcacacgtggaactgacaggagacccgccaccgtggaggcagggggcaagaaactcaagaacgcatcaagagcaccagccctgggccagggaagacaggctcttcctgcagtttctcgtggacactgctggcttgcgggcagtcggtctccagggtacctgttgtctcttttccgatgtaataactactttgaccttacactatatgttgctagtagtttattgagctttgtatatttggacagtttcatatagggcttagagattttaaggacatgataaatgaacttttctgtcccatgtgaagtggtagtgcggtgcctttcccccagatcatgctttaattctttcttttctgtagaaaccaacagtttccatttatgtcaatgctaaatccaaagtcacttcagagtttgttttccaccatgtgggaatcagcattcttaatttcgttaaagttttgacttgtaatgaaatgttcaagtattacagcaatattcaaagaaagaaccacagatgtgttaaccatttaagcagatcatctgccaaacattatattactaataaaacttaaccaacacttacaattcagtcatcaaagtaagtaaaaattagatgctacagctagctaactgtatccctagaaatgatgaataatttgccatttggacagttaacatccaggtgttacaaagtcagtgttaattctaaagatgatcatttctgccctttagaatggcttgtcccatcagcagatgaatgtgttaagcacaaagcatcttccttaaagcacaaagagagggactaactgatgctgcatctagaaaacacctttaagttgcctttcctctttgtagttagcgttcaggcaggtgacgtgtggaaagtctagggggttccattctggccatgcgagcccagctcctaccaacgtcggtaacttgagcagtccctgttgctggccagagactgcctggtcgccagcgctcaccatgggtgccaggatgcttcgcagaggcactgtgctcacggttggacttggtgtcagtgggaaagggcagtgtggggactgtcatttttgtgatttaataacacacagtgaaaatccaggaagaatgaattaagcttcttctgggagttgtttattcctgctcgtgcttaagattgatgatttcgtgaaataaagaacatcatttcatttaagagatcatttcattaagatctctaatctgttttgagtctttacaaaatagccagttataaaatggggcttgatttgtttagactgaaggaagacgttttcccaaaatatactacagaagtgctacaatatttgcgatattaaaatgcctgcagattgaaaatgggggccactcatttcagaactgcaggaatggtgtagttacagatcgacataaactcctgccccccaacaatgccatgagctgcttagcccaggagacctgggagctatggcaggacggttaggccagccgatgagggactgcagagaggctactggaaggttaaggacccagagagaaatcgagaggtgccctacagcagccaggcctatcaggatccgtcacacacggcagcggcgtggacaccggcctgatgcagagcgtgacccctcctgctgggacctgtgttgtaagctcctatttgcttatcttgtttatttcaagcagaaatcaataaattccataaccctctgtattgactgcaatgtaagctgctgaggagactggttctgttggtcagtcaggtgtttgctcagccctgtctgatcacctgtgctgctctgtccctaactagtgacccatggaagcttccaagcagttttctcttcatcactactaacaaacgaaacactaagaaggcttagtatcgctctttttctgcggggctactctgaagtactgacttgctttccagtctgattcacgttagcagtgtgtacactactgtatcatcatcagcttcatcaccctgtaaaccaggctcctctgaagagactttggtgagatgaacgtgaggtaaaaatttcgttcggcaaaaagtgcaatatgtgtggtactttattttttatgttctttttaaatctggggtattagtctgtgctttgggagaaatgcactagctctgcaattcccagctgggcaagtgtgtctctagtatctccacgcaactgatacactggtccctgtaaggcaaacagcatgttagcccgacaggaagagggggcccactttcacattcccggtgacactgaccgtccccagctgccccctcgccacctctgcctgcactgccttctgtcaccgtgggaaaaggaggctgatggttctctacaccatccaccttgagaatccctgcgtgggagagcatcagggcccaccaggggagtggggatggggctcaggggctgttcatgcccatctgagcaaaccccttctctcttccatccacttttgcctttgtctcaacgaggggcgtaacatttccttacagtcaagccccatcaactagaagtgcttattacttttaggattaaaaaagtaataacagactttgacttaatactctgtcttttcagaggcaaagtgggtgggtagaggggagctttaaaaatagaagtacaaaacaacatcctggaaacatatgaccccagatggaataatgtcacattccccagtgcagataatgggctgctgctggctctgtggtgtctgtctgcagaagatttgctcagtcaaggaaattcaagtggtgagacctttccaccatgggtggtaagagaaacctgccttcaccaaaatctctgaaggggaaagaagtggagagaaaggtttgcttcacttcggggactgcagtttgagaaataaaagggatacagagatatctgcactttgtagaaagggcaagattatttgcttatatctgaagggaggtgggtggttttgctggatgtttggtctgaaagagttacttttgataaagttaatctaattgtagttatattttctgtgtgcttttttttaattactaagaaaaaaattggtgagttcagtagctttggtattatgagtgcaaatcataatagctccaatgtgaaaaaaaaaatcaaaagtataacttgtcacttaatgttagaaaattgcctaaaatgcagtgtaataaataatctctgtaccaaatagtaatttaaatggggtaattttctgcaaggaaaatgtactgtttttatgtttccaaccctcttgaattaaaataaaaacaacttcttttctaa

SEQ ID NO: 293708 - DNA, 7032 bp, Homo sapiens
ggcggcgcgcgcctggctgggccctggggagcgggagggaaggagcgaaggagcgaaggagcaagcggagcggccgtcgcccaagccaagccgcgctgccaaccctcccgcccgcccgcgctcctgtccgccgtgtctagcagcggggcccagcatggtcatggcggatggcccgaggcacttgcagcgcgggccggtccgggtggggttctacgacatcgagggcacgctgggcaagggcaacttcgctgtggtgaagctggggcggcaccggatcaccaagacggaggtggcaataaaaataatcgataagtctcagctggatgcagtgaaccttgagaaaatctaccgagaagtacaaataatgaaaatgttagaccaccctcacataatcaaactttatcaggtaatggagaccaaaagtatgttgtaccttgtgacagaatatgccaaaaatggagaaatttttgactatcttgctaatcatggccggttaaatgagtctgaagccaggcgaaaattctggcaaatcctgtctgctgttgattattgtcatggtcggaagattgtgcaccgtgacctcaaagctgaaaatctcctgctggataacaacatgaatatcaaaatagcagatttcggttttggaaatttctttaaaagtggtgaactgctggcaacatggtgtggcagccccccttatgcagccccagaagtctttgaagggcagcagtatgaaggaccacagctggacatctggagtatgggagttgttctttatgtccttgtctgtggagctctgccctttgatggaccgactcttccaattttgaggcagagggttctggaaggaagattccggattccgtatttcatgtcagaagattgcgagcaccttatccgaaggatgttggtcctagacccatccaaacggctaaccatagcccaaatcaaggagcataaatggatgctcatagaagttcctgtccagagacctgttctctatccacaagagcaagaaaatgagccatccatcggggagtttaatgagcaggttctgcgactgatgcacagccttggaatagatcagcagaaaaccattgagtctttgcagaacaagagctataaccactttgctgccatttatttcttgttggtggagcgcctgaaatcacatcggagcagtttcccagtggagcagagacttgatggccgccagcgtcggcctagcaccattgctgagcaaacagttgccaaggcacagactgtggggctcccagtgaccatgcattcaccgaacatgaggctgctgcgatctgccctcctcccccaggcatccaacgtggaggccttttcatttccagcatctggctgtcaggcggaagctgcattcatggaagaagagtgtgtggacactccaaaggtcaatggctgtctgcttgaccctgtgcctcctgtcctggtgcggaagggatgccagtcactgcccagcaacatgatggagacctccattgacgaagggctggagacagaaggagaggccgaggaagaccccgctcatgcctttgaggcatttcagtccacacgcagcgggcagagacggcacactctgtcagaagtgaccaatcaactggtcgtgatgcctggggcagggaaaattttctccatgaatgacagcccctcccttgacagtgtggactctgagtatgatatggggtctgttcagagggacctgaactttctggaagacaacccttcccttaaggacatcatgttagccaatcagccttcaccccgcatgacatctcccttcataagcctgagacctaccaacccagccatgcaggctctgagctcccagaaacgagaggtccacaacaggtctccagtgagcttcagagagggccgcagagcatcagatacctccctcacccagggtgagcacttcctcctctgctttttgaaactcgcgtcgtaggagagcagtttcttgccatgttggtgtggtcacctgtggtcactgaaaggccttgtattttagttaaactgtttggtcttggtgctttctttcaggaattgtagcatttagacaacatcttcagaatctggctagaaccaaaggaattctagagttgaacaaagtgcagttgttgtatgaacaaataggaccggaggcagaccctaacctggcgccggcggctcctcagctccaggaccttgctagcagctgccctcaggaagaagtttctcagcagcaggaaagcgtctccactctccctgccagcgtgcatccccagctgtccccacggcagagcctggagacccagtacctgcagcacagactccagaagcccagccttctgtcaaaggcccagaacacctgtcagctttattgcaaagaaccaccgcggagccttgagcagcagctgcaggaacatagtaatcagatgcagatagcagagagctcctacccacagccaagtcagcagctgccccttccccgccaggagactccaccgccttctcagcaggccccaccgttcagcctgacccagcccctgagccccgtcctggagccttcctccgagcagatgcaatacagccctttcctcagccagtaccaagagatgcagcttcagcccctgccctccacttccggtccccgggctgctcctcctctgcccacgcagctacagcagcagcagccgccaccgccaccaccccctccaccaccacgacagccaggagctgccccagcccccttacagttctcctatcagacttgtgagctgccaagcgctgcttcccctgcgccagactatcccactccctgtcagtatcctgtggatggagcccagcagagcgacctaacggggccagactgtcccagaagcccaggactgcaagaggccccctccagctacgacccactagccctctctgagctacctggactctttgattgtgaaatgctagacgctgtggatccacaacacaacgggtatgtcctggtgaattagtctcagcacaggaattgaggtgggtcaggtgaaggaagagtgtatgttcctatttttattccagccttttaaatttaaagcttattttcttgccctctccctaacggggagaaatcgagccacccaactggaatcagagggtctggctggggtggatgttgcttcctcctggttctgccccaccacaaagttttctgtggcaagtgctggaacatagttgtaggctgaggctcctgcccttcggtcgagtggagcaagctctcgagggcagcactgacaaatgtgttcctaagaagacattcagacccaggtcttatgcaggattacatccgtttattatcaagggcaaccttggtgaaagcagaaagggtgtgtgctattgcatatatatgggggaaaaggcaatatatttttcactgaagctgagcaaccacatattgctacaaggcaaatcaagaagacatcaggaaatcagatgcacaggaaataaaggaaagctgtgctttgtcattgaatcctaagttcttagctgctgatgcaagttgtcccccaaggccatcacaaagcagtggggcatgagctgtgtttcaggggccactaaataacagctggtactgaccccagaaaccgccttcatctccattcggaagcaggtgacacaccccttcagaaggtgccctgggttgccgagtgtcagaatatactcaggactccagaggtgtcacacgtggaactgacaggagacccgccaccgtggaggcagggggcaagaaactcaagaacgcatcaagagcaccagccctgggccagggaagacaggctcttcctgcagtttctcgtggacactgctggcttgcgggcagtcggtctccagggtacctgttgtctcttttccgatgtaataactactttgaccttacactatatgttgctagtagtttattgagctttgtatatttggacagtttcatatagggcttagagattttaaggacatgataaatgaacttttctgtcccatgtgaagtggtagtgcggtgcctttcccccagatcatgctttaattctttcttttctgtagaaaccaacagtttccatttatgtcaatgctaaatccaaagtcacttcagagtttgttttccaccatgtgggaatcagcattcttaatttcgttaaagttttgacttgtaatgaaatgttcaagtattacagcaatattcaaagaaagaaccacagatgtgttaaccatttaagcagatcatctgccaaacattatattactaataaaacttaaccaacacttacaattcagtcatcaaagtaagtaaaaattagatgctacagctagctaactgtatccctagaaatgatgaataatttgccatttggacagttaacatccaggtgttacaaagtcagtgttaattctaaagatgatcatttctgccctttagaatggcttgtcccatcagcagatgaatgtgttaagcacaaagcatcttccttaaagcacaaagagagggactaactgatgctgcatctagaaaacacctttaagttgcctttcctctttgtagttagcgttcaggcaggtgacgtgtggaaagtctagggggttccattctggccatgcgagcccagctcctaccaacgtcggtaacttgagcagtccctgttgctggccagagactgcctggtcgccagcgctcaccatgggtgccaggatgcttcgcagaggcactgtgctcacggttggacttggtgtcagtgggaaagggcagtgtggggactgtcatttttgtgatttaataacacacagtgaaaatccaggaagaatgaattaagcttcttctgggagttgtttattcctgctcgtgcttaagattgatgatttcgtgaaataaagaacatcatttcatttaagagatcatttcattaagatctctaatctgttttgagtctttacaaaatagccagttataaaatggggcttgatttgtttagactgaaggaagacgttttcccaaaatatactacagaagtgctacaatatttgcgatattaaaatgcctgcagattgaaaatgggggccactcatttcagaactgcaggaatggtgtagttacagatcgacataaactcctgccccccaacaatgccatgagctgcttagcccaggagacctgggagctatggcaggacggttaggccagccgatgagggactgcagagaggctactggaaggttaaggacccagagagaaatcgagaggtgccctacagcagccaggcctatcaggatccgtcacacacggcagcggcgtggacaccggcctgatgcagagcgtgacccctcctgctgggacctgtgttgtaagctcctatttgcttatcttgtttatttcaagcagaaatcaataaattccataaccctctgtattgactgcaatgtaagctgctgaggagactggttctgttggtcagtcaggtgtttgctcagccctgtctgatcacctgtgctgctctgtccctaactagtgacccatggaagcttccaagcagttttctcttcatcactactaacaaacgaaacactaagaaggcttagtatcgctctttttctgcggggctactctgaagtactgacttgctttccagtctgattcacgttagcagtgtgtacactactgtatcatcatcagcttcatcaccctgtaaaccaggctcctctgaagagactttggtgagatgaacgtgaggtaaaaatttcgttcggcaaaaagtgcaatatgtgtggtactttattttttatgttctttttaaatctggggtattagtctgtgctttgggagaaatgcactagctctgcaattcccagctgggcaagtgtgtctctagtatctccacgcaactgatacactggtccctgtaaggcaaacagcatgttagcccgacaggaagagggggcccactttcacattcccggtgacactgaccgtccccagctgccccctcgccacctctgcctgcactgccttctgtcaccgtgggaaaaggaggctgatggttctctacaccatccaccttgagaatccctgcgtgggagagcatcagggcccaccaggggagtggggatggggctcaggggctgttcatgcccatctgagcaaaccccttctctcttccatccacttttgcctttgtctcaacgaggggcgtaacatttccttacagtcaagccccatcaactagaagtgcttattacttttaggattaaaaaagtaataacagactttgacttaatactctgtcttttcagaggcaaagtgggtgggtagaggggagctttaaaaatagaagtacaaaacaacatcctggaaacatatgaccccagatggaataatgtcacattccccagtgcagataatgggctgctgctggctctgtggtgtctgtctgcagaagatttgctcagtcaaggaaattcaagtggtgagacctttccaccatgggtggtaagagaaacctgccttcaccaaaatctctgaaggggaaagaagtggagagaaaggtttgcttcacttcggggactgcagtttgagaaataaaagggatacagagatatctgcactttgtagaaagggcaagattatttgcttatatctgaagggaggtgggtggttttgctggatgtttggtctgaaagagttacttttgataaagttaatctaattgtagttatattttctgtgtgcttttttttaattactaagaaaaaaattggtgagttcagtagctttggtattatgagtgcaaatcataatagctccaatgtgaaaaaaaaaatcaaaagtataacttgtcacttaatgttagaaaattgcctaaaatgcagtgtaataaataatctctgtaccaaatagtaatttaaatggggtaattttctgcaaggaaaatgtactgtttttatgtttccaaccctcttgaattaaaataaaaacaacttcttttctaa

SEQ ID NO: 293709 - DNA, 5144 bp, Homo sapiens
ggcggcgcgcgcctggctgggccctggggagcgggagggaaggagcgaaggagcgaaggagcaagcggagcggccgtcgcccaagccaagccgcgctgccaaccctcccgcccgcccgcgctcctgtccgccgtgtctagcagcggggcccagcatggtcatggcggatggcccgaggcacttgcagcgcgggccggtccgggtggggttctacgacatcgagggcacgctgggcaagggcaacttcgctgtggtgaagctggggcggcaccggatcaccaagacggaggtggcaataaaaataatcgataagtctcagctggatgcagtgaaccttgagaaaatctaccgagaagtacaaataatgaaaatgttagaccaccctcacataatcaaactttatcaggtaatggagaccaaaagtatgttgtaccttgtgacagaatatgccaaaaatggagaaatttttgactatcttgctaatcatggccggttaaatgagtctgaagccaggcgaaaattctggcaaatcctgtctgctgttgattattgtcatggtcggaagattgtgcaccgtgacctcaaagctgaaaatctcctgctggataacaacatgaatatcaaaatagcagatttcggttttggaaatttctttaaaagtggtgaactgctggcaacatggtgtggcagccccccttatgcagccccagaagtctttgaagggcagcagtatgaaggaccacagctggacatctggagtatgggagttgttctttatgtccttgtctgtggagctctgccctttgatggaccgactcttccaattttgaggcagagggttctggaaggaagattccggattccgtatttcatgtcagaagattgcgagcaccttatccgaaggatgttggtcctagacccatccaaacggctaaccatagcccaaatcaaggagcataaatggatgctcatagaagttcctgtccagagacctgttctctatccacaagagcaagaaaatgagccatccatcggggagtttaatgagcaggttctgcgactgatgcacagccttggaatagatcagcagaaaaccattgagtctttgcagaacaagagctataaccactttgctgccatttatttcttgttggtggagcgcctgaaatcacatcggagcagtttcccagtggagcagagacttgatggccgccagcgtcggcctagcaccattgctgagcaaacagttgccaaggcacagactgtggggctcccagtgaccatgcattcaccgaacatgaggctgctgcgatctgccctcctcccccaggcatccaacgtggaggccttttcatttccagcatctggctgtcaggcggaagctgcattcatggaagaagagtgtgtggacactccaaaggtcaatggctgtctgcttgaccctgtgcctcctgtcctggtgcggaagggatgccagtcactgcccagcaacatgatggagacctccattgacgaagggctggagacagaaggagaggccgaggaagaccccgctcatgcctttgaggcatttcagtccacacgcagcgggcagagacggcacactctgtcagaagtgaccaatcaactggtcgtgatgcctggggcagggaaaattttctccatgaatgacagcccctcccttgacagtgtggactctgagtatgatatggggtctgttcagagggacctgaactttctggaagacaacccttcccttaaggacatcatgttagccaatcagccttcaccccgcatgacatctcccttcataagcctgagacctaccaacccagccatgcaggctctgagctcccagaaacgagaggtccacaacaggtctccagtgagcttcagagagggccgcagagcatcagatacctccctcacccagggtgagcacttcctcctctgctttttgaaactcgcgtcgtaggagagcagtttcttgccatgttggtgtggtcacctgtggtcactgaaaggccttgtattttagttaaactgtttggtcttggtgctttctttcaggaattgtagcatttagacaacatcttcagaatctggctagaaccaaaggaattctagagttgaacaaagtgcagttgttgtatgaacaaataggaccggaggcagaccctaacctggcgccggcggctcctcagctccaggaccttgctagcagctgccctcaggaagaagtttctcagcagcaggaaagcgtctccactctccctgccagcgtgcatccccagctgtccccacggcagagcctggagacccagtacctgcagcacagactccagaagcccagccttctgtcaaaggcccagaacacctgtcagctttattgcaaagaaccaccgcggagccttgagcagcagctgcaggaacataggctccagcagaagcgactctttcttcagaagcagtctcaactgcaggcctattttaatcagatgcagatagcagagagctcctacccacagccaagtcagcagctgccccttccccgccaggagactccaccgccttctcagcaggccccaccgttcagcctgacccagcccctgagccccgtcctggagccttcctccgagcagatgcaatacagccctttcctcagccagtaccaagagatgcagcttcagcccctgccctccacttccggtccccgggctgctcctcctctgcccacgcagctacagcagcagcagccgccaccgccaccaccccctccaccaccacgacagccaggagctgccccagcccccttacagttctcctatcagacttgtgagctgccaagcgctgcttcccctgcgccagactatcccactccctgtcagtatcctgtggatggagcccagcagagcgacctaacggggccagactgtcccagaagcccaggactgcaagaggccccctccagctacgacccactagccctctctgagctacctggactctttgattgtgaaatgctagacgctgtggatccacaacacaacgggtatgtcctggtgaattagtctcagcacaggaattgaggtgggtcaggtgaaggaagagtgtatgttcctatttttattccagccttttaaatttaaagcttattttcttgccctctccctaacggggagaaatcgagccacccaactggaatcagagggtctggctggggtggatgttgcttcctcctggttctgccccaccacaaagttttctgtggcaagtgctggaacatagttgtaggctgaggctcctgcccttcggtcgagtggagcaagctctcgagggcagcactgacaaatgtgttcctaagaagacattcagacccaggtcttatgcaggattacatccgtttattatcaagggcaaccttggtgaaagcagaaagggtgtgtgctattgcatatatatgggggaaaaggcaatatatttttcactgaagctgagcaaccacatattgctacaaggcaaatcaagaagacatcaggaaatcagatgcacaggaaataaaggaaagctgtgctttgtcattgaatcctaagttcttagctgctgatgcaagttgtcccccaaggccatcacaaagcagtggggcatgagctgtgtttcaggggccactaaataacagctggtactgaccccagaaaccgccttcatctccattcggaagcaggtgacacaccccttcagaaggtgccctgggttgccgagtgtcagaatatactcaggactccagaggtgtcacacgtggaactgacaggagacccgccaccgtggaggcagggggcaagaaactcaagaacgcatcaagagcaccagccctgggccagggaagacaggctcttcctgcagtttctcgtggacactgctggcttgcgggcagtcggtctccagggtacctgttgtctcttttccgatgtaataactactttgaccttacactatatgttgctagtagtttattgagctttgtatatttggacagtttcatatagggcttagagattttaaggacatgataaatgaacttttctgtcccatgtgaagtggtagtgcggtgcctttcccccagatcatgctttaattctttcttttctgtagaaaccaacagtttccatttatgtcaatgctaaatccaaagtcacttcagagtttgttttccaccatgtgggaatcagcattcttaatttcgttaaagttttgacttgtaatgaaatgttcaagtattacagcaatattcaaagaaagaaccacagatgtgttaaccatttaagcagatcatctgccaaacattatattactaataaaacttaaccaacacttacaattcagtcatcaaagtaagtaaaaattagatgctacagctagctaactgtatccctagaaatgatgaataatttgccatttggacagttaacatccaggtgttacaaagtcagtgttaattctaaagatgatcatttctgccctttagaatggcttgtcccatcagcagatgaatgtgttaagcacaaagcatcttccttaaagcacaaagagagggactaactgatgctgcatctagaaaacacctttaagttgcctttcctctttgtagttagcgttcaggcaggtgacgtgtggaaagtctagggggttccattctggccatgcgagcccagctcctaccaacgtcggtaacttgagcagtccctgttgctggccagagactgcctggtcgccagcgctcaccatgggtgccaggatgcttcgcagaggcactgtgctcacggttggacttggtgtcagtgggaaagggcagtgtggggactgtcatttttgtgatttaataacacacagtgaaaatccaggaagaatgaattaagcttcttctgggagttgtttattcctgctcgtgcttaagattgatgatttcgtgaaataaagaacatcatttcatttaagagatcatttcattaagatctctaatctgttttgagtctttacaaaatagccagttataaaatggggcttgatttgtttagactgaaggaagacgttttcccaaaatatactacagaagaccccataccaaataaacaaaaaaatctttc

SEQ ID NO: 293710 - DNA, 5556 bp, Homo sapiens
tacaggatccttaagcgaacatgcgggacagctcatgagtggtatacgtcttcagaggacactaatattcggattgttatttctattggcagaacaatctcgattgtctacttctagtaggaaaattttctccatgaatgacagcccctcccttgacagtgtggactctgagtatgatatggggtctgttcagagggacctgaactttctggaagacaacccttcccttaaggacatcatgttagccaatcagccttcaccccgcatgacatctcccttcataagcctgagacctaccaacccagccatgcaggctctgagctcccagaaacgagaggtccacaacaggtctccagtgagcttcagagagggccgcagagcatcagatacctccctcacccagggtgagcacttcctcctctgctttttgaaactcgcgtcgtaggagagcagtttcttgccatgttggtgtggtcacctgtggtcactgaaaggccttgtattttagttaaactgtttggtcttggtgctttctttcaggaattgtagcatttagacaacatcttcagaatctggctagaaccaaaggaattctagagttgaacaaagtgcagttgttgtatgaacaaataggaccggaggcagaccctaacctggcgccggcggctcctcagctccaggaccttgctagcagctgccctcaggaagaagtttctcagcagcaggaaagcgtctccactctccctgccagcgtgcatccccagctgtccccacggcagagcctggagacccagtacctgcagcacagactccagaagcccagccttctgtcaaaggcccagaacacctgtcagctttattgcaaagaaccaccgcggagccttgagcagcagctgcaggaacataggctccagcagaagcgactctttcttcagaagcagtctcaactgcaggcctattttaatcagatgcagatagcagagagctcctacccacagccaagtcagcagctgccccttccccgccaggagactccaccgccttctcagcaggccccaccgttcagcctgacccagcccctgagccccgtcctggagccttcctccgagcagatgcaatacagccctttcctcagccagtaccaagagatgcagcttcagcccctgccctccacttccggtccccgggctgctcctcctctgcccacgcagctacagcagcagcagccgccaccgccaccaccccctccaccaccacgacagccaggagctgccccagcccccttacagttctcctatcagacttgtgagctgccaagcgctgcttcccctgcgccagactatcccactccctgtcagtatcctgtggatggagcccagcagagcgacctaacggggccagactgtcccagaagcccaggactgcaagaggccccctccagctacgacccactagccctctctgagctacctggactctttgattgtgaaatgctagacgctgtggatccacaacacaacgggtatgtcctggtgaattagtctcagcacaggaattgaggtgggtcaggtgaaggaagagtgtatgttcctatttttattccagccttttaaatttaaagcttattttcttgccctctccctaacggggagaaatcgagccacccaactggaatcagagggtctggctggggtggatgttgcttcctcctggttctgccccaccacaaagttttctgtggcaagtgctggaacatagttgtaggctgaggctcctgcccttcggtcgagtggagcaagctctcgagggcagcactgacaaatgtgttcctaagaagacattcagacccaggtcttatgcaggattacatccgtttattatcaagggcaaccttggtgaaagcagaaagggtgtgtgctattgcatatatatgggggaaaaggcaatatatttttcactgaagctgagcaaccacatattgctacaaggcaaatcaagaagacatcaggaaatcagatgcacaggaaataaaggaaagctgtgctttgtcattgaatcctaagttcttagctgctgatgcaagttgtcccccaaggccatcacaaagcagtggggcatgagctgtgtttcaggggccactaaataacagctggtactgaccccagaaaccgccttcatctccattcggaagcaggtgacacaccccttcagaaggtgccctgggttgccgagtgtcagaatatactcaggactccagaggtgtcacacgtggaactgacaggagacccgccaccgtggaggcagggggcaagaaactcaagaacgcatcaagagcaccagccctgggccagggaagacaggctcttcctgcagtttctcgtggacactgctggcttgcgggcagtcggtctccagggtacctgttgtctcttttccgatgtaataactactttgaccttacactatatgttgctagtagtttattgagctttgtatatttggacagtttcatatagggcttagagattttaaggacatgataaatgaacttttctgtcccatgtgaagtggtagtgcggtgcctttcccccagatcatgctttaattctttcttttctgtagaaaccaacagtttccatttatgtcaatgctaaatccaaagtcacttcagagtttgttttccaccatgtgggaatcagcattcttaatttcgttaaagttttgacttgtaatgaaatgttcaagtattacagcaatattcaaagaaagaaccacagatgtgttaaccatttaagcagatcatctgccaaacattatattactaataaaacttaaccaacacttacaattcagtcatcaaagtaagtaaaaattagatgctacagctagctaactgtatccctagaaatgatgaataatttgccatttggacagttaacatccaggtgttacaaagtcagtgttaattctaaagatgatcatttctgccctttagaatggcttgtcccatcagcagatgaatgtgttaagcacaaagcatcttccttaaagcacaaagagagggactaactgatgctgcatctagaaaacacctttaagttgcctttcctctttgtagttagcgttcaggcaggtgacgtgtggaaagtctagggggttccattctggccatgcgagcccagctcctaccaacgtcggtaacttgagcagtccctgttgctggccagagactgcctggtcgccagcgctcaccatgggtgccaggatgcttcgcagaggcactgtgctcacggttggacttggtgtcagtgggaaagggcagtgtggggactgtcatttttgtgatttaataacacacagtgaaaatccaggaagaatgaattaagcttcttctgggagttgtttattcctgctcgtgcttaagattgatgatttcgtgaaataaagaacatcatttcatttaagagatcatttcattaagatctctaatctgttttgagtctttacaaaatagccagttataaaatggggcttgatttgtttagactgaaggaagacgttttcccaaaatatactacagaagtgctacaatatttgcgatattaaaatgcctgcagattgaaaatgggggccactcatttcagaactgcaggaatggtgtagttacagatcgacataaactcctgccccccaacaatgccatgagctgcttagcccaggagacctgggagctatggcaggacggttaggccagccgatgagggactgcagagaggctactggaaggttaaggacccagagagaaatcgagaggtgccctacagcagccaggcctatcaggatccgtcacacacggcagcggcgtggacaccggcctgatgcagagcgtgacccctcctgctgggacctgtgttgtaagctcctatttgcttatcttgtttatttcaagcagaaatcaataaattccataaccctctgtattgactgcaatgtaagctgctgaggagactggttctgttggtcagtcaggtgtttgctcagccctgtctgatcacctgtgctgctctgtccctaactagtgacccatggaagcttccaagcagttttctcttcatcactactaacaaacgaaacactaagaaggcttagtatcgctctttttctgcggggctactctgaagtactgacttgctttccagtctgattcacgttagcagtgtgtacactactgtatcatcatcagcttcatcaccctgtaaaccaggctcctctgaagagactttggtgagatgaacgtgaggtaaaaatttcgttcggcaaaaagtgcaatatgtgtggtactttattttttatgttctttttaaatctggggtattagtctgtgctttgggagaaatgcactagctctgcaattcccagctgggcaagtgtgtctctagtatctccacgcaactgatacactggtccctgtaaggcaaacagcatgttagcccgacaggaagagggggcccactttcacattcccggtgacactgaccgtccccagctgccccctcgccacctctgcctgcactgccttctgtcaccgtgggaaaaggaggctgatggttctctacaccatccaccttgagaatccctgcgtgggagagcatcagggcccaccaggggagtggggatggggctcaggggctgttcatgcccatctgagcaaaccccttctctcttccatccacttttgcctttgtctcaacgaggggcgtaacatttccttacagtcaagccccatcaactagaagtgcttattacttttaggattaaaaaagtaataacagactttgacttaatactctgtcttttcagaggcaaagtgggtgggtagaggggagctttaaaaatagaagtacaaaacaacatcctggaaacatatgaccccagatggaataatgtcacattccccagtgcagataatgggctgctgctggctctgtggtgtctgtctgcagaagatttgctcagtcaaggaaattcaagtggtgagacctttccaccatgggtggtaagagaaacctgccttcaccaaaatctctgaaggggaaagaagtggagagaaaggtttgcttcacttcggggactgcagtttgagaaataaaagggatacagagatatctgcactttgtagaaagggcaagattatttgcttatatctgaagggaggtgggtggttttgctggatgtttggtctgaaagagttacttttgataaagttaatctaattgtagttatattttctgtgtgcttttttttaattactaagaaaaaaattggtgagttcagtagctttggtattatgagtgcaaatcataatagctccaatgtgaaaaaaaaaatcaaaagtataacttgtcacttaatgttagaaaattgcctaaaatgcagtgtaataaataatctctgtaccaaatagtaatttaaatggggtaattttctgcaaggaaaatgtactgtttttatgtttccaaccctcttgaattaaaataaaaacaacttcttttctaa

SEQ ID NO: 293711 - DNA, 5095 bp, Homo sapiens
tcgctgctctatgatgaacccttcgactgtggactcagagtacaggcgcagactcatcagactgcgtccctcacccagggaattgtagcatttagacaacatcttcagaatctggctagaaccaaaggaattctagagttgaacaaagtgcagttgttgtatgaacaaataggaccggaggcagaccctaacctggcgccggcggctcctcagctccaggaccttgctagcagctgccctcaggaagaagtttctcagcagcaggaaagcgtctccactctccctgccagcgtgcatccccagctgtccccacggcagagcctggagacccagtacctgcagcacagactccagaagcccagccttctgtcaaaggcccagaacacctgtcagctttattgcaaagaaccaccgcggagccttgagcagcagctgcaggaacataggctccagcagaagcgactctttcttcagaagcagtctcaactgcaggcctattttaatcagatgcagatagcagagagctcctacccacagccaagtcagcagctgccccttccccgccaggagactccaccgccttctcagcaggccccaccgttcagcctgacccagcccctgagccccgtcctggagccttcctccgagcagatgcaatacagccctttcctcagccagtaccaagagatgcagcttcagcccctgccctccacttccggtccccgggctgctcctcctctgcccacgcagctacagcagcagcagccgccaccgccaccaccccctccaccaccacgacagccaggagctgccccagcccccttacagttctcctatcagacttgtgagctgccaagcgctgcttcccctgcgccagactatcccactccctgtcagtatcctgtggatggagcccagcagagcgacctaacggggccagactgtcccagaagcccaggactgcaagaggccccctccagctacgacccactagccctctctgagctacctggactctttgattgtgaaatgctagacgctgtggatccacaacacaacgggtatgtcctggtgaattagtctcagcacaggaattgaggtgggtcaggtgaaggaagagtgtatgttcctatttttattccagccttttaaatttaaagcttattttcttgccctctccctaacggggagaaatcgagccacccaactggaatcagagggtctggctggggtggatgttgcttcctcctggttctgccccaccacaaagttttctgtggcaagtgctggaacatagttgtaggctgaggctcctgcccttcggtcgagtggagcaagctctcgagggcagcactgacaaatgtgttcctaagaagacattcagacccaggtcttatgcaggattacatccgtttattatcaagggcaaccttggtgaaagcagaaagggtgtgtgctattgcatatatatgggggaaaaggcaatatatttttcactgaagctgagcaaccacatattgctacaaggcaaatcaagaagacatcaggaaatcagatgcacaggaaataaaggaaagctgtgctttgtcattgaatcctaagttcttagctgctgatgcaagttgtcccccaaggccatcacaaagcagtggggcatgagctgtgtttcaggggccactaaataacagctggtactgaccccagaaaccgccttcatctccattcggaagcaggtgacacaccccttcagaaggtgccctgggttgccgagtgtcagaatatactcaggactccagaggtgtcacacgtggaactgacaggagacccgccaccgtggaggcagggggcaagaaactcaagaacgcatcaagagcaccagccctgggccagggaagacaggctcttcctgcagtttctcgtggacactgctggcttgcgggcagtcggtctccagggtacctgttgtctcttttccgatgtaataactactttgaccttacactatatgttgctagtagtttattgagctttgtatatttggacagtttcatatagggcttagagattttaaggacatgataaatgaacttttctgtcccatgtgaagtggtagtgcggtgcctttcccccagatcatgctttaattctttcttttctgtagaaaccaacagtttccatttatgtcaatgctaaatccaaagtcacttcagagtttgttttccaccatgtgggaatcagcattcttaatttcgttaaagttttgacttgtaatgaaatgttcaagtattacagcaatattcaaagaaagaaccacagatgtgttaaccatttaagcagatcatctgccaaacattatattactaataaaacttaaccaacacttacaattcagtcatcaaagtaagtaaaaattagatgctacagctagctaactgtatccctagaaatgatgaataatttgccatttggacagttaacatccaggtgttacaaagtcagtgttaattctaaagatgatcatttctgccctttagaatggcttgtcccatcagcagatgaatgtgttaagcacaaagcatcttccttaaagcacaaagagagggactaactgatgctgcatctagaaaacacctttaagttgcctttcctctttgtagttagcgttcaggcaggtgacgtgtggaaagtctagggggttccattctggccatgcgagcccagctcctaccaacgtcggtaacttgagcagtccctgttgctggccagagactgcctggtcgccagcgctcaccatgggtgccaggatgcttcgcagaggcactgtgctcacggttggacttggtgtcagtgggaaagggcagtgtggggactgtcatttttgtgatttaataacacacagtgaaaatccaggaagaatgaattaagcttcttctgggagttgtttattcctgctcgtgcttaagattgatgatttcgtgaaataaagaacatcatttcatttaagagatcatttcattaagatctctaatctgttttgagtctttacaaaatagccagttataaaatggggcttgatttgtttagactgaaggaagacgttttcccaaaatatactacagaagtgctacaatatttgcgatattaaaatgcctgcagattgaaaatgggggccactcatttcagaactgcaggaatggtgtagttacagatcgacataaactcctgccccccaacaatgccatgagctgcttagcccaggagacctgggagctatggcaggacggttaggccagccgatgagggactgcagagaggctactggaaggttaaggacccagagagaaatcgagaggtgccctacagcagccaggcctatcaggatccgtcacacacggcagcggcgtggacaccggcctgatgcagagcgtgacccctcctgctgggacctgtgttgtaagctcctatttgcttatcttgtttatttcaagcagaaatcaataaattccataaccctctgtattgactgcaatgtaagctgctgaggagactggttctgttggtcagtcaggtgtttgctcagccctgtctgatcacctgtgctgctctgtccctaactagtgacccatggaagcttccaagcagttttctcttcatcactactaacaaacgaaacactaagaaggcttagtatcgctctttttctgcggggctactctgaagtactgacttgctttccagtctgattcacgttagcagtgtgtacactactgtatcatcatcagcttcatcaccctgtaaaccaggctcctctgaagagactttggtgagatgaacgtgaggtaaaaatttcgttcggcaaaaagtgcaatatgtgtggtactttattttttatgttctttttaaatctggggtattagtctgtgctttgggagaaatgcactagctctgcaattcccagctgggcaagtgtgtctctagtatctccacgcaactgatacactggtccctgtaaggcaaacagcatgttagcccgacaggaagagggggcccactttcacattcccggtgacactgaccgtccccagctgccccctcgccacctctgcctgcactgccttctgtcaccgtgggaaaaggaggctgatggttctctacaccatccaccttgagaatccctgcgtgggagagcatcagggcccaccaggggagtggggatggggctcaggggctgttcatgcccatctgagcaaaccccttctctcttccatccacttttgcctttgtctcaacgaggggcgtaacatttccttacagtcaagccccatcaactagaagtgcttattacttttaggattaaaaaagtaataacagactttgacttaatactctgtcttttcagaggcaaagtgggtgggtagaggggagctttaaaaatagaagtacaaaacaacatcctggaaacatatgaccccagatggaataatgtcacattccccagtgcagataatgggctgctgctggctctgtggtgtctgtctgcagaagatttgctcagtcaaggaaattcaagtggtgagacctttccaccatgggtggtaagagaaacctgccttcaccaaaatctctgaaggggaaagaagtggagagaaaggtttgcttcacttcggggactgcagtttgagaaataaaagggatacagagatatctgcactttgtagaaagggcaagattatttgcttatatctgaagggaggtgggtggttttgctggatgtttggtctgaaagagttacttttgataaagttaatctaattgtagttatattttctgtgtgcttttttttaattactaagaaaaaaattggtgagttcagtagctttggtattatgagtgcaaatcataatagctccaatgtgaaaaaaaaaatcaaaagtataacttgtcacttaatgttagaaaattgcctaaaatgcagtgtaataaataatctctgtaccaaatagtaatttaaatggggtaattttctgcaaggaaaatgtactgtttttatgtttccaaccctcttgaattaaaataaaaacaacttcttttctaa

SEQ ID NO: 293712 - DNA, 6752 bp, Homo sapiens
ggcggcgcgcgcctggctgggccctggggagcgggagggaaggagcgaaggagcgaaggagcaagcggagcggccgtcgcccaagccaagccgcgctgccaaccctcccgcccgcccgcgctcctgtccgccgtgtctagcagcggggcccagcatggtcatggcggatggcccgaggcacttgcagcgcgggccggtccgggtggggttctacgacatcgagggcacgctgggcaagggcaacttcgctgtggtgaagctggggcggcaccggatcaccaagacggaggtggcaataaaaataatcgataagtctcagctggatgcagtgaaccttgagaaaatctaccgagaagtacaaataatgaaaatgttagaccaccctcacataatcaaactttatcaggtaatggagaccaaaagtatgttgtaccttgtgacagaatatgccaaaaatggagaaatttttgactatcttgctaatcatggccggttaaatgagtctgaagccaggcgaaaattctggcaaatcctgtctgctgttgattattgtcatggtcggaagattgtgcaccgtgacctcaaagctgaaaatctcctgctggataacaacatgaatatcaaaatagcagatttcggttttggaaatttctttaaaagtggtgaactgctggcaacatggtgtggcagccccccttatgcagccccagaagtctttgaagggcagcagtatgaaggaccacagctggacatctggagtatgggagttgttctttatgtccttgtctgtggagctctgccctttgatggaccgactcttccaattttgaggcagagggttctggaaggaagattccggattccgtatttcatgtcagaagattgcgagcaccttatccgaaggatgttggtcctagacccatccaaacggctaaccatagcccaaatcaaggagcataaatggatgctcatagaagttcctgtccagagacctgttctctatccacaagagcaagaaaatgagccatccatcggggagtttaatgagcaggttctgcgactgatgcacagccttggaatagatcagcagaaaaccattgagtctttgcagaacaagagctataaccactttgctgccatttatttcttgttggtggagcgcctgaaatcacatcggagcagtttcccagtggagcagagacttgatggccgccagcgtcggcctagcaccattgctgagcaaacagttgccaaggcacagactgtggggctcccagtgaccatgcattcaccgaacatgaggctgctgcgatctgccctcctcccccaggcatccaacgtggaggccttttcatttccagcatctggctgtcaggcggaagctgcattcatggaagaagagtgtgtggacactccaaaggtcaatggctgtctgcttgaccctgtgcctcctgtcctggtgcggaagggatgccagtcactgcccagcaacatgatggagacctccattgacgaagggctggagacagaaggagaggccgaggaagaccccgctcatgcctttgaggcatttcagtccacacgcagcgggcagagacggcacactctgtcagaagtgaccaatcaactggtcgtgatgcctggggcagggaaaattttctccatgaatgacagcccctcccttgacagtgtggactctgagtatgatatggggtctgttcagagggacctgaactttctggaagacaacccttcccttaaggacatcatgttagccaatcagccttcaccccgcatgacatctcccttcataagcctgagacctaccaacccagccatgcaggctctgagctcccagaaacgagaggtccacaacaggtctccagtgagcttcagagagggccgcagagcatcagatacctccctcacccagggtgagcacttcctcctctgctttttgaaactcgcgtcgtaggagagcagtttcttgccatgttggtgtggtcacctgtggtcactgaaaggccttgtattttagttaaactgtttggtcttggtgctttctttcaggaattgtagcatttagacaacatcttcagaatctggctagaaccaaaggaattctagagttgaacaaagtgcagttgttgtatgaacaaataggaccggaggcagaccctaacctggcgccggcggctcctcagctccaggaccttgctagcagctgccctcaggaagaagtttctcagcagcaggaaagcgtctccactctccctgccagcgtgcatccccagctgtccccacggcagagcctggagacccagtacctgcagcacagactccagaagcccagccttctgtcaaaggcccagaacacctgtcagctttattgcaaagaaccaccgcggagccttgagcagcagctgcaggaacataggctccagcagaagcgactctttcttcagaagcagtctcaactgcaggcctattttaatcagatgcagatagcagagagctcctacccacagccaagtcagcagctgccccttccccgccaggagactccaccgccttctcagcaggccccaccgttcagcctgacccagcccctgagccccgtcctggagccttcctccgagcagatgcaatacagccctttcctcagccagtaccaagagatgcagcttcagcccctgccctccacttccggtccccgggctgctcctcctctgcccacgcagctacagcagcagcagccgccaccgccaccaccccctccaccaccacgacagccaggagctgccccagcccccttacagttctcctatcagacttgtgagctgccaagcgctgcttcccctgcgccagactatcccactccctgtcagtatcctgtggatggagcccagcagagcgacctaacggggccagactgtcccagaagcccaggactgcaagaggccccctccagctacgacccactagccctctctgagctacctggactctttgattgtgaaatgctagacgctgtggatccacaacacaacgggtatgtcctggtgaattagtctcagcacaggaattgaggtgggtcaggtgaaggaagagtgtatgttcctatttttattccagccttttaaatttaaagcttattttcttgccctctccctaacggggagaaatcgagccacccaactggaatcagagggtctggctggggtggatgttgcttcctcctggttctgccccaccacaaagttttctgtggcaagtgctggaacatagttgtaggctgaggctcctgcccttcggtcgagtggagcaagctctcgagggcagcactgacaaatgtgttcctaagaagacattcagacccaggtcttatgcaggattacatccgtttattatcaagggcaaccttggtgaaagcagaaagggtgtgtgctattgcatatatatgggggaaaaggcaatatatttttcactgaagctgagcaaccacatattgctacaaggcaaatcaagagcaccagccctgggccagggaagacaggctcttcctgcagtttctcgtggacactgctggcttgcgggcagtcggtctccagggtacctgttgtctcttttccgatgtaataactactttgaccttacactatatgttgctagtagtttattgagctttgtatatttggacagtttcatatagggcttagagattttaaggacatgataaatgaacttttctgtcccatgtgaagtggtagtgcggtgcctttcccccagatcatgctttaattctttcttttctgtagaaaccaacagtttccatttatgtcaatgctaaatccaaagtcacttcagagtttgttttccaccatgtgggaatcagcattcttaatttcgttaaagttttgacttgtaatgaaatgttcaagtattacagcaatattcaaagaaagaaccacagatgtgttaaccatttaagcagatcatctgccaaacattatattactaataaaacttaaccaacacttacaattcagtcatcaaagtaagtaaaaattagatgctacagctagctaactgtatccctagaaatgatgaataatttgccatttggacagttaacatccaggtgttacaaagtcagtgttaattctaaagatgatcatttctgccctttagaatggcttgtcccatcagcagatgaatgtgttaagcacaaagcatcttccttaaagcacaaagagagggactaactgatgctgcatctagaaaacacctttaagttgcctttcctctttgtagttagcgttcaggcaggtgacgtgtggaaagtctagggggttccattctggccatgcgagcccagctcctaccaacgtcggtaacttgagcagtccctgttgctggccagagactgcctggtcgccagcgctcaccatgggtgccaggatgcttcgcagaggcactgtgctcacggttggacttggtgtcagtgggaaagggcagtgtggggactgtcatttttgtgatttaataacacacagtgaaaatccaggaagaatgaattaagcttcttctgggagttgtttattcctgctcgtgcttaagattgatgatttcgtgaaataaagaacatcatttcatttaagagatcatttcattaagatctctaatctgttttgagtctttacaaaatagccagttataaaatggggcttgatttgtttagactgaaggaagacgttttcccaaaatatactacagaagtgctacaatatttgcgatattaaaatgcctgcagattgaaaatgggggccactcatttcagaactgcaggaatggtgtagttacagatcgacataaactcctgccccccaacaatgccatgagctgcttagcccaggagacctgggagctatggcaggacggttaggccagccgatgagggactgcagagaggctactggaaggttaaggacccagagagaaatcgagaggtgccctacagcagccaggcctatcaggatccgtcacacacggcagcggcgtggacaccggcctgatgcagagcgtgacccctcctgctgggacctgtgttgtaagctcctatttgcttatcttgtttatttcaagcagaaatcaataaattccataaccctctgtattgactgcaatgtaagctgctgaggagactggttctgttggtcagtcaggtgtttgctcagccctgtctgatcacctgtgctgctctgtccctaactagtgacccatggaagcttccaagcagttttctcttcatcactactaacaaacgaaacactaagaaggcttagtatcgctctttttctgcggggctactctgaagtactgacttgctttccagtctgattcacgttagcagtgtgtacactactgtatcatcatcagcttcatcaccctgtaaaccaggctcctctgaagagactttggtgagatgaacgtgaggtaaaaatttcgttcggcaaaaagtgcaatatgtgtggtactttattttttatgttctttttaaatctggggtattagtctgtgctttgggagaaatgcactagctctgcaattcccagctgggcaagtgtgtctctagtatctccacgcaactgatacactggtccctgtaaggcaaacagcatgttagcccgacaggaagagggggcccactttcacattcccggtgacactgaccgtccccagctgccccctcgccacctctgcctgcactgccttctgtcaccgtgggaaaaggaggctgatggttctctacaccatccaccttgagaatccctgcgtgggagagcatcagggcccaccaggggagtggggatggggctcaggggctgttcatgcccatctgagcaaaccccttctctcttccatccacttttgcctttgtctcaacgaggggcgtaacatttccttacagtcaagccccatcaactagaagtgcttattacttttaggattaaaaaagtaataacagactttgacttaatactctgtcttttcagaggcaaagtgggtgggtagaggggagctttaaaaatagaagtacaaaacaacatcctggaaacatatgaccccagatggaataatgtcacattccccagtgcagataatgggctgctgctggctctgtggtgtctgtctgcagaagatttgctcagtcaaggaaattcaagtggtgagacctttccaccatgggtggtaagagaaacctgccttcaccaaaatctctgaaggggaaagaagtggagagaaaggtttgcttcacttcggggactgcagtttgagaaataaaagggatacagagatatctgcactttgtagaaagggcaagattatttgcttatatctgaagggaggtgggtggttttgctggatgtttggtctgaaagagttacttttgataaagttaatctaattgtagttatattttctgtgtgcttttttttaattactaagaaaaaaattggtgagttcagtagctttggtattatgagtgcaaatcataatagctccaatgtgaaaaaaaaaatcaaaagtataacttgtcacttaatgttagaaaattgcctaaaatgcagtgtaataaataatctctgtaccaaatagtaatttaaatggggtaattttctgcaaggaaaatgtactgtttttatgtttccaaccctcttgaattaaaataaaaacaacttcttttctaa

SEQ ID NO: 293713 - DNA, 2091 bp, Homo sapiens
aaacatgaaaggtgaaaattggagaacagggaagctcgtaagttggagtcattgtacaggctgaggcaggagaatggcgtgaacccgggaggtggagcttgcagtgagccaagatcgtgccactgcactccagcctgggcgacagagcaagactccacctcaaaaaaaaaaaaaaagacaagagcagtatcatctgcctctgtttctaaactggacaaagagattttcttaaagtttctatcatctcccttctgacaggttctacagtgtggtctgaagcacctgtaatgtcagagcccttgtctggcccttggtggcaggtgaacgaaagcagtggagcctctcaccttccagtagcctctcacattcttattttaccatttttgtcctaattaaggtagcctagctgattctagaagacagccatcctacgtgcacccccaccttgtgtccacatcttctccaggcaggtttcaacctatcagcagactcaggcacacactggggcacagatagagaaccaggcggcagcagtgctcgcagacccacccagggagagctgtgatgggttctgcccagatactctgctcgcccacccacaagggagcaatagcttatatttgtacattagttttaccaagcactttctcttctaaccctcacaacaattctatgaaattagctggggagatactgtccttatttttcacagctgaagaaaccaaagctttgggaagtttgtgacttctctgagatcacagctggtgatagaaggagctgggacacgcgcttgggttgactggcttctggttttggttctctggcttctagtgctggaagaagccctctctttcccttctctttcctcagtagcatctgactcttttcataagcaaacagctgtataaacaaagcccccattttggtcaagcacagggtgaatgtgatattgttcccacaaccttattctccactcaacagccgcctggctttggggaagaggccgccttcaggtgacagtgcagctgtccaggtggccgtgcactgaaccaggctgagggagacaaaaaccccgcagacccgcctgcctttcagcgtccagttaactgcagaagtttaggctcacctcaaagatgtctagtttttccaagttacaatacagcagtttcctacagaacacccccttcctcaattgccaaggggccgcatcgcacggcatcaggccaccactgcaggccagcagattccaccccaggaacggtcatgaactcagcctttgtctcaacgaggggcgtaacatttccttacagtcaagccccatcaactagaagtgcttattacttttaggattaaaaaagtaataacagactttgacttaatactctgtcttttcagaggcaaagtgggtgggtagaggggagctttaaaaatagaagtacaaaacaacatcctggaaacatatgaccccagatggaataatgtcacattccccagtgcagataatgggctgctgctggctctgtggtgtctgtctgcagaagatttgctcagtcaaggaaattcaagtggtgagacctttccaccatgggtggtaagagaaacctgccttcaccaaaatctctgaaggggaaagaagtggagagaaaggtttgcttcacttcggggactgcagtttgagaaataaaagggatacagagatatctgcactttgtagaaagggcaagattatttgcttatatctgaagggaggtgggtggttttgctggatgtttggtctgaaagagttacttttgataaagttaatctaattgtagttatattttctgtgtgcttttttttaattactaagaaaaaaattggtgagttcagtagctttggtattatgagtgcaaatcataatagctccaatgtgaaaaaaaaaatcaaaagtataacttgtcacttaatgttagaaaattgcctaaaatgcagtgtaataaataatctctgtaccaaatagtaatttaaatggggtaattttctgcaaggaaaatgtactgtttttatgtttccaaccctcttgaattaaaataaaaacaacttcttttctaa

SEQ ID NO: 293714 - DNA, 2126 bp, Homo sapiens
accacaagagtgagccacagcatccagctagtttgtatatcccaagaaacgccgggcgtggtggtgggcgcctgtagttccagctactcgggaggctgaggcaggagaatggcgtgaacccgggaggtggagcttgcagtgagccaagatcgtgccactgcactccagcctgggcgacagagcaagactccacctcaaaaaaaaaaaaaaagacaagagcagtatcatctgcctctgtttctaaactggacaaagagattttcttaaagtttctatcatctcccttctgacaggttctacagtgtggtctgaagcacctgtaatgtcagagcccttgtctggcccttggtggcaggtgaacgaaagcagtggagcctctcaccttccagtagcctctcacattcttattttaccatttttgtcctaattaaggtagcctagctgattctagaagacagccatcctacgtgcacccccaccttgtgtccacatcttctccaggcaggtttcaacctatcagcagactcaggcacacactggggcacagatagagaaccaggcggcagcagtgctcgcagacccacccagggagagctgtgatgggttctgcccagatactctgctcgcccacccacaagggagcaatagcttatatttgtacattagttttaccaagcactttctcttctaaccctcacaacaattctatgaaattagctggggagatactgtccttatttttcacagctgaagaaaccaaagctttgggaagtttgtgacttctctgagatcacagctggtgatagaaggagctgggacacgcgcttgggttgactggcttctggttttggttctctggcttctagtgctggaagaagccctctctttcccttctctttcctcagtagcatctgactcttttcataagcaaacagctgtataaacaaagcccccattttggtcaagcacagggtgaatgtgatattgttcccacaaccttattctccactcaacagccgcctggctttggggaagaggccgccttcaggtgacagtgcagctgtccaggtggccgtgcactgaaccaggctgagggagacaaaaaccccgcagacccgcctgcctttcagcgtccagttaactgcagaagtttaggctcacctcaaagatgtctagtttttccaagttacaatacagcagtttcctacagaacacccccttcctcaattgccaaggggccgcatcgcacggcatcaggccaccactgcaggccagcagattccaccccaggaacggtcatgaactcagcctttgtctcaacgaggggcgtaacatttccttacagtcaagccccatcaactagaagtgcttattacttttaggattaaaaaagtaataacagactttgacttaatactctgtcttttcagaggcaaagtgggtgggtagaggggagctttaaaaatagaagtacaaaacaacatcctggaaacatatgaccccagatggaataatgtcacattccccagtgcagataatgggctgctgctggctctgtggtgtctgtctgcagaagatttgctcagtcaaggaaattcaagtggtgagacctttccaccatgggtggtaagagaaacctgccttcaccaaaatctctgaaggggaaagaagtggagagaaaggtttgcttcacttcggggactgcagtttgagaaataaaagggatacagagatatctgcactttgtagaaagggcaagattatttgcttatatctgaagggaggtgggtggttttgctggatgtttggtctgaaagagttacttttgataaagttaatctaattgtagttatattttctgtgtgcttttttttaattactaagaaaaaaattggtgagttcagtagctttggtattatgagtgcaaatcataatagctccaatgtgaaaaaaaaaatcaaaagtataacttgtcacttaatgttagaaaattgcctaaaatgcagtgtaataaataatctctgtaccaaatagtaatttaaatggggtaattttctgcaaggaaaatgtactgtttttatgtttccaaccctcttgaattaaaataaaaacaacttcttttctaa

SEQ ID NO: 293715 - DNA, 1243 bp, Homo sapiens
gggagaagcctcacgagtgcagggactgtgggaaggccttcaagaccaggaaccgtctctgtatgcatcagcttatccacaccggggagaagccttacaaatgtaactgctgtgggaaggccttccagtttaagcattcccttaccatccatggcagaatccacactggggagaagccatatgaatgtgaggagtgcgggaaggccttcagtgggagttcagacctcaccaaacacataagaatccacactggggaacgaccttatgagtgcagcaagtgtggaagggccttcagtcggagctcagacctaagcaaacacaaacgaatccatactcgggagaaacactatgggtgtccccagtgtggaaaagacttcagcatcaaggcagaactcaccaaacacagaaggatccacactgaagagaaacgttacaggtgtgaggagtgtgggaaagcctttcgtcataactgtaagcgcagggctcatgaacgagagcatacaggggagaagccctatcaatgcagggattgtgggaaaaccttccaagataagcactgccttaccatccatcagagaatccacactggagagaaaccttacaaatgtttagagtgtgggaaagctttcagtgggaagtcaaacttgaccaatcatcgaagaattcacactggagagaagcctcacaaatgtgaggtatgtggaatggccttccatcatagttcagtcctgaggcagcacaaaagaatccacactggtgagaagccatacacctgcagtgagtgtggcacgtccttccgtcagggctcagctctgattggacataagcgagttcatactggggagaaaccttatgaatgtgaggaatgtggaaaagcttttagagtgagctcaaatcttactggacataagaaaagaaaacatcaagtatggagtacccatgaacttgatgggagtaggaaatccctctctccagtgactgtttctcagacctcagtagtcagtattttgaccagtgcctgagtataacgattctggtgttactttctgtttttcctacctcttaggctggtccttctgtctcttatattagttattcctgatttcctgacccttaattgtgagattccccaaagacattgtcctttaccttcttattcactattttttcagtgagcacatttacttccaagagtttatcaatcacttcctaatattaataaacacttattagtgcttaaagt

SEQ ID NO: 293716 - DNA, 348 bp, Homo sapiens
caggttagtattttgtaaatttgtcaaaacacagatacagtggaaacactaattttttatgcaaaaaaagttcttaaaatacagtttaactacgccgcactccagaaagtggaaggactggttgatggtcacaaacagctgaagatactacttgtatctctcaggattttcaaatgctagtattttgagcctttcttttggtaaggaaatatacagttgcatttagataatatagaaatgtccaaagaagaaataaaaataacttagaatccatagataactattgttaaaattatagtgtgttttcttttcactctttttttccattatgtttcagtttgattgtcg

SEQ ID NO: 293717 - DNA, 1298 bp, Homo sapiens
gcaggagccattttagaaataaatatcttcctttcaccttcatgttaacgtcccttctgatggtctcactcttcacaggtagttcacactctgagacttgaagtaagctcatggttcagtactctgggggcgcagggctgcgcaggacccttggaaatgttgcaagtgttactagtaccagtttcactttttgttgtcacaatttactgtattttttactttttctgttacagttttgctaatttatcagaaggtccaaaagtctgacataactatttcattttgcattatttatttatgatgcttttttcattgtcttttatacatttgggattataaattatgtaaatgttaaaatgagcatctcaaagaagtctgttaaatcatgactgaaaaaaatcaatcagatgtatcttcaaaaagtggagtcccagttttatgaatcagagatataaaccagaaattctataactgatcatagaagaagaatccagtaattgaacaaatcctatttaatgacatccttgtagcatagatggtctataatgctgaccacagatttcttagaaatgctgctctctctatttaactaacattttgttcagttttgcctccagtggaagcagaaagggttttttcagctgttaaatcctaaaaatcaatataatttatttatgtaagaaaaataactcaatcaatatatttttgaaccttttaagtactaattttctttttatcaagtagaaaaaaaaatgtatttgccctaaatccttaaaatacaaatgctataaaaattcctgtatcttgaaagccttactgcaaatgagtattatagacatccagcagagtctggttttctttgttgtcgttgtgttgttgttgttttgtatggaaaagctgctttccccgggttccacttataacctccggtaggtcacagggttcaatgtggatctgacttaaaaacccaccagcatgctcaatcccttgttatccttatggaatctgtatgttaactctctgggtgttcaggcttctatttgactgctgttgtgaccctgtttgcaaaatgaatatgacactctgtggattatttgctctgtaaggcacaagtgcttcttatgattattttgacgtttccaagagcaaaagccaaatttaaactctcttcagcaaacttgagccttttcatctaattccatgtcactcacggccataactttccttgaccattcttcaccccatgtcttacataataaattgtggtcttgatcctggatttaaaaacaaaagaaaaa

SEQ ID NO: 293718 - DNA, 5694 bp, Homo sapiens
ttcagagtcccttgaaaatgaacctgaaaatctagtgagagtagaaagcagagatgatcatctcagcctgcctgatgtgacatgtgaaaactttatttctaaagttcaggatgtcatttccatcaaccatgatgaaagtctgctgcctgagtccttagagagcatgatgtatggtaagaaggtgctcagccaagaaccaagctcttttcaggagagcccaagtaccaatactgaatctagaaaagatgttattaccatctcaataagcaaagatgggaactgccagtctggtggccctgaggcagaaatagcttctggccctacttttatgggtagcttagaagcaggaggagtagctcaagcaaacatcaaaaatggaaaacatttgttgatgtctatttcaaaggaaggggagctctgctgcagtgaggcaggacagagacctgaaaacattggccagctggaagccaagtgtttagcttccccttccttgaatccaggaaatgaaagtgggtttgtagatatgtgcagtcttagtgtctgtgactccaaaagaaacctgtcatcagatcagcaattaattgatttattggaaaacaaaagcttagaaagtaaattgattttgagtcagaaccacagtgatgaggaggaagaagaggaggaaaacgaggaggaaaacttagccatggcagtaggcatgggggaaaggccagaggtattgcatctcacggagcccactactaacatctcaagggaaaagaaccaaggcttccaagatgaaaccaagaaaggaagcttagaggtggcaaaccagactcctgggctacagagggctttccccgctccagcagcctgtcagtgccactgcaaacacatggagaggtggatgcatggcctcgagaatgatgaatttgaaatcgagaaacccaaggcttatatcccagatctgttcaaaagtaaaaccaatactatcgccatggagggtgaacccactgctattccatcacagccgtttaaagtgaagcatgagcttttaaaagaaccttggaaagaaagtgcagaggggcaaaacgttttccccacatatcctcttgaaggaagtgagctcaaatcagaagacatggattttgagaataaagatgattatgatagagacggaaactgccatagtcaagattatccagggaagtactctgaagaggagagcaagagctcaacatcgggcatcacaggagacattggggatgagctacaggaggctcgagctcccactattgctcagctgctacaggagaaaactctctattccttctctgagtggccaaaggaccgcgtgataattaaccgcctagataatatctgccacgtggtgttaaaggggaagtggccctctagccagcagtatgagccctcaggcacactgcccaccccggtattaaccagcagtgctggttctcgaaccagcctctcagagccggaagcagcagaacacagcttcagcaacggcgcagcattggcggcccagatccacaaggagagcttcttagctccagtattcacaaaggatgaacaaaagcacaggcgtccctatgagtttgaggtggagagggatgcaaaggctcggggcctggagcagttctctgccacccacgggcacacccctatcatcctcaatggctggcatggggagtcagctatggacctctcctgctcatcagaggggtccccaggagccacatcccctttcccagtgagcgccagcacccctaagattggggctatcagttcacttcagggagcccttggcatggacttgtctgggattctgcaagctggcctgatccatcctgtgactggacagattgtcaatggaagcctcagaagagatgatgcagccacgaggaggcggagagggaggcggaaacatgttgaaggagggatggacctcatctttttgaaggagcagacacttcaggcgggaatcttggaagtccatgaagacccagggcaggccaccttgagcaccacacaccctgaggggccagggcctgccacctcggctcctgagccagctacggcagccagcagccaagccgagaaatccattcccagcaagagtctgcttgactggctaaggcagcaggctgactactccttagaagttcctggctttggggcaaatttttcagacaaaccaaagcagaggaggccacgctgtaaagaacctggaaaattagatgtcagctccctgagcggggaagagagagttcctgccatccccaaggagccaggactgagggggtttcttccagaaaacaagttcaatcacactctggctgagcctattcttcgagatacgggcccccgcaggagggggaggcggcctcggagcgaactcctgaaggctccttccattgtggcagactctccctctggaatggggccactgttcatgaatggactgattgctgggatggacctggtaggacttcagaacatgagaaatatgccaggcatccccctcaccgggctggtggggtttccagctggctttgccacgatgccaacaggtgaagaggtcaaaagtaccctgagcatgctgcccatgatgctgccaggcatggctgctgtgccccagatgtttggtgttgggggactcctcagtccacccatggcaaccacctgcacttccactgctccggcgtctctatcaagcacaacgaaaagtggtacggcagtgactgaaaagactgcggaagacaagccgagtagccatgatgtgaaaacagacactttagctgaggacaagcctggtccaggtccattttctgatcagtctgaacctgcaataactactagtagtcctgtggcttttaacccatttctcatcccaggagtatctcctggactcatttacccatccatgttcctctcccctggtatgggcatggctctgccagccatgcagcaggccagacactcggaaatagtaggtctggagagccagaagaggaagaagaagaagacaaagggggacaaccccaactcccacccagagcctgctcccagctgtgaaagggagcccagcggtgatgagaactgtgccgaacccagtgcccctttgcccgcagagagagaacatggggcacaggctggggagggggcactcaaagactccaacaacgacaccaattagaacttttttcatttaagaaattattgtgacttgtaagtttcttatcccataaaggtttgttacttccctcacttcacctccataagaacctgtgtttccataagtaagattacgtacctgatttcctgtctgagaactatggtaacagatgttaatagttgcagggtctcaccacttcattagataagtgttgtctacctagtctaggaggcacagaattctcattctgttatccagttcattccagcaatcatagttaatacagtacttggtgacacgccctacccccttctcttccaagtttcccactcacttgaggaggaaaaatggcaaaagaaagctgtctagggttttaccattgaagggtggaagaacagagacaaagaggagctctttttctgtgagctgggttgcacaggaagaatgtcacagggaaccaaaaagcacagaaaaaggaagtgctggtgcatatttttgagttaaaatatttccctattttatcatgattactaagtgagtagtatagacagaagtatataactaatggttgaaaatacatatattcatttctttataaaaaacaaaaaccttaccggtagtaatataatttcccccttggtggtttttcagacacctgcagcaagaagaaatactgactgactaggcattattttctatacatccctctcaccagtgaaaagattcctcttgctgcgagaaagctttacccaccatgagttattgctgtcgacgggggtggggcaaggacccgcgctccgtagagctacacgctgcttcacaagcacacggctagcgctctgctctcacctggttcgcttacagatttctctagccattaatttgcctctctgtgtttaaagagcaccaggaccgaatggattttcacttcaggctttccttcaccaagaataaggttctttctggagcctgcaagaagacagttgcccaacactttgacacttgctagtaggtcctttgatcaagagtgtctgaggctgtcaaatgtgtgccaccctttataatacagctatgaaaagttacttctccattaatttctccattctgtttatatcttacagttggacccaaattccaaattatcagttaatcgaaactacattgcaagtcaacattattttctcttcttcctcagcttctccatgtttaggaactgagaaagaacctgcctaagcagcacttccccatgtcctttcaccttcatgttaacgtcccttctgatggtctcactcttcacaggtagttcacactctgagacttgaagtaagctcatggttcagtactctgggggcgcagggctgcgcaggacccttggaaatgttgcaagtgttactagtaccagtttcactttttgttgtcacaatttactgtattttttactttttctgttacagttttgctaatttatcagaaggtccaaaagtctgacataactatttcattttgcattatttatttatgatgcttttttcattgtcttttatacatttgggattataaattatgtaaatgttaaaatgagcatctcaaagaagtctgttaaatcatgactgaaaaaaatcaatcagatgtatcttcaaaaagtggagtcccagttttatgaatcagagatataaaccagaaattctataactgatcatagaagaagaatccagtaattgaacaaatcctatttaatgacatccttgtagcatagatggtctataatgctgaccacagatttcttagaaatgctgctctctctatttaactaacattttgttcagttttgcctccagtggaagcagaaagggttttttcagctgttaaatcctaaaaatcaatataatttatttatgtaagaaaaataactcaatcaatatatttttgaaccttttaagtactaattttctttttatcaagtagaaaaaaaaatgtatttgccctaaatccttaaaatacaaatgctataaaaattcctgtatcttgaaagccttactgcaaatgagtattatagacatccagcagagtctggttttctttgttgtcgttgtgttgttgttgttttgtatggaaaagctgctttccccgggttccacttataacctccggtaggtcacagggttcaatgtggatctgacttaaaaacccaccagcatgctcaatcccttgttatccttatggaatctgtatgttaactctctgggtgttcaggcttctatttgactgctgttgtgaccctgtttgcaaaatgaatatgacactctgtggattatttgctctgtaaggcacaagtgcttcttatgattattttgacgtttccaagagcaaaagccaaatttaaactctcttcagcaaacttgagccttttcatctaattccatgtcactcacggccataactttccttgaccattcttcaccccatgtcttacataataaattgtggtcttgatcctggatttaaaaacaaaagaaaaa

SEQ ID NO: 293719 - DNA, 4023 bp, Homo sapiens
  misc_feature (5)..(5): n is a, c, g, or t
cattnggtaaccgttcgtacgagaatcgctgtcctctccttgcggccgccagtgtggtggaattcgagttaaagtgtaccaagtggacaagagcgggagaggagtgctcaggtgaagggaacaccaaatcacttgcaagagcttatgtgggcgtgggtcagtggtgtgtgtagggttctaattcaggcaccccagctgagtaatatcagggtggaaataggtggagtgattcaaataacaccttacatgttttctttctttagaaactaattttcattgtgtcgtgattatacatactcgtttttccttcatccaggaagtccatgaagacccagggcaggccaccttgagcaccacacaccctgaggggccagggcctgccacctcggctcctgagccagctacggcagccagcagccaagccgagaaatccattcccagcaagagtctgcttgactggctaaggcagcaggctgactactccttagaagttcctggctttggggcaaatttttcagacaaaccaaagcagaggaggccacgctgtaaagaacctggaaaattagatgtcagctccctgagcggggaagagagagttcctgccatccccaaggagccaggactgagggggtttcttccagaaaacaagttcaatcacactctggctgagcctattcttcgagatacgggcccccgcaggagggggaggcggcctcggagcgaactcctgaaggctccttccattgtggcagactctccctctggaatggggccactgttcatgaatggactgattgctgggatggacctggtaggacttcagaacatgagaaatatgccaggcatccccctcaccgggctggtggggtttccagctggctttgccacgatgccaacaggtgaagaggtcaaaagtaccctgagcatgctgcccatgatgctgccaggcatggctgctgtgccccagatgtttggtgttgggggactcctcagtccacccatggcaaccacctgcacttccactgctccggcgtctctatcaagcacaacgaaaagtggtacggcagtgactgaaaagactgcggaagacaagccgagtagccatgatgtgaaaacagacactttagctgaggacaagcctggtccaggtccattttctgatcagtctgaacctgcaataactactagtagtcctgtggcttttaacccatttctcatcccaggagtatctcctggactcatttacccatccatgttcctctcccctggtatgggcatggctctgccagccatgcagcaggccagacactcggaaatagtaggtctggagagccagaagaggaagaagaagaagacaaagggggacaaccccaactcccacccagagcctgctcccagctgtgaaagggagcccagcggtgatgagaactgtgccgaacccagtgcccctttgcccgcagagagagaacatggggcacaggctggggagggggcactcaaagactccaacaacgacaccaattagaacttttttcatttaagaaattattgtgacttgtaagtttcttatcccataaaggtttgttacttccctcacttcacctccataagaacctgtgtttccataagtaagattacgtacctgatttcctgtctgagaactatggtaacagatgttaatagttgcagggtctcaccacttcattagataagtgttgtctacctagtctaggaggcacagaattctcattctgttatccagttcattccagcaatcatagttaatacagtacttggtgacacgccctacccccttctcttccaagtttcccactcacttgaggaggaaaaatggcaaaagaaagctgtctagggttttaccattgaagggtggaagaacagagacaaagaggagctctttttctgtgagctgggttgcacaggaagaatgtcacagggaaccaaaaagcacagaaaaaggaagtgctggtgcatatttttgagttaaaatatttccctattttatcatgattactaagtgagtagtatagacagaagtatataactaatggttgaaaatacatatattcatttctttataaaaaacaaaaaccttaccggtagtaatataatttcccccttggtggtttttcagacacctgcagcaagaagaaatactgactgactaggcattattttctatacatccctctcaccagtgaaaagattcctcttgctgcgagaaagctttacccaccatgagttattgctgtcgacgggggtggggcaaggacccgcgctccgtagagctacacgctgcttcacaagcacacggctagcgctctgctctcacctggttcgcttacagatttctctagccattaatttgcctctctgtgtttaaagagcaccaggaccgaatggattttcacttcaggctttccttcaccaagaataaggttctttctggagcctgcaagaagacagttgcccaacactttgacacttgctagtaggtcctttgatcaagagtgtctgaggctgtcaaatgtgtgccaccctttataatacagctatgaaaagttacttctccattaatttctccattctgtttatatcttacagttggacccaaattccaaattatcagttaatcgaaactacattgcaagtcaacattattttctcttcttcctcagcttctccatgtttaggaactgagaaagaacctgcctaagcagcacttccccatgtcctttcaccttcatgttaacgtcccttctgatggtctcactcttcacaggtagttcacactctgagacttgaagtaagctcatggttcagtactctgggggcgcagggctgcgcaggacccttggaaatgttgcaagtgttactagtaccagtttcactttttgttgtcacaatttactgtattttttactttttctgttacagttttgctaatttatcagaaggtccaaaagtctgacataactatttcattttgcattatttatttatgatgcttttttcattgtcttttatacatttgggattataaattatgtaaatgttaaaatgagcatctcaaagaagtctgttaaatcatgactgaaaaaaatcaatcagatgtatcttcaaaaagtggagtcccagttttatgaatcagagatataaaccagaaattctataactgatcatagaagaagaatccagtaattgaacaaatcctatttaatgacatccttgtagcatagatggtctataatgctgaccacagatttcttagaaatgctgctctctctatttaactaacattttgttcagttttgcctccagtggaagcagaaagggttttttcagctgttaaatcctaaaaatcaatataatttatttatgtaagaaaaataactcaatcaatatatttttgaaccttttaagtactaattttctttttatcaagtagaaaaaaaaatgtatttgccctaaatccttaaaatacaaatgctataaaaattcctgtatcttgaaagccttactgcaaatgagtattatagacatccagcagagtctggttttctttgttgtcgttgtgttgttgttgttttgtatggaaaagctgctttccccgggttccacttataacctccggtaggtcacagggttcaatgtggatctgacttaaaaacccaccagcatgctcaatcccttgttatccttatggaatctgtatgttaactctctgggtgttcaggcttctatttgactgctgttgtgaccctgtttgcaaaatgaatatgacactctgtggattatttgctctgtaaggcacaagtgcttcttatgattattttgacgtttccaagagcaaaagccaaatttaaactctcttcagcaaacttgagccttttcatctaattccatgtcactcacggccataactttccttgaccattcttcaccccatgtcttacataataaattgtggtcttgatcctggatttaaaaacaaaagaaaaa

SEQ ID NO: 293720 - DNA, 3969 bp, Homo sapiens
  misc_feature (5)..(5): n is a, c, g, or t
cattnggtaaccgttcgtacgagaatcgctgtcctctccttgcggccgccagtgtggtggaattcgagttaaagtgtaccaagtggacaagagcgggagaggagtgctcaggtgaagggaacaccaaatcacttgcaagagcttatgtgggcgtgggtcagtggtgtgtgtagggttctaattcaggcaccccagctgagtaatatcagggtggaaataggtggagtgattcaaataacaccttacatgttttctttctttagaaactaattttcattgtgtcgtgattatacatactcgtttttccttcatccaggaagtccatgaagacccagggcaggccaccttgagcaccacacaccctgaggggccagggcctgccacctcggctcctgagccagctacggcagccagcagccaagccgagaaatccattcccagcaagagtctgcttgactggctaaggcagcaggctgactactccttagaagttcctggctttggggcaaatttttcagacaaaccaaagcagaggaggccacgctgtaaagaacctggaaaattagatgtcagctccctgagcggggaagagagagttcctgccatccccaaggagccaggactgagggggtttcttccagaaaacaagttcaatcacactctggctgagcctattcttcgagatacgggcccccgcaggagggggaggcggcctcggagcgaactcctgaaggctccttccattgtggcagactctccctctggaatggggccactgttcatgaatggactgattgctgggatggacctggtaggacttcagaacatgagaaatatgccaggcatccccctcaccgggctggtggggtttccagctggctttgccacgatgccaacaggtgaagaggtcaaaagtaccctgagcatgctgcccatgatgctgccaggcatggctgctgtgccccagatgtttggtgttgggggactcctcagtccacccatggcaaccacctgcacttccactgctccggcgtctctatcaagcacaacgaaaagtggtacggcagtgactgaaaagactgcggaagacaagccgagtagccatgatgtgtctgaacctgcaataactactagtagtcctgtggcttttaacccatttctcatcccaggagtatctcctggactcatttacccatccatgttcctctcccctggtatgggcatggctctgccagccatgcagcaggccagacactcggaaatagtaggtctggagagccagaagaggaagaagaagaagacaaagggggacaaccccaactcccacccagagcctgctcccagctgtgaaagggagcccagcggtgatgagaactgtgccgaacccagtgcccctttgcccgcagagagagaacatggggcacaggctggggagggggcactcaaagactccaacaacgacaccaattagaacttttttcatttaagaaattattgtgacttgtaagtttcttatcccataaaggtttgttacttccctcacttcacctccataagaacctgtgtttccataagtaagattacgtacctgatttcctgtctgagaactatggtaacagatgttaatagttgcagggtctcaccacttcattagataagtgttgtctacctagtctaggaggcacagaattctcattctgttatccagttcattccagcaatcatagttaatacagtacttggtgacacgccctacccccttctcttccaagtttcccactcacttgaggaggaaaaatggcaaaagaaagctgtctagggttttaccattgaagggtggaagaacagagacaaagaggagctctttttctgtgagctgggttgcacaggaagaatgtcacagggaaccaaaaagcacagaaaaaggaagtgctggtgcatatttttgagttaaaatatttccctattttatcatgattactaagtgagtagtatagacagaagtatataactaatggttgaaaatacatatattcatttctttataaaaaacaaaaaccttaccggtagtaatataatttcccccttggtggtttttcagacacctgcagcaagaagaaatactgactgactaggcattattttctatacatccctctcaccagtgaaaagattcctcttgctgcgagaaagctttacccaccatgagttattgctgtcgacgggggtggggcaaggacccgcgctccgtagagctacacgctgcttcacaagcacacggctagcgctctgctctcacctggttcgcttacagatttctctagccattaatttgcctctctgtgtttaaagagcaccaggaccgaatggattttcacttcaggctttccttcaccaagaataaggttctttctggagcctgcaagaagacagttgcccaacactttgacacttgctagtaggtcctttgatcaagagtgtctgaggctgtcaaatgtgtgccaccctttataatacagctatgaaaagttacttctccattaatttctccattctgtttatatcttacagttggacccaaattccaaattatcagttaatcgaaactacattgcaagtcaacattattttctcttcttcctcagcttctccatgtttaggaactgagaaagaacctgcctaagcagcacttccccatgtcctttcaccttcatgttaacgtcccttctgatggtctcactcttcacaggtagttcacactctgagacttgaagtaagctcatggttcagtactctgggggcgcagggctgcgcaggacccttggaaatgttgcaagtgttactagtaccagtttcactttttgttgtcacaatttactgtattttttactttttctgttacagttttgctaatttatcagaaggtccaaaagtctgacataactatttcattttgcattatttatttatgatgcttttttcattgtcttttatacatttgggattataaattatgtaaatgttaaaatgagcatctcaaagaagtctgttaaatcatgactgaaaaaaatcaatcagatgtatcttcaaaaagtggagtcccagttttatgaatcagagatataaaccagaaattctataactgatcatagaagaagaatccagtaattgaacaaatcctatttaatgacatccttgtagcatagatggtctataatgctgaccacagatttcttagaaatgctgctctctctatttaactaacattttgttcagttttgcctccagtggaagcagaaagggttttttcagctgttaaatcctaaaaatcaatataatttatttatgtaagaaaaataactcaatcaatatatttttgaaccttttaagtactaattttctttttatcaagtagaaaaaaaaatgtatttgccctaaatccttaaaatacaaatgctataaaaattcctgtatcttgaaagccttactgcaaatgagtattatagacatccagcagagtctggttttctttgttgtcgttgtgttgttgttgttttgtatggaaaagctgctttccccgggttccacttataacctccggtaggtcacagggttcaatgtggatctgacttaaaaacccaccagcatgctcaatcccttgttatccttatggaatctgtatgttaactctctgggtgttcaggcttctatttgactgctgttgtgaccctgtttgcaaaatgaatatgacactctgtggattatttgctctgtaaggcacaagtgcttcttatgattattttgacgtttccaagagcaaaagccaaatttaaactctcttcagcaaacttgagccttttcatctaattccatgtcactcacggccataactttccttgaccattcttcaccccatgtcttacataataaattgtggtcttgatcctggatttaaaaacaaaagaaaaa

SEQ ID NO: 293721 - DNA, 3967 bp, Homo sapiens
  misc_feature (5)..(5): n is a, c, g, or t
cattnggtaaccgttcgtacgagaatcgctgtcctctccttgcggccgccagtgtggtggaattcgagttaaagtgtaccaagtggacaagagcgggagaggagtgctcaggtgaagggaacaccaaatcacttgcaagagcttatgtgggcgtgggtcagtggtgtgtgtagggttctaattcaggcaccccagctgagtaatatcagggtggaaataggtggagtgattcaaataacaccttacatgttttctttctttagaaactaattttcattgtgtcgtgattatacatactcgtttttccttcatccaggaagtccatgaagacccagggcaggccaccttgagcaccacacaccctgaggggccagggcctgccacctcggctcctgagccagctacggcagccagcagccaagccgagaaatccattcccagcaagagtctgcttgactggctaaggcagcaggctgactactccttagaagttcctggctttggggcaaatttttcagacaaaccaaagcagaggaggccacgctgtaaagaacctggaaaattagatgtcagctccctgagcggggaagagagagttcctgccatccccaaggagccaggactgagggggtttcttccagaaaacaagttcaatcacactctggctgagcctattcttcgagatacgggcccccgcaggagggggaggcggcctcggagcgaactcctgaaggctccttccattgtggcagactctccctctggaatggggccactgttcatgaatggactgattgctgggatggacctggtaggacttcagaacatgagaaatatgccaggcatccccctcaccgggctggtggggtttccagctggctttgccacgatgccaacaggtgaagaggtcaaaagtaccctgagcatgctgcccatgatgctgccaggcatggctgctgtgccccagatgtttggtgttgggggactcctcagtccacccatggcaaccacctgcacttccactgctccggcgtctctatcaagcacaacgaaaagtggtacggcagtgactgaaaagactgcggaagacaagccgagtagccatgatgtgaaaacagacactttagctgaggacaagcctggtccaggtccattttctgatcagtctgaacctgcaataactactagtagtcctgtggcttttaacccatttctcatcccaggagtatctcctggactcatttacccatccatgttcctctcccctggtatgggcatggctctgccagccatgcagcaggccagacactcggaaatagtaggtctggagagccagaagaggaagaagaagaagacaaagggggacaaccccaactcccacccagagcctgctcccagctgtgaaagggagcccagcggtgatgagaactgtgccgaacccagtgcccctttgcccgcagagagagaacatggggcacaggctggggagggggcactcaaagactccaacaacgacaccaattagaacttttttcatttaagaaattattgtgacttgtaagtttcttatcccataaaggtttgttacttccctcacttcacctccataagaacctgtgtttccataagtaagattacgtacctgatttcctgtctgagaactatggtaacagatgttaatagttgcagggtctcaccacttcattagataagtgttgtctacctagtctaggaggcacagaattctcattctgttatccagttcattccagcaatcatagttaatacagtacttggtgacacgccctacccccttctcttccaagtttcccactcacttgaggaggaaaaatggcaaaagaaagctgtctagggttttaccattgaagggtggaagaacagagacaaagaggagctctttttctgtgagctgggttgcacaggaagaatgtcacagggaaccaaaaagcacagaaaaaggaagtgctggtgcatatttttgagttaaaatatttccctattttatcatgattactaagtgagtagtatagacagaagtatataactaatggttgaaaatacatatattcatttctttataaaaaacaaaaaccttaccggtagtaatataatttcccccttggtggtttttcagacacctgcagcaagaagaaatactgactgactaggcattattttctatacatccctctcaccagtggggggtggggcaaggacccgcgctccgtagagctacacgctgcttcacaagcacacggctagcgctctgctctcacctggttcgcttacagatttctctagccattaatttgcctctctgtgtttaaagagcaccaggaccgaatggattttcacttcaggctttccttcaccaagaataaggttctttctggagcctgcaagaagacagttgcccaacactttgacacttgctagtaggtcctttgatcaagagtgtctgaggctgtcaaatgtgtgccaccctttataatacagctatgaaaagttacttctccattaatttctccattctgtttatatcttacagttggacccaaattccaaattatcagttaatcgaaactacattgcaagtcaacattattttctcttcttcctcagcttctccatgtttaggaactgagaaagaacctgcctaagcagcacttccccatgtcctttcaccttcatgttaacgtcccttctgatggtctcactcttcacaggtagttcacactctgagacttgaagtaagctcatggttcagtactctgggggcgcagggctgcgcaggacccttggaaatgttgcaagtgttactagtaccagtttcactttttgttgtcacaatttactgtattttttactttttctgttacagttttgctaatttatcagaaggtccaaaagtctgacataactatttcattttgcattatttatttatgatgcttttttcattgtcttttatacatttgggattataaattatgtaaatgttaaaatgagcatctcaaagaagtctgttaaatcatgactgaaaaaaatcaatcagatgtatcttcaaaaagtggagtcccagttttatgaatcagagatataaaccagaaattctataactgatcatagaagaagaatccagtaattgaacaaatcctatttaatgacatccttgtagcatagatggtctataatgctgaccacagatttcttagaaatgctgctctctctatttaactaacattttgttcagttttgcctccagtggaagcagaaagggttttttcagctgttaaatcctaaaaatcaatataatttatttatgtaagaaaaataactcaatcaatatatttttgaaccttttaagtactaattttctttttatcaagtagaaaaaaaaatgtatttgccctaaatccttaaaatacaaatgctataaaaattcctgtatcttgaaagccttactgcaaatgagtattatagacatccagcagagtctggttttctttgttgtcgttgtgttgttgttgttttgtatggaaaagctgctttccccgggttccacttataacctccggtaggtcacagggttcaatgtggatctgacttaaaaacccaccagcatgctcaatcccttgttatccttatggaatctgtatgttaactctctgggtgttcaggcttctatttgactgctgttgtgaccctgtttgcaaaatgaatatgacactctgtggattatttgctctgtaaggcacaagtgcttcttatgattattttgacgtttccaagagcaaaagccaaatttaaactctcttcagcaaacttgagccttttcatctaattccatgtcactcacggccataactttccttgaccattcttcaccccatgtcttacataataaattgtggtcttgatcctggatttaaaaacaaaagaaaaa

SEQ ID NO: 293722 - DNA, 3300 bp, Homo sapiens
  misc_feature (5)..(5): n is a, c, g, or t
cattnggtaaccgttcgtacgagaatcgctgtcctctccttgcggccgccagtgtggtggaattcgagtgattgctgggatggacctggtaggacttcagaacatgagaaatatgccaggcatccccctcaccgggctggtggggtttccagctggctttgccacgatgccaacaggtgaagaggtcaaaagtaccctgagcatgctgcccatgatgctgccaggcatggctgctgtgccccagatgtttggtgttgggggactcctcagtccacccatggcaaccacctgcacttccactgctccggcgtctctatcaagcacaacgaaaagtggtacggcagtgactgaaaagactgcggaagacaagccgagtagccatgatgtgaaaacagacactttagctgaggacaagcctggtccaggtccattttctgatcagtctgaacctgcaataactactagtagtcctgtggcttttaacccatttctcatcccaggagtatctcctggactcatttacccatccatgttcctctcccctggtatgggcatggctctgccagccatgcagcaggccagacactcggaaatagtaggtctggagagccagaagaggaagaagaagaagacaaagggggacaaccccaactcccacccagagcctgctcccagctgtgaaagggagcccagcggtgatgagaactgtgccgaacccagtgcccctttgcccgcagagagagaacatggggcacaggctggggagggggcactcaaagactccaacaacgacaccaattagaacttttttcatttaagaaattattgtgacttgtaagtttcttatcccataaaggtttgttacttccctcacttcacctccataagaacctgtgtttccataagtaagattacgtacctgatttcctgtctgagaactatggtaacagatgttaatagttgcagggtctcaccacttcattagataagtgttgtctacctagtctaggaggcacagaattctcattctgttatccagttcattccagcaatcatagttaatacagtacttggtgacacgccctacccccttctcttccaagtttcccactcacttgaggaggaaaaatggcaaaagaaagctgtctagggttttaccattgaagggtggaagaacagagacaaagaggagctctttttctgtgagctgggttgcacaggaagaatgtcacagggaaccaaaaagcacagaaaaaggaagtgctggtgcatatttttgagttaaaatatttccctattttatcatgattactaagtgagtagtatagacagaagtatataactaatggttgaaaatacatatattcatttctttataaaaaacaaaaaccttaccggtagtaatataatttcccccttggtggtttttcagacacctgcagcaagaagaaatactgactgactaggcattattttctatacatccctctcaccagtgaaaagattcctcttgctgcgagaaagctttacccaccatgagttattgctgtcgacgggggtggggcaaggacccgcgctccgtagagctacacgctgcttcacaagcacacggctagcgctctgctctcacctggttcgcttacagatttctctagccattaatttgcctctctgtgtttaaagagcaccaggaccgaatggattttcacttcaggctttccttcaccaagaataaggttctttctggagcctgcaagaagacagttgcccaacactttgacacttgctagtaggtcctttgatcaagagtgtctgaggctgtcaaatgtgtgccaccctttataatacagctatgaaaagttacttctccattaatttctccattctgtttatatcttacagttggacccaaattccaaattatcagttaatcgaaactacattgcaagtcaacattattttctcttcttcctcagcttctccatgtttaggaactgagaaagaacctgcctaagcagcacttccccatgtcctttcaccttcatgttaacgtcccttctgatggtctcactcttcacaggtagttcacactctgagacttgaagtaagctcatggttcagtactctgggggcgcagggctgcgcaggacccttggaaatgttgcaagtgttactagtaccagtttcactttttgttgtcacaatttactgtattttttactttttctgttacagttttgctaatttatcagaaggtccaaaagtctgacataactatttcattttgcattatttatttatgatgcttttttcattgtcttttatacatttgggattataaattatgtaaatgttaaaatgagcatctcaaagaagtctgttaaatcatgactgaaaaaaatcaatcagatgtatcttcaaaaagtggagtcccagttttatgaatcagagatataaaccagaaattctataactgatcatagaagaagaatccagtaattgaacaaatcctatttaatgacatccttgtagcatagatggtctataatgctgaccacagatttcttagaaatgctgctctctctatttaactaacattttgttcagttttgcctccagtggaagcagaaagggttttttcagctgttaaatcctaaaaatcaatataatttatttatgtaagaaaaataactcaatcaatatatttttgaaccttttaagtactaattttctttttatcaagtagaaaaaaaaatgtatttgccctaaatccttaaaatacaaatgctataaaaattcctgtatcttgaaagccttactgcaaatgagtattatagacatccagcagagtctggttttctttgttgtcgttgtgttgttgttgttttgtatggaaaagctgctttccccgggttccacttataacctccggtaggtcacagggttcaatgtggatctgacttaaaaacccaccagcatgctcaatcccttgttatccttatggaatctgtatgttaactctctgggtgttcaggcttctatttgactgctgttgtgaccctgtttgcaaaatgaatatgacactctgtggattatttgctctgtaaggcacaagtgcttcttatgattattttgacgtttccaagagcaaaagccaaatttaaactctcttcagcaaacttgagccttttcatctaattccatgtcactcacggccataactttccttgaccattcttcaccccatgtcttacataataaattgtggtcttgatcctggatttaaaaacaaaagaaaaa

SEQ ID NO: 293723 - DNA, 683 bp, Homo sapiens
ctcttagactttcaaagtaatctgggaagctgaagtgacacgttctttccctgctcaatcctgcaagcttttaagaagtcttttaccttttttagatgtgcaacaccatagtttctctataatgatcatagaattccaatggaatgaccgataaaaattttcccccttgtcctcagagtatttttttaatttattgatgcaaacacttatttagcatggtcattgttatagaccccattataggcattagtaaaacagaggtaagacaggcattcaaactatagagggtgagtaaattgtggtatggcgttttctttatgtgagagagctaggaaccgagtgctgtggggacaggagctggagcagtgagtgctgcctgggacagtgggcagtggtgacagaggaggaaaactgaatccggcagtcaggatggagttaaagtgtaccaagtggacaagagcgggagaggagtgctcaggtgaagggaacaccaaatcacttgcaagagcttatgtgggcgtgggtcagtggtgtgtgtagggttctaattcaggcaccccagctgagtaatatcagggtggaaataggtggagtgattcaaataacaccttacatgttttctttctttagaaactaattttcattgtgtcgtgattatacatactcgtttttccttcatccag

SEQ ID NO: 293724 - DNA, 366 bp, Homo sapiens
caactacaaaaaacgttatgaaaaatattggattatttcccacaaggactctttaaaatttagtctaaagagtaatccagctgggcgcggtggctcacgcctgtaatcccagcactttgggaggccaaggagggtggatcatgaggtcagatcgagaccaacctggctaacacggtgaaaccccgtctctaccaaaaaaatacaaaaaattagccaggcgtggtggcaggcgcctgcagtcccagctactcaggaggctgaggcaggagaatcgcttgaacccgggaggcagaggttgcagtgagccagattgcaccactgcattgagttagactcagtctcaaaaaaaaaaaaaaaaaaaaagag

SEQ ID NO: 293725 - DNA, 1461 bp, Homo sapiens
ctgccatttaggacaagctggatgatgatggtttgatagctccaggggttcgtgtataggagatgatgaatctgcttcatccagaatcacaatcttaaaaggcgggaactgaggcgactgtggggacatcagtgatcgtaagtctcctgggcccgttattctcagattaggtgacggagctaagacttcgagaccatctcgtcctttttgtatcgcggaaacctgaggaacgagccggcggcggtgacctgcacgagaagccaggctaactgggtgaagtaccatgcaagcatttcttaaaggtacatccatcagtactaaacccccgctgaccaaggatcgaggagtagctgccagtgcgggaagtagcggagagaacaagaaagccaaacccgttccctgggtggaaaaatatcgcccaaaatgtgtggatgaagttgctttccaggaagaagtggttgcagtgctgaaaaaatctttagaaggagcagatcttcctaatctcttgttttacggaccacctggaactggaaaaacatccactattttggcagcagctagagaactctttgggcctgaacttttccgattaagagttcttgagttaaatgcatctgatgaacgtggaatacaagtagttcgagagaaagtgaaaaattttgctcaattaactgtgtcaggaagtcgctcagatgggaagccgtgtccgccttttaagattgtgattctggatgaagcagattctatgacctcagctgctcaggcagctttaagacgtaccatggagaaggagtcgaaaaccacccgattctgtcttatctgtaactatgtcagtcgaataattgaacccctgacctctagatgttcaaaattccgcttcaagcctctgtcagataaaattcaacagcagcgattactagacattgccaagaaggaaaatgtcaaaattagtgatgagggaatagcttatcttgttaaagtgtcagaaggagacttaagaaaagccattacatttcttcaaagcgctactcgattaacaggtggaaaggagatcacagagaaagtgattacagacattgctggggtaataccagctgagaaaattgatggagtatttgctgcctgtcagagtggctcttttgacaaactagaagctgtggtcaaggatttaatagatgagggtcatgcagcaactcagctcgtcaatcaactccatgatgtggttgtagaaaataacttatctgataaacagaagtctattatcacagaaaaacttgccgaagttgacaaatgcctagcagatggtgctgatgaacatttgcaactcatcagcctttgtgcaactgtgatgcagcagttatctcagaattgttaacgtgaatatatctggatggggggttttgtaaataatgaagttgtaataaaaataaaatgaccaaaagcacctttaaaaaaaatata

SEQ ID NO: 293726 - DNA, 1326 bp, Homo sapiens
ctgccatttaggacaagctggatgatgatggtttgatagctccaggggttcgtgtataggagatgatgaatctgcttcatccagaatcacaatcttaaaaggcgggaactgaggcgactgtggggacatcagtgatcggtgaagtaccatgcaagcatttcttaaaggtacatccatcagtactaaacccccgctgaccaaggatcgaggagtagctgccagtgcgggaagtagcggagagaacaagaaagccaaacccgttccctgggtggaaaaatatcgcccaaaatgtgtggatgaagttgctttccaggaagaagtggttgcagtgctgaaaaaatctttagaaggagcagatcttcctaatctcttgttttacggaccacctggaactggaaaaacatccactattttggcagcagctagagaactctttgggcctgaacttttccgattaagagttcttgagttaaatgcatctgatgaacgtggaatacaagtagttcgagagaaagtgaaaaattttgctcaattaactgtgtcaggaagtcgctcagatgggaagccgtgtccgccttttaagattgtgattctggatgaagcagattctatgacctcagctgctcaggcagctttaagacgtaccatggagaaggagtcgaaaaccacccgattctgtcttatctgtaactatgtcagtcgaataattgaacccctgacctctagatgttcaaaattccgcttcaagcctctgtcagataaaattcaacagcagcgattactagacattgccaagaaggaaaatgtcaaaattagtgatgagggaatagcttatcttgttaaagtgtcagaaggagacttaagaaaagccattacatttcttcaaagcgctactcgattaacaggtggaaaggagatcacagagaaagtgattacagacattgctggggtaataccagctgagaaaattgatggagtatttgctgcctgtcagagtggctcttttgacaaactagaagctgtggtcaaggatttaatagatgagggtcatgcagcaactcagctcgtcaatcaactccatgatgtggttgtagaaaataacttatctgataaacagaagtctattatcacagaaaaacttgccgaagttgacaaatgcctagcagatggtgctgatgaacatttgcaactcatcagcctttgtgcaactgtgatgcagcagttatctcagaattgttaacgtgaatatatctggatggggggttttgtaaataatgaagttgtaataaaaataaaatgaccaaaagcacctttaaaaaaaatata

SEQ ID NO: 293727 - DNA, 1724 bp, Homo sapiens
gaagggaggagcgtctctgcccagctgcccatcgtctgagatgtggggagcgcctctgccctgccgccccgtctgggatgtgaggagcgcctctgcccggccgcgaccctgtctgggagatttctaagtggggctcaggaattataatagatgtccacagctgcatggtcttctctctccacaacacgcagacactattagaggtaaaagccacgtgtcctcaagagggcaaggcaaagcatcttcagatgtctctgcccttaaagcacacgcgttctgctctgcgacgaagcaggacaaggaggacagggacctgcacctccggaggcccgcacctacgaagatagcgggctcgggaccttcggtggaccggcagggttccagaggcccgcgcgccgccgccccgccctcattgctgagcctgccagattaggtgacggagctaagacttcgagaccatctcgtcctttttgtatcgcggaaacctgaggaacgagccggcggcggtgacctgcacgagaagccaggctaactgggtgaagtaccatgcaagcatttcttaaaggtacatccatcagtactaaacccccgctgaccaaggatcgaggagtagctgccagtgcgggaagtagcggagagaacaagaaagccaaacccgttccctgggtggaaaaatatcgcccaaaatgtgtggatgaagttgctttccaggaagaagtggttgcagtgctgaaaaaatctttagaaggagcagatcttcctaatctcttgttttacggaccacctggaactggaaaaacatccactattttggcagcagctagagaactctttgggcctgaacttttccgattaagagttcttgagttaaatgcatctgatgaacgtggaatacaagtagttcgagagaaagtgaaaaattttgctcaattaactgtgtcaggaagtcgctcagatgggaagccgtgtccgccttttaagattgtgattctggatgaagcagattctatgacctcagctgctcaggcagctttaagacgtaccatggagaaggagtcgaaaaccacccgattctgtcttatctgtaactatgtcagtcgaataattgaacccctgacctctagatgttcaaaattccgcttcaagcctctgtcagataaaattcaacagcagcgattactagacattgccaagaaggaaaatgtcaaaattagtgatgagggaatagcttatcttgttaaagtgtcagaaggagacttaagaaaagccattacatttcttcaaagcgctactcgattaacaggtggaaaggagatcacagagaaagtgattacagacattgctggggtaataccagctgagaaaattgatggagtatttgctgcctgtcagagtggctcttttgacaaactagaagctgtggtcaaggatttaatagatgagggtcatgcagcaactcagctcgtcaatcaactccatgatgtggttgtagaaaataacttatctgataaacagaagtctattatcacagaaaaacttgccgaagttgacaaatgcctagcagatggtgctgatgaacatttgcaactcatcagcctttgtgcaactgtgatgcagcagttatctcagaattgttaacgtgaatatatctggatggggggttttgtaaataatgaagttgtaataaaaataaaatgaccaaaagcacctttaaaaaaaatata

SEQ ID NO: 293728 - DNA, 1380 bp, Homo sapiens
ctgccatttaggacaagctggatgatgatggtttgatagctccaggggttcgtgtataggagatgatgaatctgcttcatccagaatcacaatcttaaaaggcgggaactgaggcgactgtggggacatcagtgatcgtaagtctcctgggcccgttattctcagattaggtgacggagctaagacttcgagaccatctcgtcctttttgtatcgcggaaacctgaggaacgagccggcggcggtgacctgcacgagaagccaggctaactgggtgaagtaccatgcaagcatttcttaaaggtacatccatcagtactaaacccccgctgaccaaggatcgaggagtagctgccagtgcgggaagtagcggagagaacaagaaagccaaacccgttccctgggtggaaaaatatcgcccaaaatgtgtggatgaagttgctttccaggaagaagtggttgcagtgctgaaaaaatctttagaaggagcagatcttcctaatctcttgttttacggaccacctggaactggaaaaacatccactattttggcagcagctagagaactctttgggcctgaacttttccgattaagagttcttgagttaaatgcatctgatgaacgtggaatacaagtagttcgagagaaagtgaaaaattttgctcaattaactgtgtcaggaagtcgctcagatgggaagccgtgtccgccttttaagattgtgattctggatgaagcagattctatgacctcagctgctcaggcagctttaagacgtaccatggagaaggagtcgaaaaccacccgattctgtcttatctgtaactatgtcagtcgaataattgaacccctgacctctagatgttcaaaattccgcttcaagcctctgtcagataaaattcaacagcagcgattactagacattgccaagaaggaaaatgtcaaaattagtgatgagggaatagcttatcttgttaaagtgtcagaaggagacttaagaaaagccattacatttcttcaaagcgctactcgattaacaggtggaaaggagatcacagagaaagtgattacagacattgctggggatttaatagatgagggtcatgcagcaactcagctcgtcaatcaactccatgatgtggttgtagaaaataacttatctgataaacagaagtctattatcacagaaaaacttgccgaagttgacaaatgcctagcagatggtgctgatgaacatttgcaactcatcagcctttgtgcaactgtgatgcagcagttatctcagaattgttaacgtgaatatatctggatggggggttttgtaaataatgaagttgtaataaaaataaaatgaccaaaagcacctttaaaaaaaatata

SEQ ID NO: 293729 - DNA, 1531 bp, Homo sapiens
ctgccatttaggacaagctggatgatgatggtttgatagctccaggggttcgtgtataggagatgatgaatctgcttcatccagaatcacaatcttaaaaggcgggaactgaggcgactgtggggacatcagtgatcgtaagtctcctgggcccgttattctcagattaggtgacggagctaagacttcgagaccatctcgtcctttttgtatcgcggaaacctgaggaacgagccggcggcggtgacctgcacgagaagccaggctaactgggtgaagtaccatgcaagcatttcttaaaggtacatccatcagtactaaacccccgctgaccaaggatcgaggagtagctgccagtgcgggaagtagcggagagaacaagaaagccaaacccgttccctgggtggaaaaatatcgcccaaaatgtgtggatgaagttgctttccaggaagaagtggttgcagtgctgaaaaaatctttagaaggagcagatcttcctaatctcttgttttacggaccacctggaactggaaaaacatccactattttggcagcagctagagaactctttgggcctgaacttttccgattaagagttcttgagttaaatgcatctgatgaacgtggaatacaagtagttcgagagaaagtgaaaaattttgctcaattaactgtgtcaggaagtcgctcagatgggaagccgtgtccgccttttaagattgtgattctggatgaagcagattctatgacctcagctgctcaggcagctttaagacgtaccatggagaaggagtcgaaaaccacccgattctgtcttatctgtaactatgtcagtcgaataattgaacccctgacctctagatgttcaaaattccgcttcaagcctctgtcagataaaattcaacagcagcgattactagacattgccaagaaggaaaatgtcaaaattagtgatgagggaatagcttatcttgttaaagtgtcagaaggagacttaagaaaagccattacatttcttcaaagcgctactcgattaacaggtggaaaggagatcacagagaaagtgattacagacattgctggggtaataccagctgagaaaattgatggagtatttgctgcctgtcagagtggctcttttgacaaactagaagctgtggtcaaggtaaagtcagcttactaactttggggaaaggaatattaagtcatcataccaaaagttttttttattataggatttaatagatgagggtcatgcagcaactcagctcgtcaatcaactccatgatgtggttgtagaaaataacttatctgataaacagaagtctattatcacagaaaaacttgccgaagttgacaaatgcctagcagatggtgctgatgaacatttgcaactcatcagcctttgtgcaactgtgatgcagcagttatctcagaattgttaacgtgaatatatctggatggggggttttgtaaataatgaagttgtaataaaaataaaatgaccaaaagcacctttaaaaaaaatata

SEQ ID NO: 293730 - DNA, 388 bp, Homo sapiens
ctgccatttaggacaagctggatgatgatggtttgatagctccaggggttcgtgtataggagatgatgaatctgcttcatccagaatcacaatcttaaaaggcgggaactgaggcgactgtggggacatcagtgatcgtaagtctcctgggcccgttattctcagattaggtgacggagctaagacttcgagaccatctcgtcctttttgtatcgcggaaacctgaggaacgagccggcggcggtgacctgcacgagaagccaggctaactgggtgaagtaccatgcaagcatttcttaaaggtacatccatcagtactaaacccccgctgaccaaggatcgaggagtacttctagagcggccggcgccattcgatttcccacccggg

SEQ ID NO: 293731 - DNA, 4358 bp, Homo sapiens
gccgagatcgtgccactgcactccagcctgggtgacagagcgagactctgtcaaaaaaaaaaaagaacaaaagaaagagaaagaaactgtcaaactgttttctggagtggctataccattttgcaatcccaccaaagtatgagagatccagttgttcagcaactggattccaccctggttttaatttgcgtgtccctgatggctagtgatttgaacatcttccacgtgcttttttttttttttttgtcttctgtatacctctttggtgaagagtctgtttaactcttttgctcatttaaaaaattgttcgttttcttaccattgagactttctttagaaaacaactttattgaggtataatttacataccataaaatccacccatttgaagtacaattcaaagagttgtcgtaagcttaccaccagaatccagttttagaacatctgcatcaccccagtaagacccctcatatgcatctacacttagtgttgagttttgagagttccttatacattctggatacaagtcctttgttggatatataacttacagtattgtcccaatgggggacatttgccaagagttgagaatgctgtaattggaggcctgagaggtgggtcccaattcttacattttccattccacaaactgtctccttttgtttggttttaatatgggtaaacagcacattctggaaataataaaggtgactctccatttgctgaatgccaggaggagagtttatgacagaacttcctcctgcaataaaaggatgtcaaagaagccaacatcaaggtgccccccatccctggtgggtggtcagagagggcaggaggctccagggcaccctgcctggccaatcagtgcacattcttggggttgcagatggtggcggggaaggggacaggttctgcaggggactagggtgggaaccccattgccctctcagattgctccatcagaagagcagatgaggctgcacacagtggctcacgctaaaatatttaacaattatttaatagcatgagatacacaaggcgtccttcccagggtgtgttagcgtctctcctacggcgcccgcctagcccggtggtcccaaccccctgcgggagctgcacacgccccggaaacctgggacagaaactgagtccctctccttcctggtggtggtgacagcacctgctcagatctggtcggacgccgccggccggagcacccagcccggcggagaaggagctcgcccggcgctggggactgggacctggagccccttcccctaccgcacgtacgccccgccccgcgcacgcccgcccgcccgcccgcgcctggcgcagcttcactccggatggttcctgtcctcccgcgggtccgagggcgctggaaacccagcggcggcgaagcggagaggagccccgcgcgtctccgcccgcacggctccaggtctggggtctgcgctggagccgcgcggggagaggccgtctctgcgaccgccgcgcccgctcccgaccgtccgggtccgcggccagcccggccaccagccatgggctctggcccgctctcgctgcccctggcgctgtcgccgccgcggctgctgctgctgctgctgctgtctctgctgccagtggccagggcctcagaggctgagcaccgtctatttgagcggctgtttgaagattacaatgagatcatccggcctgtagccaacgtgtctgacccagtcatcatccatttcgaggtgtccatgtctcagctggtgaaggtggatgaagtaaaccagatcatggagaccaacctgtggctcaagcaaatctggaatgactacaagctgaaatggaacccctctgactatggtggggcagagttcatgcgtgtccctgcacagaagatctggaagccagacattgtgctgtataacaatgctgttggggatttccaggtggacgacaagaccaaagccttactcaagtacactggggaggtgacttggatacctccggccatctttaagagctcctgtaaaatcgacgtgacctacttcccgtttgattaccaaaactgtaccatgaagttcggttcctggtcctacgataaggcgaaaatcgatctggtcctgatcggctcttccatgaacctcaaggactattgggagagcggcgagtgggccatcatcaaagccccaggctacaaacacgacatcaagtacaactgctgcgaggagatctaccccgacatcacatactcgctgtacatccggcgcctgcccttgttctacaccatcaacctcatcatcccctgcctgctcatctccttcctcactgtgctcgtcttctacctgccctccgactgcggtgagaaggtgaccctgtgcatttctgtcctcctctccctgacggtgtttctcctggtgatcactgagaccatcccttccacctcgctggtcatccccctgattggagagtacctcctgttcaccatgatttttgtaaccttgtccatcgtcatcaccgtcttcgtgctcaacgtgcactacagaaccccgacgacacacacaatgccctcatgggtgaagactgtattcttgaacctgctccccagggtcatgttcatgaccaggccaacaagcaacgagggcaacgctcagaagccgaggcccctctacggtgccgagctctcaaatctgaattgcttcagccgcgcagagtccaaaggctgcaaggagggctacccctgccaggacgggatgtgtggttactgccaccaccgcaggataaaaatctccaatttcagtgctaacctcacgagaagctctagttctgaatctgttgatgctgtgctgtccctctctgctttgtcaccagaaatcaaagaagccatccaaagtgtcaagtatattgctgaaaatatgaaagcacaaaatgaagccaaagagattcaagatgattggaagtatgttgccatggtgattgatcgtatttttctgtgggttttcaccctggtgtgcattctagggacagcaggattgtttctgcaacccctgatggccagggaagatgcataagcactaagctgtgtgcctgcctgggagacttccttgtgtcagggcaggaggaggctgcttcctagtaagaacgtactttctgttatcaagctaccagctttgtttttggcatttcgaggtttacttattttccacttatcttggaatcatgcaaaaaaaaaaatgtcaagagtatttattaccgataaatgaacatttaactagcctttttggtatggtaaagagatgtcaaaatgtgattctatgtgattagtatgctatgctatggaatatacatgtaaaaatgtttccttttagttgttgaaacaaaactggatagaaaaatgctgttcagaaatatgaaaagtcattcagttatcactacagatctcccagtaatttttcttatttagcccataatctctttgaaggtttatactaattcagcaatcccccatcgttacccatttcttaccatgcatttctcgttctttactgggtctaaagggctatgcctccatttcagagagcttcaactacttctcttgcatacttctaaattatactatgagaaatcatgcctagttattcattgttaatataactgtcttagtacaccataaactgggtggattataaacaacagaaacttctcagttttggaggttgggaggtccaaggtcaaggcaccagcaaatttggtgtctggtgagggtcctcttcctcaaagggtgccttctagctgtgtcctcacatgactgaagggactagctatctctgtggggtctattttataagggcactaaccccattcatgagagcagagcccccatggcctaatcacctttccaaggccccaccttctatctaagacaatcacgctgggaataggtttcaacatatgaattgggggaggacacatttggaccacagcatgaacctttagaacagggtttctcagccttagcactacggacattttgggctggataaatatgtgttggtacagaatgggggtatcctgtgcattgtaggatctttagcagtaccctagcctcaactcactagatgccaatgacataccttgcttcttcaccagttatgataaccaagaatgtctccattgttaaatgtccccttaggagcaaaattgcccctggttgagaaacattgctttagacaaattgttaagagtatcatgtactacacttctgaaacttaacgtgatcatcaccactgacagatgattcacagagagagactgtttgaatcttgtctcactagtttttcctgtgcaaaaataaaatggacagaattgca

SEQ ID NO: 293732 - DNA, 3331 bp, Homo sapiens
acgaggttcatcttgcagggccagcgcccccggtctcattgtacggggcctgcacctcgcccggtggtcccaaccccctgcgggagctgcacacgccccggaaacctgggacagaaactgagtccctctccttcctggtggtggtgacagcacctgctcagatctggtcggacgccgccggccggagcacccagcccggcggagaaggagctcgcccggcgctggggactgggacctggagccccttcccctaccgcacgtacgccccgccccgcgcacgcccgcccgcccgcccgcgcctggcgcagcttcactccggatggttcctgtcctcccgcgggtccgagggcgctggaaacccagcggcggcgaagcggagaggagccccgcgcgtctccgcccgcacggctccaggtctggggtctgcgctggagccgcgcggggagaggccgtctctgcgaccgccgcgcccgctcccgaccgtccgggtccgcggccagcccggccaccagccatgggctctggcccgctctcgctgcccctggcgctgtcgccgccgcggctgctgctgctgctgctgctgtctctgctgccagtggccagggcctcagaggctgagcaccgtctatttgagcggctgtttgaagattacaatgagatcatccggcctgtagccaacgtgtctgacccagtcatcatccatttcgaggtgtccatgtctcagctggtgaaggtggatgaagtaaaccagatcatggagaccaacctgtggctcaagcaaatctggaatgactacaagctgaaatggaacccctctgactatggtggggcagagttcatgcgtgtccctgcacagaagatctggaagccagacattgtgctgtataacaatgctgttggggatttccaggtggacgacaagaccaaagccttactcaagtacactggggaggtgacttggatacctccggccatctttaagagctcctgtaaaatcgacgtgacctacttcccgtttgattaccaaaactgtaccatgaagttcggttcctggtcctacgataaggcgaaaatcgatctggtcctgatcggctcttccatgaacctcaaggactattgggagagcggcgagtgggccatcatcaaagccccaggctacaaacacgacatcaagtacaactgctgcgaggagatctaccccgacatcacatactcgctgtacatccggcgcctgcccttgttctacaccatcaacctcatcatcccctgcctgctcatctccttcctcactgtgctcgtcttctacctgccctccgactgcggtgagaaggtgaccctgtgcatttctgtcctcctctccctgacggtgtttctcctggtgatcactgagaccatcccttccacctcgctggtcatccccctgattggagagtacctcctgttcaccatgatttttgtaaccttgtccatcgtcatcaccgtcttcgtgctcaacgtgcactacagaaccccgacgacacacacaatgccctcatgggtgaagactgtattcttgaacctgctccccagggtcatgttcatgaccaggccaacaagcaacgagggcaacgctcagaagccgaggcccctctacggtgccgagctctcaaatctgaattgcttcagccgcgcagagtccaaaggctgcaaggagggctacccctgccaggacgggatgtgtggttactgccaccaccgcaggataaaaatctccaatttcagtgctaacctcacgagaagctctagttctgaatctgttgatgctgtgctgtccctctctgctttgtcaccagaaatcaaagaagccatccaaagtgtcaagtatattgctgaaaatatgaaagcacaaaatgaagccaaagagattcaagatgattggaagtatgttgccatggtgattgatcgtatttttctgtgggttttcaccctggtgtgcattctagggacagcaggattgtttctgcaacccctgatggccagggaagatgcataagcactaagctgtgtgcctgcctgggagacttccttgtgtcagggcaggaggaggctgcttcctagtaagaacgtactttctgttatcaagctaccagctttgtttttggcatttcgaggtttacttattttccacttatcttggaatcatgcaaaaaaaaaaatgtcaagagtatttattaccgataaatgaacatttaactagcctttttggtatggtaaagagatgtcaaaatgtgattctatgtgattagtatgctatgctatggaatatacatgtaaaaatgtttccttttagttgttgaaacaaaactggatagaaaaatgctgttcagaaatatgaaaagtcattcagttatcactacagatctcccagtaatttttcttatttagcccataatctctttgaaggtttatactaattcagcaatcccccatcgttacccatttcttaccatgcatttctcgttctttactgggtctaaagggctatgcctccatttcagagagcttcaactacttctcttgcatacttctaaattatactatgagaaatcatgcctagttattcattgttaatataactgtcttagtacaccataaactgggtggattataaacaacagaaacttctcagttttggaggttgggaggtccaaggtcaaggcaccagcaaatttggtgtctggtgagggtcctcttcctcaaagggtgccttctagctgtgtcctcacatgactgaagggactagctatctctgtggggtctattttataagggcactaaccccattcatgagagcagagcccccatggcctaatcacctttccaaggccccaccttctatctaagacaatcacgctgggaataggtttcaacatatgaattgggggaggacacatttggaccacagcatgaacctttagaacagggtttctcagccttagcactacggacattttgggctggataaatatgtgttggtacagaatgggggtatcctgtgcattgtaggatctttagcagtaccctagcctcaactcactagatgccaatgacataccttgcttcttcaccagttatgataaccaagaatgtctccattgttaaatgtccccttaggagcaaaattgcccctggttgagaaacattgctttagacaaattgttaagagtatcatgtactacacttctgaaacttaacgtgatcatcaccactgacagatgattcacagagagagactgtttgaatcttgtctcactagtttttcctgtgcaaaaataaaatggacagaattgca

SEQ ID NO: 293733 - DNA, 3203 bp, Homo sapiens
aaacttacggttaggtacgaggctgggtgtttaattcggccgagggccgccggccggagcacccagcccggcggagaaggagctcgcccggcgctggggactgggacctggagccccttcccctaccgcacgtacgccccgccccgcgcacgcccgcccgcccgcccgcgcctggcgcagcttcactccggatggttcctgtcctcccgcgggtccgagggcgctggaaacccagcggcggcgaagcggagaggagccccgcgcgtctccgcccgcacggctccaggtctggggtctgcgctggagccgcgcggggagaggccgtctctgcgaccgccgcgcccgctcccgaccgtccgggtccgcggccagcccggccaccagccatgggctctggcccgctctcgctgcccctggcgctgtcgccgccgcggctgctgctgctgctgctgctgtctctgctgccagtggccagggcctcagaggctgagcaccgtctatttgagcggctgtttgaagattacaatgagatcatccggcctgtagccaacgtgtctgacccagtcatcatccatttcgaggtgtccatgtctcagctggtgaaggtggatgaagtaaaccagatcatggagaccaacctgtggctcaagcaaatctggaatgactacaagctgaaatggaacccctctgactatggtggggcagagttcatgcgtgtccctgcacagaagatctggaagccagacattgtgctgtataacaatgctgttggggatttccaggtggacgacaagaccaaagccttactcaagtacactggggaggtgacttggatacctccggccatctttaagagctcctgtaaaatcgacgtgacctacttcccgtttgattaccaaaactgtaccatgaagttcggttcctggtcctacgataaggcgaaaatcgatctggtcctgatcggctcttccatgaacctcaaggactattgggagagcggcgagtgggccatcatcaaagccccaggctacaaacacgacatcaagtacaactgctgcgaggagatctaccccgacatcacatactcgctgtacatccggcgcctgcccttgttctacaccatcaacctcatcatcccctgcctgctcatctccttcctcactgtgctcgtcttctacctgccctccgactgcggtgagaaggtgaccctgtgcatttctgtcctcctctccctgacggtgtttctcctggtgatcactgagaccatcccttccacctcgctggtcatccccctgattggagagtacctcctgttcaccatgatttttgtaaccttgtccatcgtcatcaccgtcttcgtgctcaacgtgcactacagaaccccgacgacacacacaatgccctcatgggtgaagactgtattcttgaacctgctccccagggtcatgttcatgaccaggccaacaagcaacgagggcaacgctcagaagccgaggcccctctacggtgccgagctctcaaatctgaattgcttcagccgcgcagagtccaaaggctgcaaggagggctacccctgccaggacgggatgtgtggttactgccaccaccgcaggataaaaatctccaatttcagtgctaacctcacgagaagctctagttctgaatctgttgatgctgtgctgtccctctctgctttgtcaccagaaatcaaagaagccatccaaagtgtcaagtatattgctgaaaatatgaaagcacaaaatgaagccaaagagattcaagatgattggaagtatgttgccatggtgattgatcgtatttttctgtgggttttcaccctggtgtgcattctagggacagcaggattgtttctgcaacccctgatggccagggaagatgcataagcactaagctgtgtgcctgcctgggagacttccttgtgtcagggcaggaggaggctgcttcctagtaagaacgtactttctgttatcaagctaccagctttgtttttggcatttcgaggtttacttattttccacttatcttggaatcatgcaaaaaaaaaaatgtcaagagtatttattaccgataaatgaacatttaactagcctttttggtatggtaaagagatgtcaaaatgtgattctatgtgattagtatgctatgctatggaatatacatgtaaaaatgtttccttttagttgttgaaacaaaactggatagaaaaatgctgttcagaaatatgaaaagtcattcagttatcactacagatctcccagtaatttttcttatttagcccataatctctttgaaggtttatactaattcagcaatcccccatcgttacccatttcttaccatgcatttctcgttctttactgggtctaaagggctatgcctccatttcagagagcttcaactacttctcttgcatacttctaaattatactatgagaaatcatgcctagttattcattgttaatataactgtcttagtacaccataaactgggtggattataaacaacagaaacttctcagttttggaggttgggaggtccaaggtcaaggcaccagcaaatttggtgtctggtgagggtcctcttcctcaaagggtgccttctagctgtgtcctcacatgactgaagggactagctatctctgtggggtctattttataagggcactaaccccattcatgagagcagagcccccatggcctaatcacctttccaaggccccaccttctatctaagacaatcacgctgggaataggtttcaacatatgaattgggggaggacacatttggaccacagcatgaacctttagaacagggtttctcagccttagcactacggacattttgggctggataaatatgtgttggtacagaatgggggtatcctgtgcattgtaggatctttagcagtaccctagcctcaactcactagatgccaatgacataccttgcttcttcaccagttatgataaccaagaatgtctccattgttaaatgtccccttaggagcaaaattgcccctggttgagaaacattgctttagacaaattgttaagagtatcatgtactacacttctgaaacttaacgtgatcatcaccactgacagatgattcacagagagagactgtttgaatcttgtctcactagtttttcctgtgcaaaaataaaatggacagaattgca

SEQ ID NO: 293734 - DNA, 3361 bp, Homo sapiens
gccgagatcgtgccactgcactccagcctgggtgacagagcgagactctgtcaaaaaaaaaaaagaacaaaagaaagagaaagaaactgtcaaactgttttctggagtggctataccattttgcaatcccaccaaagtatgagagatccagttgttcagcaactggattccaccctggttttaatttgcgtgtccctgatggctagtgatttgaacatcttccacgtgcttttttttttttttttgtcttctgtatacctctttggtgaagagtctgtttaactcttttgctcatttaaaaaattgttcgttttcttaccattgagactttctttagaaaacaactttattgaggtataatttacataccataaaatccacccatttgaagtacaattcaaagagttgtcgtaagcttaccaccagaatccagttttagaacatctgcatcaccccagtaagacccctcatatgcatctacacttagtgttgagttttgagagttccttatacattctggatacaagtcctttgttggatatataacttacagtattgtcccaatgggggacatttgccaagagttgagaatgctgtaattggaggcctgagaggtgggtcccaattcttacattttccattccacaaactgtctccttttgtttggttttaatatgggtaaacagcacattctggaaataataaaggtgactctccatttgctgaatgccaggaggagagtttatgacagaacttcctcctgcaataaaaggatgtcaaagaagccaacatcaaggtgccccccatccctggtgggtggtcagagagggcaggaggctccagggcaccctgcctggccaatcagtgcacattcttggggttgcagatggtggcggggaaggggacaggttctgcaggggactagggtgggaaccccattgccctctcagattgctccatcagaagagcagatgaggctgcacacagtggctcacgctaaaatatttaacaattatttaatagcatgagatacacaaggcgtccttcccagggtgtgttagcgtctctcctacggcgcccgcctagcccggtggtcccaaccccctgcgggagctgcacacgccccggaaacctgggacagaaactgagtccctctccttcctggtggtggtgacagcacctgctcagatctggtcggacgccgccggccggagcacccagcccggcggagaaggagctcgcccggcgctggggactgggacctggagccccttcccctaccgcacgtacgccccgccccgcgcacgcccgcccgcccgcccgcgcctggcgcagcttcactccggatggttcctgtcctcccgcgggtccgagggcgctggaaacccagcggcggcgaagcggagaggagccccgcgcgtctccgcccgcacggctccaggtctggggtctgcgctggagccgcgcggggagaggccgtctctgcgaccgccgcgcccgctcccgaccgtccgggtccgcggccagcccggccaccagccatgggctctggcccgctctcgctgcccctggcgctgtcgccgccgcggctgctgctgctgctgctgctgtctctgctgccagtggccagggcctcagaggctgagcaccgtctatttgagcggctgtttgaagattacaatgagatcatccggcctgtagccaacgtgtctgacccagtcatcatccatttcgaggtgtccatgtctcagctggtgaaggtggatgaagtaaaccagatcatggagaccaacctgtggctcaagcaaatctggaatgactacaagctgaaatggaacccctctgactatggtggggcagagttcatgcgtgtccctgcacagaagatctggaagccagacattgtgctgtataacaatgctgttggggatttccaggtggacgacaagaccaaagccttactcaagtacactggggaggtgacttggatacctccggccatctttaagagctcctgtaaaatcgacgtgacctacttcccgtttgattaccaaaactgtaccatgaagttcggttcctggtcctacgataaggcgaaaatcgatctggtcctgatcggctcttccatgaacctcaaggactattgggagagcggcgagtgggccatcatcaaagccccaggctacaaacacgacatcaagtacaactgctgcgaggagatctaccccgacatcacatactcgctgtacatccggcgcctgcccttgttctacaccatcaacctcatcatcccctgcctgctcatctccttcctcactgtgctcgtcttctacctgccctccgactgcggtgagaaggtgaccctgtgcatttctgtcctcctctccctgacggtgtttctcctggtgatcactgagaccatcccttccacctcgctggtcatccccctgattggagagtacctcctgttcaccatgatttttgtaaccttgtccatcgtcatcaccgtcttcgtgctcaacgtgcactacagaaccccgacgacacacacaatgccctcatgggtgaagactgtattcttgaacctgctccccagggtcatgttcatgaccaggccaacaagcaacgagggcaacgctcagaagccgaggcccctctacggtgccgagctctcaaatctgaattgcttcagccgcgcagagtccaaaggctgcaaggagggctacccctgccaggacgggatgtgtggttactgccaccaccgcaggataaaaatctccaatttcagtgctaacctcacgagaagctctagttctgaatctgttgatgctgtgctgtccctctctgctttgtcaccagaaatcaaagaagccatccaaagtgtcaagtatattgctgaaaatatgaaagcacaaaatgaagccaaagagattcaagatgattggaagtatgttgccatggtgattgatcgtatttttctgtgggttttcaccctggtgtgcattctagggacagcaggattgtttctgcaacccctgatggccagggaagatgcataagcactaagctgtgtgcctgcctgggagacttccttgtgtcagggcaggaggaggctgcttcctagctggagtgcaatggcgtgatctcagctcaccgcaacctccgccacctgggttcaagcgattctcctgccgcagcctcccaggtagctgggattacaggaacaaaaagcccaagagatccaacaattgaaacgaaaagaaaagtccacagaaacatccgatcaagaacctgggctatgaatttccaatcttcaacaacctgttaggaaaaaaataaaaatgcattaaataattgtaaa

SEQ ID NO: 293735 - DNA, 3536 bp, Homo sapiens
gccgagatcgtgccactgcactccagcctgggtgacagagcgagactctgtcaaaaaaaaaaaagaacaaaagaaagagaaagaaactgtcaaactgttttctggagtggctataccattttgcaatcccaccaaagtatgagagatccagttgttcagcaactggattccaccctggttttaatttgcgtgtccctgatggctagtgatttgaacatcttccacgtgcttttttttttttttttgtcttctgtatacctctttggtgaagagtctgtttaactcttttgctcatttaaaaaattgttcgttttcttaccattgagactttctttagaaaacaactttattgaggtataatttacataccataaaatccacccatttgaagtacaattcaaagagttgtcgtaagcttaccaccagaatccagttttagaacatctgcatcaccccagtaagacccctcatatgcatctacacttagtgttgagttttgagagttccttatacattctggatacaagtcctttgttggatatataacttacagtattgtcccaatgggggacatttgccaagagttgagaatgctgtaattggaggcctgagaggtgggtcccaattcttacattttccattccacaaactgtctccttttgtttggttttaatatgggtaaacagcacattctggaaataataaaggtgactctccatttgctgaatgccaggaggagagtttatgacagaacttcctcctgcaataaaaggatgtcaaagaagccaacatcaaggtgccccccatccctggtgggtggtcagagagggcaggaggctccagggcaccctgcctggccaatcagtgcacattcttggggttgcagatggtggcggggaaggggacaggttctgcaggggactagggtgggaaccccattgccctctcagattgctccatcagaagagcagatgaggctgcacacagtggctcacgctaaaatatttaacaattatttaatagcatgagatacacaaggcgtccttcccagggtgtgttagcgtctctcctacggcgcccgcctagcccggtggtcccaaccccctgcgggagctgcacacgccccggaaacctgggacagaaactgagtccctctccttcctggtggtggtgacagcacctgctcagatctggtcggacgccgccggccggagcacccagcccggcggagaaggagctcgcccggcgctggggactgggacctggagccccttcccctaccgcacgtacgccccgccccgcgcacgcccgcccgcccgcccgcgcctggcgcagcttcactccggatggttcctgtcctcccgcgggtccgagggcgctggaaacccagcggcggcgaagcggagaggagccccgcgcgtctccgcccgcacggctccaggtctggggtctgcgctggagccgcgcggggagaggccgtctctgcgaccgccgcgcccgctcccgaccgtccgggtccgcggccagcccggccaccagccatgggctctggcccgctctcgctgcccctggcgctgtcgccgccgcggctgctgctgctgctgctgctgtctctgctgccagtggccagggcctcagaggctgagcaccgtctatttgagcggctgtttgaagattacaatgagatcatccggcctgtagccaacgtgtctgacccagtcatcatccatttcgaggtgtccatgtctcagctggtgaaggtggatgaagtaaaccagatcatggagaccaacctgtggctcaagcaaatctggaatgactacaagctgaaatggaacccctctgactatggtggggcagagttcatgcgtgtccctgcacagaagatctggaagccagacattgtgctgtataacaatgctgttggggatttccaggtggacgacaagaccaaagccttactcaagtacactggggaggtgacttggatacctccggccatctttaagagctcctgtaaaatcgacgtgacctacttcccgtttgattaccaaaactgtaccatgaagttcggttcctggtcctacgataaggcgaaaatcgatctggtcctgatcggctcttccatgaacctcaaggactattgggagagcggcgagtgggccatcatcaaagccccaggctacaaacacgacatcaagtacaactgctgcgaggagatctaccccgacatcacatactcgctgtacatccggcgcctgcccttgttctacaccatcaacctcatcatcccctgcctgctcatctccttcctcactgtgctcgtcttctacctgccctccgactgcggtgagaaggtgaccctgtgcatttctgtcctcctctccctgacggtgtttctcctggtgatcactgagaccatcccttccacctcgctggtcatccccctgattggagagtacctcctgttcaccatgatttttgtaaccttgtccatcgtcatcaccgtcttcgtgctcaacgtgcactacagaaccccgacgacacacacaatgccctcatgggtgaagactgtattcttgaacctgctccccagggtcatgttcatgaccaggccaacaagcaacgagggcaacgctcagaagccgaggcccctctacggtgccgagctctcaaatctgaattgcttcagccgcgcagagtccaaaggctgcaaggagggctacccctgccaggacgggatgtgtggttactgccaccaccgcaggataaaaatctccaatttcagtgctaacctcacgagaagctctagttctgaatctgttgatgctgtgctgtccctctctgctttgtcaccagaaatcaaagaagccatccaaagtgtcaagtatattgctgaaaatatgaaagcacaaaatgaagccaaagagattcaagatgattggaagtatgttgccatggtgattgatcgtatttttctgtgggttttcaccctggtgtgcattctagggacagcaggattgtttctgcaacccctgatggccagggaagatgcataagcactaagctgtgtgcctgcctgggagacttccttgtgtcagggcaggaggaggctgcttcctagtaagaacgtactttctgttatcaagctaccagattagctatccggcatcctcgcaggttctactgtatctttcaccagcttatctcggcaaatccatgccacagaaaaaaacaactgctcacgagctactccatttaccggactaaactgacccatcatcaactagcccttccccggtatcggaaaaggacatgtacacaactgtgcactctaacggtgaaacgcaaggtagggcaaacgcacaaggggcacatgaacaccctgtccacacactgctcccaccacaaagacagacgcgaaaccccacacgcgaacccaaaagacgccgcacccagaccaataacaaacacgacccaaccgcagcagaacgaagcgaaccaccacagcgcaatgaacacaagacaagacccaa

SEQ ID NO: 293736 - DNA, 3263 bp, Homo sapiens
gccgagatcgtgccactgcactccagcctgggtgacagagcgagactctgtcaaaaaaaaaaaagaacaaaagaaagagaaagaaactgtcaaactgttttctggagtggctataccattttgcaatcccaccaaagtatgagagatccagttgttcagcaactggattccaccctggttttaatttgcgtgtccctgatggctagtgatttgaacatcttccacgtgcttttttttttttttttgtcttctgtatacctctttggtgaagagtctgtttaactcttttgctcatttaaaaaattgttcgttttcttaccattgagactttctttagaaaacaactttattgaggtataatttacataccataaaatccacccatttgaagtacaattcaaagagttgtcgtaagcttaccaccagaatccagttttagaacatctgcatcaccccagtaagacccctcatatgcatctacacttagtgttgagttttgagagttccttatacattctggatacaagtcctttgttggatatataacttacagtattgtcccaatgggggacatttgccaagagttgagaatgctgtaattggaggcctgagaggtgggtcccaattcttacattttccattccacaaactgtctccttttgtttggttttaatatgggtaaacagcacattctggaaataataaaggtgactctccatttgctgaatgccaggaggagagtttatgacagaacttcctcctgcaataaaaggatgtcaaagaagccaacatcaaggtgccccccatccctggtgggtggtcagagagggcaggaggctccagggcaccctgcctggccaatcagtgcacattcttggggttgcagatggtggcggggaaggggacaggttctgcaggggactagggtgggaaccccattgccctctcagattgctccatcagaagagcagatgaggctgcacacagtggctcacgctaaaatatttaacaattatttaatagcatgagatacacaaggcgtccttcccagggtgtgttagcgtctctcctacggcgcccgcctagcccggtggtcccaaccccctgcgggagctgcacacgccccggaaacctgggacagaaactgagtccctctccttcctggtggtggtgacagcacctgctcagatctggtcggacgccgccggccggagcacccagcccggcggagaaggagctcgcccggcgctggggactgggacctggagccccttcccctaccgcacgtacgccccgccccgcgcacgcccgcccgcccgcccgcgcctggcgcagcttcactccggatggttcctgtcctcccgcgggtccgagggcgctggaaacccagcggcggcgaagcggagaggagccccgcgcgtctccgcccgcacggctccaggtctggggtctgcgctggagccgcgcggggagaggccgtctctgcgaccgccgcgcccgctcccgaccgtccgggtccgcggccagcccggccaccagccatgggctctggcccgctctcgctgcccctggcgctgtcgccgccgcggctgctgctgctgctgctgctgtctctgctgccagtggccagggcctcagaggctgagcaccgtctatttgagcggctgtttgaagattacaatgagatcatccggcctgtagccaacgtgtctgacccagtcatcatccatttcgaggtgtccatgtctcagctggtgaaggtggatgaagtaaaccagatcatggagaccaacctgtggctcaagcaaatctggaatgactacaagctgaaatggaacccctctgactatggtggggcagagttcatgcgtgtccctgcacagaagatctggaagccagacattgtgctgtataacaatgctgttggggatttccaggtggacgacaagaccaaagccttactcaagtacactggggaggtgacttggatacctccggccatctttaagagctcctgtaaaatcgacgtgacctacttcccgtttgattaccaaaactgtaccatgaagttcggttcctggtcctacgataaggcgaaaatcgatctggtcctgatcggctcttccatgaacctcaaggactattgggagagcggcgagtgggccatcatcaaagccccaggctacaaacacgacatcaagtacaactgctgcgaggagatctaccccgacatcacatactcgctgtacatccggcgcctgcccttgttctacaccatcaacctcatcatcccctgcctgctcatctccttcctcactgtgctcgtcttctacctgccctccgactgcggtgagaaggtgaccctgtgcatttctgtcctcctctccctgacggtgtttctcctggtgatcactgagaccatcccttccacctcgctggtcatccccctgattggagagtacctcctgttcaccatgatttttgtaaccttgtccatcgtcatcaccgtcttcgtgctcaacgtgcactacagaaccccgacgacacacacaatgccctcatgggtgaagactgtattcttgaacctgctccccagggtcatgttcatgaccaggccaacaagcaacgagggcaacgctcagaagccgaggcccctctacggtgccgagctctcaaatctgaattgcttcagccgcgcagagtccaaaggctgcaaggagggctacccctgccaggacgggatgtgtggttactgccaccaccgcaggataaaaatctccaatttcagtgctaacctcacgagaagctctagttctgaatctgttgatgctgtgctgtccctctctgctttgtcaccagaaatcaaagaagccatccaaagtgtcaagtatattgctgaaaatatgaaagcacaaaatgaagccaaagagattcaagatgattggaagtatgttgccatggtgattgatcgtatttttctgtgggttttcaccctggtgtgcattctagggacagcaggattgtttctgcaacccctgatggccagggaagatgcataagcactaagctgtgtgcctgcctgggagacttccttgtgtcagggcaggaggaggctgcttcctagaacaaaaagcccaagagatccaacaattgaaacgaaaagaaaagtccacagaaacatccgatcaagaacctgggctatgaatttccaatcttcaacaacctgttaggaaaaaaataaaaatgcattaaataattgtaaa

SEQ ID NO: 293737 - DNA, 3070 bp, Homo sapiens
gccgagatcgtgccactgcactccagcctgggtgacagagcgagactctgtcaaaaaaaaaaaagaacaaaagaaagagaaagaaactgtcaaactgttttctggagtggctataccattttgcaatcccaccaaagtatgagagatccagttgttcagcaactggattccaccctggttttaatttgcgtgtccctgatggctagtgatttgaacatcttccacgtgcttttttttttttttttgtcttctgtatacctctttggtgaagagtctgtttaactcttttgctcatttaaaaaattgttcgttttcttaccattgagactttctttagaaaacaactttattgaggtataatttacataccataaaatccacccatttgaagtacaattcaaagagttgtcgtaagcttaccaccagaatccagttttagaacatctgcatcaccccagtaagacccctcatatgcatctacacttagtgttgagttttgagagttccttatacattctggatacaagtcctttgttggatatataacttacagtattgtcccaatgggggacatttgccaagagttgagaatgctgtaattggaggcctgagaggtgggtcccaattcttacattttccattccacaaactgtctccttttgtttggttttaatatgggtaaacagcacattctggaaataataaaggtgactctccatttgctgaatgccaggaggagagtttatgacagaacttcctcctgcaataaaaggatgtcaaagaagccaacatcaaggtgccccccatccctggtgggtggtcagagagggcaggaggctccagggcaccctgcctggccaatcagtgcacattcttggggttgcagatggtggcggggaaggggacaggttctgcaggggactagggtgggaaccccattgccctctcagattgctccatcagaagagcagatgaggctgcacacagtggctcacgctaaaatatttaacaattatttaatagcatgagatacacaaggcgtccttcccagggtgtgttagcgtctctcctacggcgcccgcctagcccggtggtcccaaccccctgcgggagctgcacacgccccggaaacctgggacagaaactgagtccctctccttcctggtggtggtgacagcacctgctcagatctggtcggacgccgccggccggagcacccagcccggcggagaaggagctcgcccggcgctggggactgggacctggagccccttcccctaccgcacgtacgccccgccccgcgcacgcccgcccgcccgcccgcgcctggcgcagcttcactccggatggttcctgtcctcccgcgggtccgagggcgctggaaacccagcggcggcgaagcggagaggagccccgcgcgtctccgcccgcacggctccaggtctggggtctgcgctggagccgcgcggggagaggccgtctctgcgaccgccgcgcccgctcccgaccgtccgggtccgcggccagcccggccaccagccatgggctctggcccgctctcgctgcccctggcgctgtcgccgccgcggctgctgctgctgctgctgctgtctctgctgccagtggccagggcctcagaggctgagcaccgtctatttgagcggctgtttgaagattacaatgagatcatccggcctgtagccaacgtgtctgacccagtcatcatccatttcgaggtgtccatgtctcagctggtgaaggtggatgaagtaaaccagatcatggagaccaacctgtggctcaagcaaatctggaatgactacaagctgaaatggaacccctctgactatggtggggcagagttcatgcgtgtccctgcacagaagatctggaagccagacattgtgctgtataacaatgctgttggggatttccaggtggacgacaagaccaaagccttactcaagtacactggggaggtgacttggatacctccggccatctttaagagctcctgtaaaatcgacgtgacctacttcccgtttgattaccaaaactgtaccatgaagttcggttcctggtcctacgataaggcgaaaatcgatctggtcctgatcggctcttccatgaacctcaaggactattgggagagcggcgagtgggccatcatcaaagccccaggctacaaacacgacatcaagtacaactgctgcgaggagatctaccccgacatcacatactcgctgtacatccggcgcctgcccttgttctacaccatcaacctcatcatcccctgcctgctcatctccttcctcactgtgctcgtcttctacctgccctccgactgcggtgagaaggtgaccctgtgcatttctgtcctcctctccctgacggtgtttctcctggtgatcactgagaccatcccttccacctcgctggtcatccccctgattggagagtacctcctgttcaccatgatttttgtaaccttgtccatcgtcatcaccgtcttcgtgctcaacgtgcactacagaaccccgacgacacacacaatgccctcatgggtgaagactgtattcttgaacctgctccccagggtcatgttcatgaccaggccaacaagcaacgagggcaacgctcagaagccgaggcccctctacggtgccgagctctcaaatctgaattgcttcagccgcgcagagtccaaaggctgcaaggagggctacccctgccaggacgggatgtgtggttactgccaccaccgcaggataaaaatctccaatttcagtgctaacctcacgagaagctctagttctgaatctgttgatgctgtgctgtccctctctgctttgtcaccagaaatcaaagaagccatccaaagtgtcaagtatattgctgaaaatatgaaagcacaaaatgaagccaaagaggaacaaaaagcccaagagatccaacaattgaaacgaaaagaaaagtccacagaaacatccgatcaagaacctgggctatgaatttccaatcttcaacaacctgttaggaaaaaaataaaaatgcattaaataattgtaaa

SEQ ID NO: 293738 - DNA, 2198 bp, Homo sapiens
tcgaggccggtggtaatcggacgaggaaacacgacatcaagtacaactgctgcgaggagatctaccccgacatcacatactcgctgtacatccggcgcctgcccttgttctacaccatcaacctcatcatcccctgcctgctcatctccttcctcactgtgctcgtcttctacctgccctccgactgcggtgagaaggtgaccctgtgcatttctgtcctcctctccctgacggtgtttctcctggtgatcactgagaccatcccttccacctcgctggtcatccccctgattggagagtacctcctgttcaccatgatttttgtaaccttgtccatcgtcatcaccgtcttcgtgctcaacgtgcactacagaaccccgacgacacacacaatgccctcatgggtgaagactgtattcttgaacctgctccccagggtcatgttcatgaccaggccaacaagcaacgagggcaacgctcagaagccgaggcccctctacggtgccgagctctcaaatctgaattgcttcagccgcgcagagtccaaaggctgcaaggagggctacccctgccaggacgggatgtgtggttactgccaccaccgcaggataaaaatctccaatttcagtgctaacctcacgagaagctctagttctgaatctgttgatgctgtgctgtccctctctgctttgtcaccagaaatcaaagaagccatccaaagtgtcaagtatattgctgaaaatatgaaagcacaaaatgaagccaaagagattcaagatgattggaagtatgttgccatggtgattgatcgtatttttctgtgggttttcaccctggtgtgcattctagggacagcaggattgtttctgcaacccctgatggccagggaagatgcataagcactaagctgtgtgcctgcctgggagacttccttgtgtcagggcaggaggaggctgcttcctagtaagaacgtactttctgttatcaagctaccagctttgtttttggcatttcgaggtttacttattttccacttatcttggaatcatgcaaaaaaaaaaatgtcaagagtatttattaccgataaatgaacatttaactagcctttttggtatggtaaagagatgtcaaaatgtgattctatgtgattagtatgctatgctatggaatatacatgtaaaaatgtttccttttagttgttgaaacaaaactggatagaaaaatgctgttcagaaatatgaaaagtcattcagttatcactacagatctcccagtaatttttcttatttagcccataatctctttgaaggtttatactaattcagcaatcccccatcgttacccatttcttaccatgcatttctcgttctttactgggtctaaagggctatgcctccatttcagagagcttcaactacttctcttgcatacttctaaattatactatgagaaatcatgcctagttattcattgttaatataactgtcttagtacaccataaactgggtggattataaacaacagaaacttctcagttttggaggttgggaggtccaaggtcaaggcaccagcaaatttggtgtctggtgagggtcctcttcctcaaagggtgccttctagctgtgtcctcacatgactgaagggactagctatctctgtggggtctattttataagggcactaaccccattcatgagagcagagcccccatggcctaatcacctttccaaggccccaccttctatctaagacaatcacgctgggaataggtttcaacatatgaattgggggaggacacatttggaccacagcatgaacctttagaacagggtttctcagccttagcactacggacattttgggctggataaatatgtgttggtacagaatgggggtatcctgtgcattgtaggatctttagcagtaccctagcctcaactcactagatgccaatgacataccttgcttcttcaccagttatgataaccaagaatgtctccattgttaaatgtccccttaggagcaaaattgcccctggttgagaaacattgctttagacaaattgttaagagtatcatgtactacacttctgaaacttaacgtgatcatcaccactgacagatgattcacagagagagactgtttgaatcttgtctcactagtttttcctgtgcaaaaataaaatggacagaattgca

SEQ ID NO: 293739 - DNA, 1908 bp, Homo sapiens
cggccgctgaccgtgaaaccggtcggcggtggtaccgcttgccgccgcttctccaccgtcttcgtgctcaacgtgcactacagaaccccgacgacacacacaatgccctcatgggtgaagactgtattcttgaacctgctccccagggtcatgttcatgaccaggccaacaagcaacgagggcaacgctcagaagccgaggcccctctacggtgccgagctctcaaatctgaattgcttcagccgcgcagagtccaaaggctgcaaggagggctacccctgccaggacgggatgtgtggttactgccaccaccgcaggataaaaatctccaatttcagtgctaacctcacgagaagctctagttctgaatctgttgatgctgtgctgtccctctctgctttgtcaccagaaatcaaagaagccatccaaagtgtcaagtatattgctgaaaatatgaaagcacaaaatgaagccaaagagattcaagatgattggaagtatgttgccatggtgattgatcgtatttttctgtgggttttcaccctggtgtgcattctagggacagcaggattgtttctgcaacccctgatggccagggaagatgcataagcactaagctgtgtgcctgcctgggagacttccttgtgtcagggcaggaggaggctgcttcctagtaagaacgtactttctgttatcaagctaccagctttgtttttggcatttcgaggtttacttattttccacttatcttggaatcatgcaaaaaaaaaaatgtcaagagtatttattaccgataaatgaacatttaactagcctttttggtatggtaaagagatgtcaaaatgtgattctatgtgattagtatgctatgctatggaatatacatgtaaaaatgtttccttttagttgttgaaacaaaactggatagaaaaatgctgttcagaaatatgaaaagtcattcagttatcactacagatctcccagtaatttttcttatttagcccataatctctttgaaggtttatactaattcagcaatcccccatcgttacccatttcttaccatgcatttctcgttctttactgggtctaaagggctatgcctccatttcagagagcttcaactacttctcttgcatacttctaaattatactatgagaaatcatgcctagttattcattgttaatataactgtcttagtacaccataaactgggtggattataaacaacagaaacttctcagttttggaggttgggaggtccaaggtcaaggcaccagcaaatttggtgtctggtgagggtcctcttcctcaaagggtgccttctagctgtgtcctcacatgactgaagggactagctatctctgtggggtctattttataagggcactaaccccattcatgagagcagagcccccatggcctaatcacctttccaaggccccaccttctatctaagacaatcacgctgggaataggtttcaacatatgaattgggggaggacacatttggaccacagcatgaacctttagaacagggtttctcagccttagcactacggacattttgggctggataaatatgtgttggtacagaatgggggtatcctgtgcattgtaggatctttagcagtaccctagcctcaactcactagatgccaatgacataccttgcttcttcaccagttatgataaccaagaatgtctccattgttaaatgtccccttaggagcaaaattgcccctggttgagaaacattgctttagacaaattgttaagagtatcatgtactacacttctgaaacttaacgtgatcatcaccactgacagatgattcacagagagagactgtttgaatcttgtctcactagtttttcctgtgcaaaaataaaatggacagaattgca

SEQ ID NO: 293740 - DNA, 746 bp, Homo sapiens
ccatccaaagtgtcaagtatattgctgaaaatatgaaagcacaaaatgaagccaaagaggtaaggatatggcttttattacattggtcattcattcattcaacaaatatttatgggttcctcgtggggcaaggcatagggtagggggttaagaaattgccctctggagtcagtggcctgtgttaagaccagttatatgtccttgggtatgttacctcacctctctgagcctgttttctcttctgtaaaatgggatgataaagcttggtatgtggtaccctgaagctagccaccaggctgccagcaggctggcaggctggaccatgaaaacacctgatgccaatagactagattaggatgtaggctggaaaagggcatggggccagatgatctccagttagtattggttaattgaggttatatttttatttttatttatttttttgagacagggtcctgctctgttgcccaggctggagtgcagtggcgcaatcttggctcactgcaacttccgcctcccagctcaagcgattctcccacctcagtttcccgagtagcttgaactacagatgccccgccaccataccctaatttttttgtaccgatggggttttgccatgttgcccaggttggtctcagactcctcgactcaatctgctcacctcagtctcccaaaatgctgggactacaggcatgagccaccgcacctggcctttatttttactttctaattgtatatgtgttctc

SEQ ID NO: 293741 - DNA, 4364 bp, Homo sapiens
gaagaagagattttaaacaaaaaacgatctaaaaaaattcagaagaaatatgatgaaaggaaaaagaatgccaaaatcagcagtctcctggaggagcagttccagcagggcaagcttcttgcgtgcatcgcttcaaggccgggacagtgtggccgagcagatggctatgttgctagagggcaaagagttggagttctatcttaggaaaatcaaggccgcaaaggcaaataaatccttgttttgtcttcacccatgtaataaaggtgtttattgttttgttcccaccaaaaaaaaaaaaaaaaaaaaaaaaaaaaaaaaaaaaaaaaaaaaaaaaaaaaaaaaaaaaaaaaaaaaaaaaccaacccgcaggaggacttcgagctgattcagcgcatcggcagcggcacctacggcgacgtctacaaggcacggaatgttaacactggtgaattagcagcaattaaagtaataaaattggaaccaggagaagactttgcagttgtgcagcaagaaattattatgatgaaagactgtaaacacccaaatattgttgcttattttggaagctatctcaggcgagataagctttggatttgcatggagttttgtggaggtggttctttacaggatatttatcacgtaactggacctctgtcagaactgcaaattgcatatgttagcagagaaacactgcagggattatattatcttcacagtaaaggaaaaatgcacagagatataaagggagctaacattctattaacggataatggtcatgtgaaattggctgattttggagtatctgcacagataacagctacaattgccaaacggaagtctttcattggcacaccatattggatggctccagaagttgcagctgttgagaggaaggggggttacaatcaactctgtgatctctgggcagtgggaatcactgccatagaacttgcagagcttcagcctcctatgtttgacttacacccaatgagagcattatttctaatgacaaaaagcaattttcagcctcctaaactaaaggataaaatgaaatggtcaaatagttttcatcactttgtgaaaatggcacttaccaaaaatccgaaaaaaagacctactgctgaaaaattattacagcatccttttgtaacacaacatttgacacggtctttggcaatcgagctgttggataaagtaaataatccagatcattccacttaccatgatttcgatgatgatgatcctgagcctcttgttgctgtaccacatagaattcactcaacaagtagaaacgtgagagaagaaaaaacacgctcagagataacctttggccaagtgaaatttgatccacccttaagaaaggagacagaaccacatcatgaacttcccgacagtgatggttttttggacagttcagaagaaatatactacactgcaagatctaatctggatctgcaactggaatatggacaaggacaccaaggtggttactttttaggtgcaaacaagagtcttctcaagtctgttgaagaagaattgcatcagcgaggacacgtcgcacatttagaagatgatgaaggagatgatgatgaatctaaacactcaactctgaaagcaaaaattccacctcctttgccaccaaagcctaagtctatcttcataccacaggaaatgcattctactgaggatgaaaatcaaggaacaatcaagagatgtcccatgtcagggagcccagcaaagccatcccaagttccacctagaccaccacctcccagattacccccacacaaacctgttgccttaggaaatggaatgagctccttccagttaaatggtgaacgagatggctcattatgtcaacaacagaatgaacatagaggcacaaacctttcaagaaaagaaaagaaagatgtaccaaagcctattagtaatggtcttcctccaacacctaaagtgcatatgggtgcatgtttttcaaaagtttttaatgggtgtcccttgaaaattcactgtgcatcatcatggataaacccagatacaagagatcagtacttgatatttggtgccgaagaagggatttataccctcaatcttaatgaacttcatgaaacatcaatggaacagctattccctcgaaggtgtacatggttgtatgtaatgaacaattgcttgctatcaatatctggtaaagcttctcagctttattcccataatttaccagggctttttgattatgcaagacaaatgcaaaagttacctgttgctattccagcacacaaactccctgacagaatactgccaaggaaattttctgtatcagcaaaaatccctgaaaccaaatggtgccagaagtgttgtgttgtaagaaatccttacacgggccataaatacctatgtggagcacttcagactagcattgttctattagaatgggttgaaccaatgcagaaatttatgttaattaagcacatagattttcctataccatgtccacttagaatgtttgaaatgctggtagttcctgaacaggagtaccctttagtttgtgttggtgtcagtagaggtagagacttcaaccaagtggttcgatttgagacggtcaatccaaattctacctcttcatggtttacagaatcagataccccacagacaaatgttactcatgtaacccaactggagagagataccatccttgtatgcttggactgttgtataaaaatagtaaatctccaaggaagattaaaatctagcaggaaattgtcatcagaactcacctttgatttccagattgaatcaatagtgtgcctacaagacagtgtgctagctttctggaaacatggaatgcaaggtagaagttttagatctaatgaggtaacacaagaaatttcagatagcacaagaattttcaggctgcttggatctgacagggtcgtggttttggaaagtaggccaactgataaccccacagcaaatagcaatttgtacatcctggcgggtcatgaaaacagttactgagaattgttgtgctttgacagttaactctagaaagaaagaacactaccactgcaacattaatggatgcttgaagctgtacaaaagctgcagtaacctgtcttcagttactttgtaatttattgtggcatgagataagatggggaaaattttgttttaagtggtatggatatatttagcatattgaaccacacaagtgcttaattcattgttatgtaatctttgtacatataggcagtattttttctgtgaaacttcatattgctgaagacatacactaagaatttatgtagataatgtacttttatgagatgtacaagtaagtgtcttatctgtacagatgtaaatgttgatgaaaatgcaattggggttaatattttaagaattctttagtatattcttgggtgtggctatattacaaaatgggatgctggcaatgaaacaatacatttaacactattgtatttttattatatgtaatttagtaatatgaatataaatcttgtaacttttaaaattgtaatggaggctgtaatcattttataatctttttaattttaatgcaagtacactggtgtttatatttgcacagagtattgatatgtgatgtattaagtcacaaaagtaagctgtgacattgtctataagcatttggctccacaaatgtatttggattgttttctatgtgaagcaaaccaattataattaaccacatgttgtagtaactggtctttttatatttaagcagaatcctgtaagattgcttgtctttgcttaaaaacaatacctttgaacatttttgaatcacagaatagcggtaccatgatagaatactgcaattgtggtcagaattacagtatgcacaaagaattaattagcattattaaagagtcctcactaaacatttcatatgatcacactgaagaactgtaacattccatagagtgaagtggttcaaatttctcttggaatttttacttttgttggccttattttatgatccttttcatatttcttttgacttagagtattaatacatggccaaaataatttagttactacctcatacaaacaatataatggttactacacatcacaggaacttagttttggtttaagtcatttttgattgcttttttccaatggaatatgtatataccaggttttagcaaaatgcacacttttggctctttttggtatatgttctttatattttaatgtgagtatatacactaagaacaaactaaattgtgatttatgatcttcatttattttaatggtaatggttttaaaatatgttcctgattgtacatattgtaaaataaacatgttttttaacatgctgttgtata

SEQ ID NO: 293742 - DNA, 401 bp, Homo sapiens
tttactttttctgttcaacacatttgtatggaaagaaaataataccttgcacaaactatcaaaattgaactgtagtacgaaaacaatcagcaaaggaatggtagccaccaatacaattctcacggacgcgtgggatttgagacggtcaatccaaattctacctcttcatggtttacagaatcagataccccacagacaaatgttactcatgtaacccaactggagagagataccatccttgtatgcttggactgttgtataaaaatagtaaatctccaaggaagattaaaatctagcaggaaattgtcatcagaactcacctttgatttccagattgaatcaatagtgtgcctacaagacagtgtgctagctttctaccttgcattccatgtttcgtcgac

SEQ ID NO: 293743 - DNA, 561 bp, Homo sapiens
agggggaggagcggcgaaagcggaagccatgttggagtttcaccccgagcgaggggctgcgagggttctcctctccttgtgggtgtgaccaggttcggcgcggcggcgggccgcggggggcggggacgattggccgcttgtcgtcgtccgcagcggcgtgaggggagcggcggcggcggcggcggcggccgcagcgtggagccgggtgattgtgaccgccgggggagccgggagccggccgcggcgccctctctccgtgtggccccctgagcggcccccctcccctgcccgggagggaggcggggggcacctggggcccgccatgaaccccggcttcgatttgtcccgccggaacccgcaggaggacttcgagctgattcagcgcatcggcagcggcacctacggcgacgtctacaaggcacggaatgttaacactggtgaattagcagcaattaaagtaataaaattggaaccaggagaagactttgcagttgtgcagcaagaaattatcgtgataaatatcctgtaaagaaccacctccacaaaactccatgcaaatcc

SEQ ID NO: 293744 - DNA, 267 bp, Homo sapiens
tcatatactactattgtgctaaatattttattttgtactattaggatctgcaactggaatatggacaaggacaccaaggtggttactttttaggtgcaaacaagagtcttctcaagtctgttgaagaagaattgcatcagcgaggacacgtcgcacatttagaagatgatgaaggagatgatgatgaatctaaacactcaaacctgttgccttagggaatggattagctcctccagttaattgggaacgagatgctcatatgtcaca

SEQ ID NO: 293745 - DNA, 4356 bp, Homo sapiens
agggggaggagcggcgaaagcggaagccatgttggagtttcaccccgagcgaggggctgcgagggttctcctctccttgtgggtgtgaccaggttcggcgcggcggcgggccgcggggggcggggacgattggccgcttgtcgtcgtccgcagcggcgtgaggggagcggcggcggcggcggcggcggccgcagcgtggagccgggtgattgtgaccgccgggggagccgggagccggccgcggcgccctctctccgtgtggccccctgagcggcccccctcccctgcccgggagggaggcggggggcacctggggcccgccatgaaccccggcttcgatttgtcccgccggaacccgcaggaggacttcgagctgattcagcgcatcggcagcggcacctacggcgacgtctacaaggcacggaatgttaacactggtgaattagcagcaattaaagtaataaaattggaaccaggagaagactttgcagttgtgcagcaagaaattattatgatgaaagactgtaaacacccaaatattgttgcttattttggaagctatctcaggcgagataagctttggatttgcatggagttttgtggaggtggttctttacaggatatttatcacgtaactggacctctgtcagaactgcaaattgcatatgttagcagagaaacactgcagggattatattatcttcacagtaaaggaaaaatgcacagagatataaagggagctaacattctattaacggataatggtcatgtgaaattggctgattttggagtatctgcacagataacagctacaattgccaaacggaagtctttcattggcacaccatattggatggctccagaagttgcagctgttgagaggaaggggggttacaatcaactctgtgatctctgggcagtgggaatcactgccatagaacttgcagagcttcagcctcctatgtttgacttacacccaatgagagcattatttctaatgacaaaaagcaattttcagcctcctaaactaaaggataaaatgaaatggtcaaatagttttcatcactttgtgaaaatggcacttaccaaaaatccgaaaaaaagacctactgctgaaaaattattacagcatccttttgtaacacaacatttgacacggtctttggcaatcgagctgttggataaagtaaataatccagatcattccacttaccatgatttcgatgatgatgatcctgagcctcttgttgctgtaccacatagaattcactcaacaagtagaaacgtgagagaagaaaaaacacgctcagagataacctttggccaagtgaaatttgatccacccttaagaaaggagacagaaccacatcatgaacttcccgacagtgatggttttttggacagttcagaagaaatatactacactgcaagatctaatctggatctgcaactggaatatggacaaggacaccaaggtggttactttttaggtgcaaacaagagtcttctcaagtctgttgaagaagaattgcatcagcgaggacacgtcgcacatttagaagatgatgaaggagatgatgatgaatctaaacactcaactctgaaagcaaaaattccacctcctttgccaccaaagcctaagtctatcttcataccacaggaaatgcattctactgaggatgaaaatcaaggaacaatcaagagatgtcccatgtcagggagcccagcaaagccatcccaagttccacctagaccaccacctcccagattacccccacacaaacctgttgccttaggaaatggaatgagctccttccagttaaatggtgaacgagatggctcattatgtcaacaacagaatgaacatagaggcacaaacctttcaagaaaagaaaagaaagatgtaccaaagcctattagtaatggtcttcctccaacacctaaagtgcatatgggtgcatgtttttcaaaagtttttaatgggtgtcccttgaaaattcactgtgcatcatcatggataaacccagatacaagagatcagtacttgatatttggtgccgaagaagggatttataccctcaatcttaatgaacttcatgaaacatcaatggaacagctattccctcgaaggtgtacatggttgtatgtaatgaacaattgcttgctatcaatatctggtaaagcttctcagctttattcccataatttaccagggctttttgattatgcaagacaaatgcaaaagttacctgttgctattccagcacacaaactccctgacagaatactgccaaggaaattttctgtatcagcaaaaatccctgaaaccaaatggtgccagaagtgttgtgttgtaagaaatccttacacgggccataaatacctatgtggagcacttcagactagcattgttctattagaatgggttgaaccaatgcagaaatttatgttaattaagcacatagattttcctataccatgtccacttagaatgtttgaaatgctggtagttcctgaacaggagtaccctttagtttgtgttggtgtcagtagaggtagagacttcaaccaagtggttcgatttgagacggtcaatccaaattctacctcttcatggtttacagaatcagataccccacagacaaatgttactcatgtaacccaactggagagagataccatccttgtatgcttggactgttgtataaaaatagtaaatctccaaggaagattaaaatctagcaggaaattgtcatcagaactcacctttgatttccagattgaatcaatagtgtgcctacaagacagtgtgctagctttctggaaacatggaatgcaaggtagaagttttagatctaatgaggtaacacaagaaatttcagatagcacaagaattttcaggctgcttggatctgacagggtcgtggttttggaaagtaggccaactgataaccccacagcaaatagcaatttgtacatcctggcgggtcatgaaaacagttactgagaattgttgtgctttgacagttaactctagaaagaaagaacactaccactgcaacattaatggatgcttgaagctgtacaaaagctgcagtaacctgtcttcagttactttgtaatttattgtggcatgagataagatggggaaaattttgttttaagtggtatggatatatttagcatattgaaccacacaagtgcttaattcattgttatgtaatctttgtacatataggcagtattttttctgtgaaacttcatattgctgaagacatacactaagaatttatgtagataatgtacttttatgagatgtacaagtaagtgtcttatctgtacagatgtaaatgttgatgaaaatgcaattggggttaatattttaagaattctttagtatattcttgggtgtggctatattacaaaatgggatgctggcaatgaaacaatacatttaacactattgtatttttattatatgtaatttagtaatatgaatataaatcttgtaacttttaaaattgtaatggaggctgtaatcattttataatctttttaattttaatgcaagtacactggtgtttatatttgcacagagtattgatatgtgatgtattaagtcacaaaagtaagctgtgacattgtctataagcatttggctccacaaatgtatttggattgttttctatgtgaagcaaaccaattataattaaccacatgttgtagtaactggtctttttatatttaagcagaatcctgtaagattgcttgtctttgcttaaaaacaatacctttgaacatttttgaatcacagaatagcggtaccatgatagaatactgcaattgtggtcagaattacagtatgcacaaagaattaattagcattattaaagagtcctcactaaacatttcatatgatcacactgaagaactgtaacattccatagagtgaagtggttcaaatttctcttggaatttttacttttgttggccttattttatgatccttttcatatttcttttgacttagagtattaatacatggccaaaataatttagttactacctcatacaaacaatataatggttactacacatcacaggaacttagttttggtttaagtcatttttgattgcttttttccaatggaatatgtatataccaggttttagcaaaatgcacacttttggctctttttggtatatgttctttatattttaatgtgagtatatacactaagaacaaactaaattgtgatttatgatcttcatttattttaatggtaatggttttaaaatatgttcctgattgtacatattgtaaaataaacatgttttttaacatgctgttgtata

SEQ ID NO: 293746 - DNA, 4293 bp, Homo sapiens
agggggaggagcggcgaaagcggaagccatgttggagtttcaccccgagcgaggggctgcgagggttctcctctccttgtgggtgtgaccaggttcggcgcggcggcgggccgcggggggcggggacgattggccgcttgtcgtcgtccgcagcggcgtgaggggagcggcggcggcggcggcggcggccgcagcgtggagccgggtgattgtgaccgccgggggagccgggagccggccgcggcgccctctctccgtgtggccccctgagcggcccccctcccctgcccgggagggaggcggggggcacctggggcccgccatgaaccccggcttcgatttgtcccgccggaacccgcaggaggacttcgagctgattcagcgcatcggcagcggcacctacggcgacgtctacaaggcacggaatgttaacactggtgaattagcagcaattaaagtaataaaattggaaccaggagaagactttgcagttgtgcagcaagaaattattatgatgaaagactgtaaacacccaaatattgttgcttattttggaagctatctcaggcgagataagctttggatttgcatggagttttgtggaggtggttctttacaggatatttatcacgtaactggacctctgtcagaactgcaaattgcatatgttagcagagaaacactgcagggattatattatcttcacagtaaaggaaaaatgcacagagatataaagggagctaacattctattaacggataatggtcatgtgaaattggctgattttggagtatctgcacagataacagctacaattgccaaacggaagtctttcattggcacaccatattggatggctccagaagttgcagctgttgagaggaaggggggttacaatcaactctgtgatctctgggcagtgggaatcactgccatagaacttgcagagcttcagcctcctatgtttgacttacacccaatgagagcattatttctaatgacaaaaagcaattttcagcctcctaaactaaaggataaaatgaaatggtcaaatagttttcatcactttgtgaaaatggcacttaccaaaaatccgaaaaaaagacctactgctgaaaaattattacagcatccttttgtaacacaacatttgacacggtctttggcaatcgagctgttggataaagtaaataatccagatcattccacttaccatgatttcgatgatgatgatcctgagcctcttgttgctgtaccacatagaattcactcaacaagtagaaacgtgagagaagaaaaaacacgctcagagataacctttggccaagtgaaatttgatccacccttaagaaaggagacagaaccacatcatgaacttgatctgcaactggaatatggacaaggacaccaaggtggttactttttaggtgcaaacaagagtcttctcaagtctgttgaagaagaattgcatcagcgaggacacgtcgcacatttagaagatgatgaaggagatgatgatgaatctaaacactcaactctgaaagcaaaaattccacctcctttgccaccaaagcctaagtctatcttcataccacaggaaatgcattctactgaggatgaaaatcaaggaacaatcaagagatgtcccatgtcagggagcccagcaaagccatcccaagttccacctagaccaccacctcccagattacccccacacaaacctgttgccttaggaaatggaatgagctccttccagttaaatggtgaacgagatggctcattatgtcaacaacagaatgaacatagaggcacaaacctttcaagaaaagaaaagaaagatgtaccaaagcctattagtaatggtcttcctccaacacctaaagtgcatatgggtgcatgtttttcaaaagtttttaatgggtgtcccttgaaaattcactgtgcatcatcatggataaacccagatacaagagatcagtacttgatatttggtgccgaagaagggatttataccctcaatcttaatgaacttcatgaaacatcaatggaacagctattccctcgaaggtgtacatggttgtatgtaatgaacaattgcttgctatcaatatctggtaaagcttctcagctttattcccataatttaccagggctttttgattatgcaagacaaatgcaaaagttacctgttgctattccagcacacaaactccctgacagaatactgccaaggaaattttctgtatcagcaaaaatccctgaaaccaaatggtgccagaagtgttgtgttgtaagaaatccttacacgggccataaatacctatgtggagcacttcagactagcattgttctattagaatgggttgaaccaatgcagaaatttatgttaattaagcacatagattttcctataccatgtccacttagaatgtttgaaatgctggtagttcctgaacaggagtaccctttagtttgtgttggtgtcagtagaggtagagacttcaaccaagtggttcgatttgagacggtcaatccaaattctacctcttcatggtttacagaatcagataccccacagacaaatgttactcatgtaacccaactggagagagataccatccttgtatgcttggactgttgtataaaaatagtaaatctccaaggaagattaaaatctagcaggaaattgtcatcagaactcacctttgatttccagattgaatcaatagtgtgcctacaagacagtgtgctagctttctggaaacatggaatgcaaggtagaagttttagatctaatgaggtaacacaagaaatttcagatagcacaagaattttcaggctgcttggatctgacagggtcgtggttttggaaagtaggccaactgataaccccacagcaaatagcaatttgtacatcctggcgggtcatgaaaacagttactgagaattgttgtgctttgacagttaactctagaaagaaagaacactaccactgcaacattaatggatgcttgaagctgtacaaaagctgcagtaacctgtcttcagttactttgtaatttattgtggcatgagataagatggggaaaattttgttttaagtggtatggatatatttagcatattgaaccacacaagtgcttaattcattgttatgtaatctttgtacatataggcagtattttttctgtgaaacttcatattgctgaagacatacactaagaatttatgtagataatgtacttttatgagatgtacaagtaagtgtcttatctgtacagatgtaaatgttgatgaaaatgcaattggggttaatattttaagaattctttagtatattcttgggtgtggctatattacaaaatgggatgctggcaatgaaacaatacatttaacactattgtatttttattatatgtaatttagtaatatgaatataaatcttgtaacttttaaaattgtaatggaggctgtaatcattttataatctttttaattttaatgcaagtacactggtgtttatatttgcacagagtattgatatgtgatgtattaagtcacaaaagtaagctgtgacattgtctataagcatttggctccacaaatgtatttggattgttttctatgtgaagcaaaccaattataattaaccacatgttgtagtaactggtctttttatatttaagcagaatcctgtaagattgcttgtctttgcttaaaaacaatacctttgaacatttttgaatcacagaatagcggtaccatgatagaatactgcaattgtggtcagaattacagtatgcacaaagaattaattagcattattaaagagtcctcactaaacatttcatatgatcacactgaagaactgtaacattccatagagtgaagtggttcaaatttctcttggaatttttacttttgttggccttattttatgatccttttcatatttcttttgacttagagtattaatacatggccaaaataatttagttactacctcatacaaacaatataatggttactacacatcacaggaacttagttttggtttaagtcatttttgattgcttttttccaatggaatatgtatataccaggttttagcaaaatgcacacttttggctctttttggtatatgttctttatattttaatgtgagtatatacactaagaacaaactaaattgtgatttatgatcttcatttattttaatggtaatggttttaaaatatgttcctgattgtacatattgtaaaataaacatgttttttaacatgctgttgtata

SEQ ID NO: 293747 - DNA, 4250 bp, Homo sapiens
agggggaggagcggcgaaagcggaagccatgttggagtttcaccccgagcgaggggctgcgagggttctcctctccttgtgggtgtgaccaggttcggcgcggcggcgggccgcggggggcggggacgattggccgcttgtcgtcgtccgcagcggcgtgaggggagcggcggcggcggcggcggcggccgcagcgtggagccgggtgattgtgaccgccgggggagccgggagccggccgcggcgccctctctccgtgtggccccctgagcggcccccctcccctgcccgggagggaggcggggggcacctggggcccgccatgaaccccggcttcgatttgtcccgccggaacccgcaggaggacttcgagctgattcagcgcatcggcagcggcacctacggcgacgtctacaaggcacggaatgttaacactggtgaattagcagcaattaaagtaataaaattggaaccaggagaagactttgcagttgtgcagcaagaaattattatgatgaaagactgtaaacacccaaatattgttgcttattttggaagctatctcaggcgagataagctttggatttgcatggagttttgtggaggtggttctttacaggatatttatcacgtaactggacctctgtcagaactgcaaattgcatatgttagcagagaaacactgcagggattatattatcttcacagtaaaggaaaaatgcacagagatataaagctgattttggagtatctgcacagataacagctacaattgccaaacggaagtctttcattggcacaccatattggatggctccagaagttgcagctgttgagaggaaggggggttacaatcaactctgtgatctctgggcagtgggaatcactgccatagaacttgcagagcttcagcctcctatgtttgacttacacccaatgagagcattatttctaatgacaaaaagcaattttcagcctcctaaactaaaggataaaatgaaatggtcaaatagttttcatcactttgtgaaaatggcacttaccaaaaatccgaaaaaaagacctactgctgaaaaattattacagcatccttttgtaacacaacatttgacacggtctttggcaatcgagctgttggataaagtaaataatccagatcattccacttaccatgatttcgatgatgatgatcctgagcctcttgttgctgtaccacatagaattcactcaacaagtagaaacgtgagagaagaaaaaacacgctcagagataacctttggccaagtgaaatttgatccacccttaagaaaggagacagaaccacatcatgaacttgatctgcaactggaatatggacaaggacaccaaggtggttactttttaggtgcaaacaagagtcttctcaagtctgttgaagaagaattgcatcagcgaggacacgtcgcacatttagaagatgatgaaggagatgatgatgaatctaaacactcaactctgaaagcaaaaattccacctcctttgccaccaaagcctaagtctatcttcataccacaggaaatgcattctactgaggatgaaaatcaaggaacaatcaagagatgtcccatgtcagggagcccagcaaagccatcccaagttccacctagaccaccacctcccagattacccccacacaaacctgttgccttaggaaatggaatgagctccttccagttaaatggtgaacgagatggctcattatgtcaacaacagaatgaacatagaggcacaaacctttcaagaaaagaaaagaaagatgtaccaaagcctattagtaatggtcttcctccaacacctaaagtgcatatgggtgcatgtttttcaaaagtttttaatgggtgtcccttgaaaattcactgtgcatcatcatggataaacccagatacaagagatcagtacttgatatttggtgccgaagaagggatttataccctcaatcttaatgaacttcatgaaacatcaatggaacagctattccctcgaaggtgtacatggttgtatgtaatgaacaattgcttgctatcaatatctggtaaagcttctcagctttattcccataatttaccagggctttttgattatgcaagacaaatgcaaaagttacctgttgctattccagcacacaaactccctgacagaatactgccaaggaaattttctgtatcagcaaaaatccctgaaaccaaatggtgccagaagtgttgtgttgtaagaaatccttacacgggccataaatacctatgtggagcacttcagactagcattgttctattagaatgggttgaaccaatgcagaaatttatgttaattaagcacatagattttcctataccatgtccacttagaatgtttgaaatgctggtagttcctgaacaggagtaccctttagtttgtgttggtgtcagtagaggtagagacttcaaccaagtggttcgatttgagacggtcaatccaaattctacctcttcatggtttacagaatcagataccccacagacaaatgttactcatgtaacccaactggagagagataccatccttgtatgcttggactgttgtataaaaatagtaaatctccaaggaagattaaaatctagcaggaaattgtcatcagaactcacctttgatttccagattgaatcaatagtgtgcctacaagacagtgtgctagctttctggaaacatggaatgcaaggtagaagttttagatctaatgaggtaacacaagaaatttcagatagcacaagaattttcaggctgcttggatctgacagggtcgtggttttggaaagtaggccaactgataaccccacagcaaatagcaatttgtacatcctggcgggtcatgaaaacagttactgagaattgttgtgctttgacagttaactctagaaagaaagaacactaccactgcaacattaatggatgcttgaagctgtacaaaagctgcagtaacctgtcttcagttactttgtaatttattgtggcatgagataagatggggaaaattttgttttaagtggtatggatatatttagcatattgaaccacacaagtgcttaattcattgttatgtaatctttgtacatataggcagtattttttctgtgaaacttcatattgctgaagacatacactaagaatttatgtagataatgtacttttatgagatgtacaagtaagtgtcttatctgtacagatgtaaatgttgatgaaaatgcaattggggttaatattttaagaattctttagtatattcttgggtgtggctatattacaaaatgggatgctggcaatgaaacaatacatttaacactattgtatttttattatatgtaatttagtaatatgaatataaatcttgtaacttttaaaattgtaatggaggctgtaatcattttataatctttttaattttaatgcaagtacactggtgtttatatttgcacagagtattgatatgtgatgtattaagtcacaaaagtaagctgtgacattgtctataagcatttggctccacaaatgtatttggattgttttctatgtgaagcaaaccaattataattaaccacatgttgtagtaactggtctttttatatttaagcagaatcctgtaagattgcttgtctttgcttaaaaacaatacctttgaacatttttgaatcacagaatagcggtaccatgatagaatactgcaattgtggtcagaattacagtatgcacaaagaattaattagcattattaaagagtcctcactaaacatttcatatgatcacactgaagaactgtaacattccatagagtgaagtggttcaaatttctcttggaatttttacttttgttggccttattttatgatccttttcatatttcttttgacttagagtattaatacatggccaaaataatttagttactacctcatacaaacaatataatggttactacacatcacaggaacttagttttggtttaagtcatttttgattgcttttttccaatggaatatgtatataccaggttttagcaaaatgcacacttttggctctttttggtatatgttctttatattttaatgtgagtatatacactaagaacaaactaaattgtgatttatgatcttcatttattttaatggtaatggttttaaaatatgttcctgattgtacatattgtaaaataaacatgttttttaacatgctgttgtata

SEQ ID NO: 293748 - DNA, 4163 bp, Homo sapiens
agggggaggagcggcgaaagcggaagccatgttggagtttcaccccgagcgaggggctgcgagggttctcctctccttgtgggtgtgaccaggttcggcgcggcggcgggccgcggggggcggggacgattggccgcttgtcgtcgtccgcagcggcgtgaggggagcggcggcggcggcggcggcggccgcagcgtggagccgggtgattgtgaccgccggaacccgcaggaggacttcgagctgattcagcgcatcggcagcggcacctacggcgacgtctacaaggcacggaatgttaacactggtgaattagcagcaattaaagtaataaaattggaaccaggagaagactttgcagttgtgcagcaagaaattattatgatgaaagactgtaaacacccaaatattgttgcttattttggaagctatctcaggcgagataagctttggatttgcatggagttttgtggaggtggttctttacaggatatttatcacgtaactggacctctgtcagaactgcaaattgcatatgttagcagagaaacactgcagggattatattatcttcacagtaaaggaaaaatgcacagagatataaagggagctaacattctattaacggataatggtcatgtgaaattggctgattttggagtatctgcacagataacagctacaattgccaaacggaagtctttcattggcacaccatattggatggctccagaagttgcagctgttgagaggaaggggggttacaatcaactctgtgatctctgggcagtgggaatcactgccatagaacttgcagagcttcagcctcctatgtttgacttacacccaatgagagcattatttctaatgacaaaaagcaattttcagcctcctaaactaaaggataaaatgaaatggtcaaatagttttcatcactttgtgaaaatggcacttaccaaaaatccgaaaaaaagacctactgctgaaaaattattacagcatccttttgtaacacaacatttgacacggtctttggcaatcgagctgttggataaagtaaataatccagatcattccacttaccatgatttcgatgatgatgatcctgagcctcttgttgctgtaccacatagaattcactcaacaagtagaaacgtgagagaagaaaaaacacgctcagagataacctttggccaagtgaaatttgatccacccttaagaaaggagacagaaccacatcatgaacttgatctgcaactggaatatggacaaggacaccaaggtggttactttttaggtgcaaacaagagtcttctcaagtctgttgaagaagaattgcatcagcgaggacacgtcgcacatttagaagatgatgaaggagatgatgatgaatctaaacactcaactctgaaagcaaaaattccacctcctttgccaccaaagcctaagtctatcttcataccacaggaaatgcattctactgaggatgaaaatcaaggaacaatcaagagatgtcccatgtcagggagcccagcaaagccatcccaagttccacctagaccaccacctcccagattacccccacacaaacctgttgccttaggaaatggaatgagctccttccagttaaatggtgaacgagatggctcattatgtcaacaacagaatgaacatagaggcacaaacctttcaagaaaagaaaagaaagatgtaccaaagcctattagtaatggtcttcctccaacacctaaagtgcatatgggtgcatgtttttcaaaagtttttaatgggtgtcccttgaaaattcactgtgcatcatcatggataaacccagatacaagagatcagtacttgatatttggtgccgaagaagggatttataccctcaatcttaatgaacttcatgaaacatcaatggaacagctattccctcgaaggtgtacatggttgtatgtaatgaacaattgcttgctatcaatatctggtaaagcttctcagctttattcccataatttaccagggctttttgattatgcaagacaaatgcaaaagttacctgttgctattccagcacacaaactccctgacagaatactgccaaggaaattttctgtatcagcaaaaatccctgaaaccaaatggtgccagaagtgttgtgttgtaagaaatccttacacgggccataaatacctatgtggagcacttcagactagcattgttctattagaatgggttgaaccaatgcagaaatttatgttaattaagcacatagattttcctataccatgtccacttagaatgtttgaaatgctggtagttcctgaacaggagtaccctttagtttgtgttggtgtcagtagaggtagagacttcaaccaagtggttcgatttgagacggtcaatccaaattctacctcttcatggtttacagaatcagataccccacagacaaatgttactcatgtaacccaactggagagagataccatccttgtatgcttggactgttgtataaaaatagtaaatctccaaggaagattaaaatctagcaggaaattgtcatcagaactcacctttgatttccagattgaatcaatagtgtgcctacaagacagtgtgctagctttctggaaacatggaatgcaaggtagaagttttagatctaatgaggtaacacaagaaatttcagatagcacaagaattttcaggctgcttggatctgacagggtcgtggttttggaaagtaggccaactgataaccccacagcaaatagcaatttgtacatcctggcgggtcatgaaaacagttactgagaattgttgtgctttgacagttaactctagaaagaaagaacactaccactgcaacattaatggatgcttgaagctgtacaaaagctgcagtaacctgtcttcagttactttgtaatttattgtggcatgagataagatggggaaaattttgttttaagtggtatggatatatttagcatattgaaccacacaagtgcttaattcattgttatgtaatctttgtacatataggcagtattttttctgtgaaacttcatattgctgaagacatacactaagaatttatgtagataatgtacttttatgagatgtacaagtaagtgtcttatctgtacagatgtaaatgttgatgaaaatgcaattggggttaatattttaagaattctttagtatattcttgggtgtggctatattacaaaatgggatgctggcaatgaaacaatacatttaacactattgtatttttattatatgtaatttagtaatatgaatataaatcttgtaacttttaaaattgtaatggaggctgtaatcattttataatctttttaattttaatgcaagtacactggtgtttatatttgcacagagtattgatatgtgatgtattaagtcacaaaagtaagctgtgacattgtctataagcatttggctccacaaatgtatttggattgttttctatgtgaagcaaaccaattataattaaccacatgttgtagtaactggtctttttatatttaagcagaatcctgtaagattgcttgtctttgcttaaaaacaatacctttgaacatttttgaatcacagaatagcggtaccatgatagaatactgcaattgtggtcagaattacagtatgcacaaagaattaattagcattattaaagagtcctcactaaacatttcatatgatcacactgaagaactgtaacattccatagagtgaagtggttcaaatttctcttggaatttttacttttgttggccttattttatgatccttttcatatttcttttgacttagagtattaatacatggccaaaataatttagttactacctcatacaaacaatataatggttactacacatcacaggaacttagttttggtttaagtcatttttgattgcttttttccaatggaatatgtatataccaggttttagcaaaatgcacacttttggctctttttggtatatgttctttatattttaatgtgagtatatacactaagaacaaactaaattgtgatttatgatcttcatttattttaatggtaatggttttaaaatatgttcctgattgtacatattgtaaaataaacatgttttttaacatgctgttgtata

SEQ ID NO: 293749 - DNA, 2245 bp, Homo sapiens
ggcagtgatcgagctcggaccagggtgctcggtgtatgtaatgaacaatgctgctatcaatatctggtaaagcttctcagctttattcccataatttaccagggctttttgattatgcaagacaaatgcaaaagttacctgttgctattccagcacacaaactccctgacagaatactgccaaggaaattttctgtatcagcaaaaatccctgaaaccaaatggtgccagaagtgttgtgttgtaagaaatccttacacgggccataaatacctatgtggagcacttcagactagcattgttctattagaatgggttgaaccaatgcagaaatttatgttaattaagcacatagattttcctataccatgtccacttagaatgtttgaaatgctggtagttcctgaacaggagtaccctttagtttgtgttggtgtcagtagaggtagagacttcaaccaagtggttcgatttgagacggtcaatccaaattctacctcttcatggtttacagaatcagataccccacagacaaatgttactcatgtaacccaactggagagagataccatccttgtatgcttggactgttgtataaaaatagtaaatctccaaggaagattaaaatctagcaggaaattgtcatcagaactcacctttgatttccagattgaatcaatagtgtgcctacaagacagtgtgctagctttctggaaacatggaatgcaaggtagaagttttagatctaatgaggtaacacaagaaatttcagatagcacaagaattttcaggctgcttggatctgacagggtcgtggttttggaaagtaggccaactgataaccccacagcaaatagcaatttgtacatcctggcgggtcatgaaaacagttactgagaattgttgtgctttgacagttaactctagaaagaaagaacactaccactgcaacattaatggatgcttgaagctgtacaaaagctgcagtaacctgtcttcagttactttgtaatttattgtggcatgagataagatggggaaaattttgttttaagtggtatggatatatttagcatattgaaccacacaagtgcttaattcattgttatgtaatctttgtacatataggcagtattttttctgtgaaacttcatattgctgaagacatacactaagaatttatgtagataatgtacttttatgagatgtacaagtaagtgtcttatctgtacagatgtaaatgttgatgaaaatgcaattggggttaatattttaagaattctttagtatattcttgggtgtggctatattacaaaatgggatgctggcaatgaaacaatacatttaacactattgtatttttattatatgtaatttagtaatatgaatataaatcttgtaacttttaaaattgtaatggaggctgtaatcattttataatctttttaattttaatgcaagtacactggtgtttatatttgcacagagtattgatatgtgatgtattaagtcacaaaagtaagctgtgacattgtctataagcatttggctccacaaatgtatttggattgttttctatgtgaagcaaaccaattataattaaccacatgttgtagtaactggtctttttatatttaagcagaatcctgtaagattgcttgtctttgcttaaaaacaatacctttgaacatttttgaatcacagaatagcggtaccatgatagaatactgcaattgtggtcagaattacagtatgcacaaagaattaattagcattattaaagagtcctcactaaacatttcatatgatcacactgaagaactgtaacattccatagagtgaagtggttcaaatttctcttggaatttttacttttgttggccttattttatgatccttttcatatttcttttgacttagagtattaatacatggccaaaataatttagttactacctcatacaaacaatataatggttactacacatcacaggaacttagttttggtttaagtcatttttgattgcttttttccaatggaatatgtatataccaggttttagcaaaatgcacacttttggctctttttggtatatgttctttatattttaatgtgagtatatacactaagaacaaactaaattgtgatttatgatcttcatttattttaatggtaatggttttaaaatatgttcctgattgtacatattgtaaaataaacatgttttttaacatgctgttgtata

SEQ ID NO: 293750 - DNA, 2240 bp, Homo sapiens
tgctgggattacaggcaacgtgccatggcacccggcctttttattctaattttaatagatgagctagtatgtcagcaccagttttgaactcatcctttgtgcactgatctataacagtagctttttcatatactaagtttgcctacatatattacgtactcacttttatttacatttaggaaattttctgtatcagcaaaaatccctgaaaccaaatggtgccagaagtgttgtgttgtaagaaatccttacacgggccataaatacctatgtggagcacttcagactagcattgttctattagaatgggttgaaccaatgcagaaatttatgttaattaagcacatagattttcctataccatgtccacttagaatgtttgaaatgctggtagttcctgaacaggagtaccctttagtttgtgttggtgtcagtagaggtagagacttcaaccaagtggttcgatttgagacggtcaatccaaattctacctcttcatggtttacagaatcagataccccacagacaaatgttactcatgtaacccaactggagagagataccatccttgtatgcttggactgttgtataaaaatagtaaatctccaaggaagattaaaatctagcaggaaattgtcatcagaactcacctttgatttccagattgaatcaatagtgtgcctacaagacagtgtgctagctttctggaaacatggaatgcaaggtagaagttttagatctaatgaggtaacacaagaaatttcagatagcacaagaattttcaggctgcttggatctgacagggtcgtggttttggaaagtaggccaactgataaccccacagcaaatagcaatttgtacatcctggcgggtcatgaaaacagttactgagaattgttgtgctttgacagttaactctagaaagaaagaacactaccactgcaacattaatggatgcttgaagctgtacaaaagctgcagtaacctgtcttcagttactttgtaatttattgtggcatgagataagatggggaaaattttgttttaagtggtatggatatatttagcatattgaaccacacaagtgcttaattcattgttatgtaatctttgtacatataggcagtattttttctgtgaaacttcatattgctgaagacatacactaagaatttatgtagataatgtacttttatgagatgtacaagtaagtgtcttatctgtacagatgtaaatgttgatgaaaatgcaattggggttaatattttaagaattctttagtatattcttgggtgtggctatattacaaaatgggatgctggcaatgaaacaatacatttaacactattgtatttttattatatgtaatttagtaatatgaatataaatcttgtaacttttaaaattgtaatggaggctgtaatcattttataatctttttaattttaatgcaagtacactggtgtttatatttgcacagagtattgatatgtgatgtattaagtcacaaaagtaagctgtgacattgtctataagcatttggctccacaaatgtatttggattgttttctatgtgaagcaaaccaattataattaaccacatgttgtagtaactggtctttttatatttaagcagaatcctgtaagattgcttgtctttgcttaaaaacaatacctttgaacatttttgaatcacagaatagcggtaccatgatagaatactgcaattgtggtcagaattacagtatgcacaaagaattaattagcattattaaagagtcctcactaaacatttcatatgatcacactgaagaactgtaacattccatagagtgaagtggttcaaatttctcttggaatttttacttttgttggccttattttatgatccttttcatatttcttttgacttagagtattaatacatggccaaaataatttagttactacctcatacaaacaatataatggttactacacatcacaggaacttagttttggtttaagtcatttttgattgcttttttccaatggaatatgtatataccaggttttagcaaaatgcacacttttggctctttttggtatatgttctttatattttaatgtgagtatatacactaagaacaaactaaattgtgatttatgatcttcatttattttaatggtaatggttttaaaatatgttcctgattgtacatattgtaaaataaacatgttttttaacatgctgttgtata

SEQ ID NO: 293751 - DNA, 1752 bp, Homo sapiens
ggttcttgaactgcaaatcgtttttagaacttgtaataagaattaagttcccccaaataatttctaatataggtttctccccacttctgactcttagaagaacactggcctagaggtgggaggtagtggacagcaaaattacttcccagagctagaactggccctgtaatcacagtgatagcaaatgatttctgcccacgatcaaatgagcagcatttatagaggcacatattggagaagcaatggaaaatttgggagctaacattaattttcaggaataactttgttttgttatatgttttttattactttcagggtcgtggttttggaaagtaggccaactgataaccccacagcaaatagcaatttgtacatcctggcgggtcatgaaaacagttactgagaattgttgtgctttgacagttaactctagaaagaaagaacactaccactgcaacattaatggatgcttgaagctgtacaaaagctgcagtaacctgtcttcagttactttgtaatttattgtggcatgagataagatggggaaaattttgttttaagtggtatggatatatttagcatattgaaccacacaagtgcttaattcattgttatgtaatctttgtacatataggcagtattttttctgtgaaacttcatattgctgaagacatacactaagaatttatgtagataatgtacttttatgagatgtacaagtaagtgtcttatctgtacagatgtaaatgttgatgaaaatgcaattggggttaatattttaagaattctttagtatattcttgggtgtggctatattacaaaatgggatgctggcaatgaaacaatacatttaacactattgtatttttattatatgtaatttagtaatatgaatataaatcttgtaacttttaaaattgtaatggaggctgtaatcattttataatctttttaattttaatgcaagtacactggtgtttatatttgcacagagtattgatatgtgatgtattaagtcacaaaagtaagctgtgacattgtctataagcatttggctccacaaatgtatttggattgttttctatgtgaagcaaaccaattataattaaccacatgttgtagtaactggtctttttatatttaagcagaatcctgtaagattgcttgtctttgcttaaaaacaatacctttgaacatttttgaatcacagaatagcggtaccatgatagaatactgcaattgtggtcagaattacagtatgcacaaagaattaattagcattattaaagagtcctcactaaacatttcatatgatcacactgaagaactgtaacattccatagagtgaagtggttcaaatttctcttggaatttttacttttgttggccttattttatgatccttttcatatttcttttgacttagagtattaatacatggccaaaataatttagttactacctcatacaaacaatataatggttactacacatcacaggaacttagttttggtttaagtcatttttgattgcttttttccaatggaatatgtatataccaggttttagcaaaatgcacacttttggctctttttggtatatgttctttatattttaatgtgagtatatacactaagaacaaactaaattgtgatttatgatcttcatttattttaatggtaatggttttaaaatatgttcctgattgtacatattgtaaaataaacatgttttttaacatgctgttgtata

SEQ ID NO: 293752 - DNA, 1699 bp, Homo sapiens
ggttcttgaactgcaaatcgtttttagaacttgtaataagaattaagttcccccaaataatttctaatataggtttctccccacttctgactcttagaagaacactggcctagaggtgggaggtagtggacagcaaaattacttcccagagctagaactggccctgtaatcacagtgatagcaaatgatttctgcccacgatcaaatgagcagcatttatagaggcacatattggagaagcaatggaaaatttgggagctaacattaattttcaggaataactttgttttgttatatgttttttattactttcagggtcgtggttttggaaagtaggccaactgataaccccacagcaaatagcaatttgtacatcctggcgggtcatgaaaacagttactgagaattgttgtgctttgacagttaactctagaaagaaagaacactaccactgcaacattaatggatgcttgaagctgtacaaaagctgcagtaacctgtcttcagttactttgtaatttattgtggcatgagataagatgggtgcttaattcattgttatgtaatctttgtacatataggcagtattttttctgtgaaacttcatattgctgaagacatacactaagaatttatgtagataatgtacttttatgagatgtacaagtaagtgtcttatctgtacagatgtaaatgttgatgaaaatgcaattggggttaatattttaagaattctttagtatattcttgggtgtggctatattacaaaatgggatgctggcaatgaaacaatacatttaacactattgtatttttattatatgtaatttagtaatatgaatataaatcttgtaacttttaaaattgtaatggaggctgtaatcattttataatctttttaattttaatgcaagtacactggtgtttatatttgcacagagtattgatatgtgatgtattaagtcacaaaagtaagctgtgacattgtctataagcatttggctccacaaatgtatttggattgttttctatgtgaagcaaaccaattataattaaccacatgttgtagtaactggtctttttatatttaagcagaatcctgtaagattgcttgtctttgcttaaaaacaatacctttgaacatttttgaatcacagaatagcggtaccatgatagaatactgcaattgtggtcagaattacagtatgcacaaagaattaattagcattattaaagagtcctcactaaacatttcatatgatcacactgaagaactgtaacattccatagagtgaagtggttcaaatttctcttggaatttttacttttgttggccttattttatgatccttttcatatttcttttgacttagagtattaatacatggccaaaataatttagttactacctcatacaaacaatataatggttactacacatcacaggaacttagttttggtttaagtcatttttgattgcttttttccaatggaatatgtatataccaggttttagcaaaatgcacacttttggctctttttggtatatgttctttatattttaatgtgagtatatacactaagaacaaactaaattgtgatttatgatcttcatttattttaatggtaatggttttaaaatatgttcctgattgtacatattgtaaaataaacatgttttttaacatgctgttgtata

SEQ ID NO: 293753 - DNA, 2784 bp, Homo sapiens
agggggaggagcggcgaaagcggaagccatgttggagtttcaccccgagcgaggggctgcgagggttctcctctccttgtgggtgtgaccaggttcggcgcggcggcgggccgcggggggcggggacgattggccgcttgtcgtcgtccgcagcggcgtgaggggagcggcggcggcggcggcggcggccgcagcgtggagccgggtgattgtgaccgccgggggagccgggagccggccgcggcgccctctctccgtgtggccccctgagcggcccccctcccctgcccgggagggaggcggggggcacctggggcccgccatgaaccccggcttcgatttgtcccgccggaacccgcaggaggacttcgagctgattcagcgcatcggcagcggcacctacggcgacgtctacaaggcacggaatgttaacactggtgaattagcagcaattaaagtaataaaattggaaccaggagaagactttgcagttgtgcagcaagaaattattatgatgaaagactgtaaacacccaaatattgttgcttattttggaagctatctcaggcgagataagctttggatttgcatggagttttgtggaggtggttctttacaggatatttatcacgtaactggacctctgtcagaactgcaaattgcatatgttagcagagaaacactgcagggattatattatcttcacagtaaaggaaaaatgcacagagatataaagggagctaacattctattaacggataatggtcatgtgaaattggctgattttggagtatctgcacagataacagctacaattgccaaacggaagtctttcattggcacaccatattggatggctccagaagttgcagctgttgagaggaaggggggttacaatcaactctgtgatctctgggcagtgggaatcactgccatagaacttgcagagcttcagcctcctatgtttgacttacacccaatgagagcattatttctaatgacaaaaagcaattttcagcctcctaaactaaaggataaaatgaaatggtcaaatagttttcatcactttgtgaaaatggcacttaccaaaaatccgaaaaaaagacctactgctgaaaaattattacagcatccttttgtaacacaacatttgacacggtctttggcaatcgagctgttggataaagtaaataatccagatcattccacttaccatgatttcgatgatgatgatcctgagcctcttgttgctgtaccacatagaattcactcaacaagtagaaacgtgagagaagaaaaaacacgctcagagataacctttggccaagtgaaatttgatccacccttaagaaaggagacagaaccacatcatgaacttgatctgcaactggaatatggacaaggacaccaaggtggttactttttaggtgcaaacaagagtcttctcaagtctgttgaagaagaattgcatcagcgaggacacgtcgcacatttagaagatgatgaaggagatgatgatgaatctaaacactcaactctgaaagcaaaaattccacctcctttgccaccaaagcctaagtctatcttcataccacaggaaatgcattctactgaggatgaaaatcaaggaacaatcaagagatgtcccatgtcagggagcccagcaaagccatcccaagttccacctagaccaccacctcccagattacccccacacaaacctgttgccttaggaaatggaatgagctccttccagttaaatggtgaacgagatggctcattatgtcaacaacagaatgaacatagaggcacaaacctttcaagaaaagaaaagaaagatgtaccaaagcctattagtaatggtcttcctccaacacctaaagtgcatatgggtgcatgtttttcaaaagtttttaatgggtgtcccttgaaaattcactgtgcatcatcatggataaacccagatacaagagatcagtacttgatatttggtgccgaagaagggatttataccctcaatcttaatgaacttcatgaaacatcaatggaacagctattccctcgaaggtgtacatggttgtatgtaatgaacaattgcttgctatcaatatctggtaaagcttctcagctttattcccataatttaccagggctttttgattatgcaagacaaatgcaaaagttacctgttgctattccagcacacaaactccctgacagaatactgccaaggaaattttctgtatcagcaaaaatccctgaaaccaaatggtgccagaagtgttgtgttgtaagaaatccttacacgggccataaatacctatgtggagcacttcagactagcattgttctattagaatgggttgaaccaatgcagaaatttatgttaattaagcacatagattttcctataccatgtccacttagaatgtttgaaatgctggtagttcctgaacaggagtaccctttagtttgtgttggtgtcagtagaggtagagacttcaaccaagtggttcgatttgagacggtcaatccaaattctacctcttcatggtttacagaatcagataccccacagacaaatgttactcatgtaacccaactggagagagataccatccttgtatgcttggactgttgtataaaaatagtaaatctccaaggaagattaaaatctagcaggaaattgtcatcagaactcacctttgatttccagattgaatcaatagtgtgcctacaagacagtgtgctagctttctaccttgcattccatgtttcgtcgac

SEQ ID NO: 293754 - DNA, 2574 bp, Homo sapiens
agggggaggagcggcgaaagcggaagccatgttggagtttcaccccgagcgaggggctgcgagggttctcctctccttgtgggtgtgaccaggttcggcgcggcggcgggccgcggggggcggggacgattggccgcttgtcgtcgtccgcagcggcgtgaggggagcggcggcggcggcggcggcggccgcagcgtggagccgggtgattgtgaccgccgggggagccgggagccggccgcggcgccctctctccgtgtggccccctgagcggcccccctcccctgcccgggagggaggcggggggcacctggggcccgccatgaaccccggcttcgatttgtcccgccggaacccgcaggaggacttcgagctgattcagcgcatcggcagcggcacctacggcgacgtctacaaggcacggaatgttaacactggtgaattagcagcaattaaagtaataaaattggaaccaggagaagactttgcagttgtgcagcaagaaattattatgatgaaagactgtaaacacccaaatattgttgcttattttggaagctatctcaggcgagataagctttggatttgcatggagttttgtggaggtggttctttacaggatatttatcacgtaactggacctctgtcagaactgcaaattgcatatgttagcagagaaacactgcagggattatattatcttcacagtaaaggaaaaatgcacagagatataaagggagctaacattctattaacggataatggtcatgtgaaattggctgattttggagtatctgcacagataacagctacaattgccaaacggaagtctttcattggcacaccatattggatggctccagaagttgcagctgttgagaggaaggggggttacaatcaactctgtgatctctgggcagtgggaatcactgccatagaacttgcagagcttcagcctcctatgtttgacttacacccaatgagagcattatttctaatgacaaaaagcaattttcagcctcctaaactaaaggataaaatgaaatggtcaaatagttttcatcactttgtgaaaatggcacttaccaaaaatccgaaaaaaagacctactgctgaaaaattattacagcatccttttgtaacacaacatttgacacggtctttggcaatcgagctgttggataaagtaaataatccagatcattccacttaccatgatttcgatgatgatgatcctgagcctcttgttgctgtaccacatagaattcactcaacaagtagaaacgtgagagaagaaaaaacacgctcagagataacctttggccaagtgaaatttgatccacccttaagaaaggagacagaaccacatcatgaacttgatctgcaactggaatatggacaaggacaccaaggtggttactttttaggtgcaaacaagagtcttctcaagtctgttgaagaagaattgcatcagcgaggacacgtcgcacatttagaagatgatgaaggagatgatgatgaatctaaacactcaactctgaaagcaaaaattccacctcctttgccaccaaagcctaagtctatcttcataccacaggaaatgcattctactgaggatgaaaatcaaggaacaatcaagagatgtcccatgtcagggagcccagcaaagccatcccaagttccacctagaccaccacctcccagattacccccacacaaacctgttgccttaggaaatggaatgagctccttccagttaaatggtgaacgagatggctcattatgtcaacaacagaatgaacatagaggcacaaacctttcaagaaaagaaaagaaagatgtaccaaagcctattagtaatggtcttcctccaacacctaaagtgcatatgggtgcatgtttttcaaaagtttttaatgggtgtcccttgaaaattcactgtgcatcatcatggataaacccagatacaagagatcagtacttgatatttggtgccgaagaagggatttataccctcaatcttaatgaacttcatgaaacatcaatggaacagctattccctcgaaggtgtacatggttgtatgtaatgaacaattgcttgctatcaatatctggtaaagcttctcagctttattcccataatttaccagggctttttgattatgcaagacaaatgcaaaagttacctgttgctattccagcacacaaactccctgacagaatactgccaaggaaattttctgtatcagcaaaaatccctgaaaccaaatggtgccagaagtgttgtgttgtaagaaatccttacacgggccataaatacctatgtggagcacttcagactagcattgttctattagaatgggttgaaccaatgcagaaatttatgttaattaagcacatagattttcctataccatgtccacttagaatgtttgaaatgctggtagttcctgaacaggagtaccctttagtttgtgttggtgtcagtagaggtagagacttcaaccaagtggttcggccggtgaagccgtattcagggtgggagtggttttgggttttaaaaacacggcgcgt

SEQ ID NO: 293755 - DNA, 1764 bp, Homo sapiens
agggggaggagcggcgaaagcggaagccatgttggagtttcaccccgagcgaggggctgcgagggttctcctctccttgtgggtgtgaccaggttcggcgcggcggcgggccgcggggggcggggacgattggccgcttgtcgtcgtccgcagcggcgtgaggggagcggcggcggcggcggcggcggccgcagcgtggagccgggtgattgtgaccgccgggggagccgggagccggccgcggcgccctctctccgtgtggccccctgagcggcccccctcccctgcccgggagggaggcggggggcacctggggcccgccatgaaccccggcttcgatttgtcccgccggaacccgcaggaggacttcgagctgattcagcgcatcggcagcggcacctacggcgacgtctacaaggcacggaatgttaacactggtgaattagcagcaattaaagtaataaaattggaaccaggagaagactttgcagttgtgcagcaagaaattattatgatgaaagactgtaaacacccaaatattgttgcttattttggaagctatctcaggcgagataagctttggatttgcatggagttttgtggaggtggttctttacaggatatttatcacgtaactggacctctgtcagaactgcaaattgcatatgttagcagagaaacactgcagggattatattatcttcacagtaaaggaaaaatgcacagagatataaagggagctaacattctattaacggataatggtcatgtgaaattggctgattttggagtatctgcacagataacagctacaattgccaaacggaagtctttcattggcacaccatattggatggctccagaagttgcagctgttgagaggaaggggggttacaatcaactctgtgatctctgggcagtgggaatcactgccatagaacttgcagagcttcagcctcctatgtttgacttacacccaatgagagcattatttctaatgacaaaaagcaattttcagcctcctaaactaaaggataaaatgaaatggtcaaatagttttcatcactttgtgaaaatggcacttaccaaaaatccgaaaaaaagacctactgctgaaaaattattacagcatccttttgtaacacaacatttgacacggtctttggcaatcgagctgttggataaagtaaataatccagatcattccacttaccatgatttcgatgatgatgatcctgaggtaggaattgcttttaccagcgggcatatataacatgtatatgtgtatgtatatatgtgtgtctgtatgtacgtctcaaaatccatttttttaattttggggcctagtttaaataaaaaagctcttgagggaacaattaattctttgtctttgcctttcatggaaagtcaaatgctaggtttttcttactgactacttataggtgactatagtgtgaaaatggcaaaggcatatcatttaatccacttgttgaaatcactgtagttatttcaaaatagccattttcggtgaagttgccaaataatcattcactgtaaaagggaaagcaaatgggaagtgcctaaacaagacatttgaatattcaaaatttcccctcagtttgcttctcaaaaagaatcctcagtttggcctggtggctcatgtctgtaatcccatcactttgggaggctgaagcaagaggattacttgaggccaggagtttgaaacctgcctggtcaacatagcaagaccccgtttctatcttt

SEQ ID NO: 293756 - DNA, 651 bp, Homo sapiens
agggggaggagcggcgaaagcggaagccatgttggagtttcaccccgagcgaggggctgcgagggttctcctctccttgtgggtgtgaccaggttcggcgcggcggcgggccgcggggggcggggacgattggccgcttgtcgtcgtccgcagcggcgtgaggggagcggcggcggcggcggcggcggccgcagcgtggagccgggtgattgtgaccgccgggggagccgggagccggccgcggcgccctctctccgtgtggccccctgagcggcccccctcccctgcccgggagggaggcggggggcacctggggcccgccatgaaccccggcttcgatttgtcccgccggaacccgcaggaggacttcgagctgattcagcgcatcggcagcggcacctacggcgacgtctacaaggcacggaatgttaacactggtgaattagcagcaattaaagtaataaaattggaaccaggagaagactttgcagttgtgcagcaagaaattattatgatgaaagactgtaaacacccaaatattgttgcttattttggaagctatctcaggtatactgtttgtttcccttttgaaaagcaataatgatttcatcacctaatgcattaaacaaaataaagttagttttaatacca

SEQ ID NO: 293757 - DNA, 593 bp, Homo sapiens
gtgtctcttgctaattagcatttcacttctctcatccatgtttgctcagttgattaagaaggcagaggagtataactgaagaagcatcacattgggagacaggagactctgccacaaaggccgggggaccatgggctggtcacccagttcctgggccccaggttccaactctgaaaagagagggttggacacgtgacttataaattcccttccagccttaatgtcctaaaatcatgtaattataactttaaaatattttgcggtggtaaacctaaaatgtttataaaagagagtccataatttagatttttctgcattacctgaatttctgtgacaagatgcagtctttattgtagaaagctgttttatagtattctcatagaattattcggtttttattttccttggtttaatgtatttttgtttctttctctagcacatagattttcctataccatgtccacttagaatgtttgaaatgctggtagttcctgaacaggagtaccctttagtttgtgttggtgtcagtagaggtagagacttcaaccaagtggttcgatttgagacggtcaatccaaattctacctcttcat

SEQ ID NO: 293758 - DNA, 522 bp, Homo sapiens
ggtggatcacgaggtcaggggatcgagaccatcctggctaacatggtgaaaccccgtctctactaaaaatacaaaaaaatcagccgggcgtggtggagggcgcctgtagtcccagctactcgggaggctgaggcagggaaatggtgggaacccagggggtggagattgcagtgagctgagattgcgccactgcactccagcgtgggagacagagcaagactctgcctcaaaaaaaaaaaaaaaaaaaaaaaaaaatcctggttttacttttttttcttttttagttggccaagtgaaatttgatccacccttaagaaaggagacagaaccacatcatgaacttgtaagtagtatagccttagaatgttagcactgaaaataaatgttttaatttgtttttgtgtgatgtattagtactgaccaaaaaagctagtcattaatattttcaaaaacattcgaggtcccagcctggtcaacatagtaagaccctgtctctacaaaaaaatgttaaaacttagttga

SEQ ID NO: 293759 - DNA, 1693 bp, Homo sapiens
ctcccggcagtgcccgagcccggcccgcgggtaccgcccagaaggcgaaggcgccaccaccgccgcagctggccctctggctcccacatccggactcaccggcagctccagccgccgttgcctccgcctccagccgcattgccctcaggcctcgagtcccccactagctccttccgtccaggcacgggctccggcgctagagcagtttgaaaatggcgcggagggacgatcggggccgacacggaggaggcgccgcggttgccccggtaacgggagcggcggacgattagcggctcgcggcggggacgcgcttggcgacgatggcggagccccagtgcccggaaatgcaacggcccggacagcgcgaggccacggcgccccctggaggtcggcgcccgcggccagcaaatgccaaacctcagctggtgcctgagctggcatcctcttcctcctgtcggcgggaggtgtggatcacctactgcgtgcggggaacaaacgccgccccagtaccggtccctgcagcggagtagccttcacctgcaaggtgaacgcctgctcaccacgtaatccccaaacgcagatatcacgttgtctctgcaactttccctgacaaccacccaatgcaattaattatcccacaatagtatctcccgcaggctctctgtagaaccatagaattcatccatcaaaatacaatcatttgttgatccgtctctctctgccgcccccaaatgtgaattccttgagtcagagactattctactcagcaaaacatttgtgagtggaattaaattgaaataaaccgttatagtccactcacagatggaaaacacatagtaaaatcctagaattccatttctcccctgaaaatttcccagacagtcagagggagtttcattctttcctgtttacttttctcccaaataggccttctgaggcagcagaatagggaaggaagtcagaagactgaccagctcatacctatggaatgcctatcatacatacacttaaaattatggcaagctcacgcaggcgcactaagagagaaaaaacaagaaaacagatatgacaattataggaaatcccctccctagagttaaagaagtgtaggaagtgggtataaaagaacaaaggctatattaatccagggctgacaccacttgaagataagcccgttcctctctctggtatattctttgcttaataaattttgtggggtggttatttgtgtgtctcatccaattctttgttcataacaccaagaacctggaactcccaacttccaatctggtaacatattttggtgagccagccaggagggtcaagcctgcaatacctaaagctccagacctggaacccaaagctcccatcagtcgctaccctgtgaacctgtggaggatctgaagtacctgtttaaaaggcatccaaaagatagaatctatcaagctacaaatggctatgttgcctgaagccccagacatcatcctacaagaaataagtccagacttcttaatttccccctggatagagcagggtgatactgtggcctgggtgaagacatcgtatcctctgtgtgtaacagtgataagaaggcttacctcgcagggttattacaagacaaatgaaataactttggcacactattaaaggcttcgtggataattaaagcttcacaaaaaccttaaaaaaattc

SEQ ID NO: 293760 - DNA, 1765 bp, Homo sapiens
ctcccggcagtgcccgagcccggcccgcgggtaccgcccagaaggcgaaggcgccaccaccgccgcagctggccctctggctcccacatccggactcaccggcagctccagccgccgttgcctccgcctccagccgcattgccctcaggcctcgagtcccccactagctccttccgtccaggcacgggctccggcgctagagcagtttgaaaatggcgcggagggacgatcggggccgacacggaggaggcgccgcggttgccccggtaacgggagcggcggacgattagcggctcgcggcggggacgcgcttggcgacgatggcggagccccagtgcccggaaatgcaacggcccggacagcgcgaggccacggcgccccctggaggtcggcgcccgcggccagcaaatgccaaacctcagctggtgcctgagctggcatcctcttcctcctgtcggcgggaggtgtggatcacctactgcgtgcggggaacaaacgccgccccagtaccggtccctgcagcggagtagccttcacctgcaaggtgaacgcctgctcaccacgtaatccccaaacgcagatatcacgttgtctctgcaactttccctgacaaccacccaatgcaattaattatcccacaatagtatctcccgcaggctctctgtagaaccatagaattcatccatcaaaatacaatcatttgttgatccgtctctctctgccgcccccaaatgtgaattccttgagtcagagactattctactcagcaaaacatttgtgagtggaattaaattgaaataaaccgttatagtccactcacagatggaaaacacatagtaaaatcctagaattccatttctcccctgaaaatttcccagacagtcagagggagtttcattctttcctgtttacttttctcccaaataggccttctgaggcagcagaatagggaaggaagtcagaagactgaccagctcatacctatggaatgcctatcatacatacacttaaaattatggcaagctcacgcaggcgcactaagagagaaaaaacaagaaaacagatatgacaattataggaaatcccctccctagagttaaagaagtgtaggaagtgggtataaaagaacaaaggctatattaatccagggctgacaccacttgaagataagcccgttcctctctctggtatattctttgcttaataaattttgtggggtggttatttgtgtgtctcatccaattctttgttcataacaccaagaacctggaactcccaacttccaatctggtaacatattttggtgagccagccaggagggtcaagcctgcaatacctaaagctccagacctggaacccaaagctcccatcagtcgctaccctgtgaacctgtggaggatctgaagtacctgtttaaaaggcatccaaaagatagaatctatcaagctacaaatggctatgttgcctgaagccccagacatcatcctacaagaaataagtccagacttcttaatttccccctggatagagcaggattcgattcagttggaaagacatggttaatgcttaagagagccagaagaacccaaatctttgaacacacttagagcaaccacaaactgctgttagaaaactaatgttaatgtttaagaagtacttgttattttagtttaccttatcaaatttggtcctgtcagcaacatcgagatcagaggcagacatgtttcccatatccaacagggaagatgactgagatctgcgattc

SEQ ID NO: 293761 - DNA, 275 bp, Homo sapiens
ctacagtggtagcagtggtggaagccatggattgtagcagtagtgatgtcatcttgaagccaaaagttcagtgatggccctttgacttctggccctccagcacttccactgattttgtgatactgtggcctgggtgaagacatcgtatcctctgtgtgtaacagtgataagaaggcttacctcgcagggttattacaagacaaatgaaataactttggcacactattaaaggcttcgtggataattaaagcttcacaaaaaccttaaaaaaattc

SEQ ID NO: 293762 - DNA, 2189 bp, Homo sapiens
ctcccggcagtgcccgagcccggcccgcgggtaccgcccagaaggcgaaggcgccaccaccgccgcagctggccctctggctcccacatccggactcaccggcagctccagccgccgttgcctccgcctccagccgcattgccctcaggcctcgagtcccccactagctccttccgtccaggcacgggctccggcgctagagcagtttgaaaatggcgcggagggacgatcggggccgacacggaggaggcgccgcggttgccccggtaacgggagcggcggacgattagcggctcgcggcggggacgcgcttggcgacgatggcggagccccagtgcccggaaatgcaacggcccggacagcgcgaggccacggcgccccctggaggtcggcgcccgcggccagcaaatgccaaacctcagctggtgcctgagctggcatcctcttcctcctgtcggcgggaggtgtggatcacctactgcgtgcggggaacaaacgccgccccagtaccggtccctgcagcggagtagccttcacctgcaaggtgaacgcctgctcaccacgtaatccccaaacgcagatatcacgttgtctctgcaactttccctgacaaccacccaatgcaattaattatcccacaatagtatctcccgcaggctctctgtagaaccatagaattcatccatcaaaatacaatcatttgttgatccgtctctctctgccgcccccaaatgtgaattccttgagtcagagactattctactcagcaaaacatttgtgagtggaattaaattgaaataaaccgttatagtccactcacagatggaaaacacatagtaaaatcctagaattccatttctcccctgaaaatttcccagacagtcagagggagtttcattctttcctgtttacttttctcccaaataggccttctgaggcagcagaatagggaaggaagtcagaagactgaccagctcatacctatggaatgcctatcatacatacacttaaaattatggcaagctcacgcaggcgcactaagagagaaaaaacaagaaaacagatatgacaattataggaaatcccctccctagagttaaagaagtgtaggaagtgggtataaaagaacaaaggctatattaatccagggctgacaccacttgaagataagcccgttcctctctctggtatattctttgcttaataaattttgtggggtggttatttgtgtgtctcatccaattctttgttcataacaccaagaacctggaactcccaacttccaatctggtaacatattttggtgagccagccaggagggtcaagcctgcaatacctaaagctccagacctggaacccaaagctcccatcagtcgctaccctgtgaacctgtggaggatctgaagtacctgtttaaaaggcatccaaaagatagaatctatcaagctacaaatggctatgttgcctgaagccccagacatcatcctacaagaaataagtccagacttcttaatttccccctggatagagcaggggtactccttaatgactttacgaagttcttgtttgttaaatgcaagttggtaacttacttcctcctcccttatgccctgtgccacgcgagcttcaacaccttcaaagaaatgcttcaaggaaatgaaaagaaacaatggctaagacctgcatttattattatttacattaaaaaaatctgattacaaagtagtgtataatcaccatgcaaaaatcagtgtgtgaaagtatagacaataaaataacaatcacttattaacatacttctgagatgaacattgttaatattgtagagttccttgtaatcttttgatgtgtgaatacatacaggagattaaaatttcatgtcccactttacatgtaatactgttttttcctaaatataaattttaatggctgcataatatttcacacaatgtctgaaccacaattattattcattcctctagtactagatatttaacatcccactcccccttctttttttggacttggcaaatctagtgagactttagaaaatctactataaatatatttgtcatagcagggacccactcgggtccctgcactggtaaggagatggagctcgaccaccatccattgtgatgagtcctgcggctgatcctgacccacatggagtccatgttgcaccacct

SEQ ID NO: 293763 - DNA, 624 bp, Homo sapiens
agacctggtgctcctggcacaccggccacgatgttacctgagggacctgcagctgctggaggcccatgccctactgccagcaggtgccaccgtgctggctgaccatgtgctcttccctggtgcaccccgcttcttgcagtatgctaagagctgtggccgctaccgctgccgcctccaccacactggccttccagacttccctgccatcaaggatggaatagctcagctcacctatgctggaccaggctgaggtccaggcccaggggcttttacccagatctgagaaccacaactgctctgggtcagagacaggacattcagaattagagcagagcctcggtccactgcggcccccacacaggccccacctgctagagccactcacctctgaggctggcttgccaataggaaccaggttgttgtctttctccgcgatgctttggagctgtgggcaaaggcacagaggaacaaggccagagcccaagtagggcaggtcaggggcatgggactggcccattctgcccagaagacaacccacacgtgttggggagaagcttcctcccagttctcagggagatacaatccctttcttgtcatctgccatttatgaacttgatccaaata

SEQ ID NO: 293764 - DNA, 424 bp, Homo sapiens
gatgccacagaacccatgcagcagcctcaaggtagggcccactggggtcctggatttcagtttctcctctgtaaagtgagtatgttgtgcccggagaggagacccccagctccagctggctcaaccacatccaccatgctgtgtgactccagatgcatcacaggctgtctctggcccagccccagacagcgggagaagaaagctcaggagtccgtggaaactgcagggacaccgcccctcgtgccctggaagaggctccacagtccacccccagccctccagcttgagttccaccttcgactccactcatgatcacacagggctgggctctctccacgtcccctgcatcgcccaggatggcccagtctccgaggacatccatgtatgcaaaataaaatccctctgctaggcgtgccctgcaaaa

SEQ ID NO: 293765 - DNA, 3780 bp, Homo sapiens
ctcctacttggcgcgccactgtggttggagtagctcagtgttttctccggggtgttggcgtcgccttttgagctacgtttccatcgattcgaacttcgtatctagggaccctgcatgcaagagcgtaacagtttctgtgttacttaaccctactgctgcttgtaatgctgcaaaccggaaaataaccttacatggccttcgtaacatttaatgctccttcccccccttcctcttcccctgggcaatttaccgatgtactgatgacttgtaaatccacgtctccaaaccagacaacatccataaccacagatcagcatattaagaactaatccattttgtccttttagtgttttcatttaaaaagttaaattcacaaacaacagatatattgtactttttttttttttaagttatagtgaagaaatacttggtcccatttcttttcgcctgggaggtatctttccactattagcaatgcgattattgcaaatcatcatatgcagtctatttcatttgcctctggaggggatcctgatactacagactatgttgcctacgtagctaaagatccagttaatcaacgagcctgtcacatatgggaatgccacaagggaatggcccaagacgtcataagtaccatagggcaggcttttgaactccggtttaaacagtacttgaaaaatccttctttgaatacttctggtgaaagtgaggaggtgcatattgatagccatgccgaggagagagaagatcatgaatattacaatgaaattccagggaagcagccaccagtaggtggtgtttcagatatgcggatcaaagttcaagccacggaacaaatggcttactggccccatacagtgtgaaaagttgtgctatttgcctggaaactccaagtgcagcagtgtatatgagaactgtttagaacaaagcagggcaataggtaatgtccatccaagaggggtgcagtcccagcgagatacctcattattgaagcacacgtgccgagtggatctctttgatgacccctgctacattaatacacaggctcttcaaagtacacctggctctgctggaaatcaaaggtcagcccaaccactggggagcccatggcactgcggaaaggcaccagaaactgttcagccgggtgccacagcccagcctgccagctcacattctttgccacacattaagcagcagctgtggagcgaagaatgctatcatggcaagctgagcaggaaggcggcagagagcctcttggtaaaggatggggactttttggttcgagagagtgcaacatcccctggccaatatgtgctgagtggactacagggaggccaagcaaaacatcttctcctggtggatcctgaaggcaaggtgaggaccaaggatcatgtatttgataatgtcggccaccttatcagataccatatggataacagtttgccaatcatctcctctggaagcgaagtaagccttaaacaaccagtgagaaaagataataatccagcacttttgcattccaacaaatgacagtattgaagcaccatcacactgatatttcaagaaaccccattttgtattaggacacaaagataatttaaactttgtttgtagataaaatagagcacaaactgtgaagtgcatctttccaagaccatcatggaccaggtcctctataaaatgaagaactaacaaaaattagtcttcagaaatgaaaatcagaaaagaggaagagggttggtcattttaaaagaaattatatgtatgcacggatgtcactttttaaggccatattgcattgataacaagctaaaagcacaactaaaatttcacatgctaacgacaacttgaatgaactgctggggcagtggtatgtgcctttcaacttgataatttgggggacattttcatattgggagattaattctaagtatcttcatgttctatgactatagaaccatttgccaaaaaaaaaagcttttcttgctacaaaaaataagcaattttcttgagccttattgactttattacattttctgtttagcagcatttttcactgcaatgttaaaataaatatgacattgaattcgaactgtgtgtatgtcagtggaatcaaatcaaaagccactaacatggctgtctgtttcactggactgtcccatttgctggttaaaaggattggggcccaaatcctctggcctagcatttctcagtgtttgctattcagactgtctaaatacagcatgtgacaagctgaagaagccaaatctagcagtcatttctgatttcattatattctccccctcttcctgctaaaaagacaaaaaacaaaaaacaaaaaaacaaaaaaaacctcatgagtgcatggatttaaaagagggcaaacaaaaccagtattcttcatatttactattcaaattggtttcattcttagtaaaagtacagaatctatttgaaattatagtaaaatttcttcttgattggctgacactgaatcatagtttctcacctacatatatccttagcacctcgtatagatatgatcagacaaaatgcagaaggaaaaaaaaaacatattgaatgaagcacttggaaagattttccacatgtagaccaactggtaaactaacagagtgattaagcatggtgtacagaaaagcattacgctgagtcttaccagtgtgaccttcagcaagttgctgaatctgtttgggttccagtttccttggcaataaaatgagctaaatgggctaggtgaatttggaggactacttcagtcctaacttatagtatgagtctctaaaaagcaagtttttcatttgttagaggtcgttattgataaccagtctgtatagttaaggtaaaaaattaagcttttcttctatagtctgtgtccatactcacagaatgaatggcacacctgagatcaacattcacatagtttagactccaaaccattcagtctaaaatactgaaactttggaatatagggaatgatgataaaagtggattggttgagtagcagaaaactacttatgtccttttcttgcctttccaagaaaaatgttttttgttttttttaaatcttgagttatctggatattgccttgactccatttcatttgggctatgtagatacaacttagtcttggtgatggtgatatattggctaagttttaaataaaacttctttgggatagaaatcattagaaaccaagcatactgcactctaatattttactgtaaaggcttatgatttttatttctactgccattaattttttagatggatttgtttcctcttacacaactagaattaatgtatttttcaccagttttccatataccttaggtcttgatcgtttgtccttaaaaaggggatcagcatgagtatagacagtagaaatgtatgggtagtctaaccacttttatcagagacagagcagggctgtggtctcactctagctgagcagagtattaacttggtagcaagagttcctgatacaaatagatgcaatgactgtaaatggtgtcagcagtacacatggataatcagtatttgactgtaatagtatagtagttaaatacagcacttaaaaataccacagacacagttaaagcaaaaggaaacaataaaaggaatgtctgcatgctattttaatctcacattctttatctgtcttaaagtggaaatccatttgcctataaatacctgtaaacgactttaaaaaataaatgattattgctttgtgacaattgacagaatatgtctgatgt

SEQ ID NO: 293766 - DNA, 3494 bp, Homo sapiens
ctcctacttggcgcgccactgtggttggagtagctcagtgttttctccggggtgttggcgtcgccttttgagctacgtttccatcgattcgaacttcgtatctagggaccctgcatgcaagagcttatagtgaagaaatacttggtcccatttcttttcgcctgggaggtatctttccactattagcaatgcgattattgcaaatcatcatatgcagtctatttcatttgcctctggaggggatcctgatactacagactatgttgcctacgtagctaaagatccagttaatcaacgagcctgtcacatatgggaatgccacaagggaatggcccaagacgtcataagtaccatagggcaggcttttgaactccggtttaaacagtacttgaaaaatccttctttgaatacttctggtgaaagtgaggaggtgcatattgatagccatgccgaggagagagaagatcatgaatattacaatgaaattccagggaagcagccaccagtaggtggtgtttcagatatgcggatcaaagttcaagccacggaacaaatggcttactggccccatacagtgtgaaaagttgtgctatttgcctggaaactccaagtgcagcagtgtatatgagaactgtttagaacaaagcagggcaataggtaatgtccatccaagaggggtgcagtcccagcgagatacctcattattgaagcacacgtgccgagtggatctctttgatgacccctgctacattaatacacaggctcttcaaagtacacctggctctgctggaaatcaaaggtcagcccaaccactggggagcccatggcactgcggaaaggcaccagaaactgttcagccgggtgccacagcccagcctgccagctcacattctttgccacacattaagcagcagctgtggagcgaagaatgctatcatggcaagctgagcaggaaggcggcagagagcctcttggtaaaggatggggactttttggttcgagagagtgcaacatcccctggccaatatgtgctgagtggactacagggaggccaagcaaaacatcttctcctggtggatcctgaaggcaaggtgaggaccaaggatcatgtatttgataatgtcggccaccttatcagataccatatggataacagtttgccaatcatctcctctggaagcgaagtaagccttaaacaaccagtgagaaaagataataatccagcacttttgcattccaacaaatgacagtattgaagcaccatcacactgatatttcaagaaaccccattttgtattaggacacaaagataatttaaactttgtttgtagataaaatagagcacaaactgtgaagtgcatctttccaagaccatcatggaccaggtcctctataaaatgaagaactaacaaaaattagtcttcagaaatgaaaatcagaaaagaggaagagggttggtcattttaaaagaaattatatgtatgcacggatgtcactttttaaggccatattgcattgataacaagctaaaagcacaactaaaatttcacatgctaacgacaacttgaatgaactgctggggcagtggtatgtgcctttcaacttgataatttgggggacattttcatattgggagattaattctaagtatcttcatgttctatgactatagaaccatttgccaaaaaaaaaagcttttcttgctacaaaaaataagcaattttcttgagccttattgactttattacattttctgtttagcagcatttttcactgcaatgttaaaataaatatgacattgaattcgaactgtgtgtatgtcagtggaatcaaatcaaaagccactaacatggctgtctgtttcactggactgtcccatttgctggttaaaaggattggggcccaaatcctctggcctagcatttctcagtgtttgctattcagactgtctaaatacagcatgtgacaagctgaagaagccaaatctagcagtcatttctgatttcattatattctccccctcttcctgctaaaaagacaaaaaacaaaaaacaaaaaaacaaaaaaaacctcatgagtgcatggatttaaaagagggcaaacaaaaccagtattcttcatatttactattcaaattggtttcattcttagtaaaagtacagaatctatttgaaattatagtaaaatttcttcttgattggctgacactgaatcatagtttctcacctacatatatccttagcacctcgtatagatatgatcagacaaaatgcagaaggaaaaaaaaaacatattgaatgaagcacttggaaagattttccacatgtagaccaactggtaaactaacagagtgattaagcatggtgtacagaaaagcattacgctgagtcttaccagtgtgaccttcagcaagttgctgaatctgtttgggttccagtttccttggcaataaaatgagctaaatgggctaggtgaatttggaggactacttcagtcctaacttatagtatgagtctctaaaaagcaagtttttcatttgttagaggtcgttattgataaccagtctgtatagttaaggtaaaaaattaagcttttcttctatagtctgtgtccatactcacagaatgaatggcacacctgagatcaacattcacatagtttagactccaaaccattcagtctaaaatactgaaactttggaatatagggaatgatgataaaagtggattggttgagtagcagaaaactacttatgtccttttcttgcctttccaagaaaaatgttttttgttttttttaaatcttgagttatctggatattgccttgactccatttcatttgggctatgtagatacaacttagtcttggtgatggtgatatattggctaagttttaaataaaacttctttgggatagaaatcattagaaaccaagcatactgcactctaatattttactgtaaaggcttatgatttttatttctactgccattaattttttagatggatttgtttcctcttacacaactagaattaatgtatttttcaccagttttccatataccttaggtcttgatcgtttgtccttaaaaaggggatcagcatgagtatagacagtagaaatgtatgggtagtctaaccacttttatcagagacagagcagggctgtggtctcactctagctgagcagagtattaacttggtagcaagagttcctgatacaaatagatgcaatgactgtaaatggtgtcagcagtacacatggataatcagtatttgactgtaatagtatagtagttaaatacagcacttaaaaataccacagacacagttaaagcaaaaggaaacaataaaaggaatgtctgcatgctattttaatctcacattctttatctgtcttaaagtggaaatccatttgcctataaatacctgtaaacgactttaaaaaataaatgattattgctttgtgacaattgacagaatatgtctgatgt

SEQ ID NO: 293767 - DNA, 4800 bp, Homo sapiens
ctcctacttggcgcgccactgtggttggagtagctcagtgttttctccggggtgttggcgtcgccttttgagctacgtttccatcgattcgaacttcgtatctagggaccctgcatgcaagagcgtaacagtttctgtgttacttaaccctactgctgcttgtaatgctgcaaaccggaaaataaccttacatggccttcgtaacatttaatgctccttcccccccttcctcttcccctgggcaatttaccgatgtactgatgacttgtaaatccacgtctccaaaccagacaacatccataaccacagatcagcatattaagaactaatccattttgtccttttagtgttttcatttaaaaagttaaattcacaaacaacagatatattgtactttttttttttttaagttatagtgaagaaatacttggtcccatttcttttcgcctgggaggtatctttccactattagcaatgcggtgtgtattctttgaattctttttatttgcatttacatgtatctttatgtattgacagcaaaatactattttgtgtgttttttaaaaacatgttttacctgtttttaccttcaacttaaaagcctcaggttttaagttgtatatacttatatgaattatatgactgtgtatacttacaggattcaagcacatttcatttattctgcactttatttctattattattacattatagttatgtagaattatacaactcaccataatgtagaatcaatgggagccctgagcttgttttcctgcaactagatggtcccatctgggggtgatgagacacagtgacacccgaggtgtgttccttatgtccggtctattctgtaatctcattttggttgctgttactgtggaaaatcctgcctcacaaagataggatgttgaaaatggaaggaggcttttcagtacttttgtggcaatctcaggatgttccgccttgactttaatcgagaacgtatggagatttgaagttgtctcaaacatacttttaaggccaccgtcatttgcaatatcaagcagttgatcctcttctagcgtggacaaagtggattcacctggcttattcacaaatgggtcacagatccattccgtcttttgtggatgagaagtgtgatggttaatactgagtgtcaacttgattggattgaaggatacaagtattgatcattggtgtgtctgtgagggtgttgccaaaggagattaacatttgagtcagtgggctgcgaaaggcagacccacccttaatctggttgggcacaatctaatcagctgccagcttggctagaatataagcaggcagaaaaatgtgaaaagagagactggcctagcctcccagcctaaatctttctcctgtgttggatgcttcctgccctcgaacattggattcccaagttcttcagtttcagaactcggactggctctcctctctccttagcctgcagacagcctattgtaggaccttgtgatcatattattgcaaatcatcatatgcagtctatttcatttgcctctggaggggatcctgatactacagactatgttgcctacgtagctaaagatccagttaatcaacgagcctgtcacatatgggaatgccacaagggaatggcccaagacgtcataagtaccatagggcaggcttttgaactccggtttaaacagtacttgaaaaatccttctttgaatacttctggtgaaagtgaggaggtgcatattgatagccatgccgaggagagagaagatcatgaatattacaatgaaattccagggaagcagccaccagtaggtggtgtttcagatatgcggatcaaagttcaagccacggaacaaatggcttactggccccatacagtgtgaaaagttgtgctatttgcctggaaactccaagtgcagcagtgtatatgagaactgtttagaacaaagcagggcaataggtaatgtccatccaagaggggtgcagtcccagcgagatacctcattattgaagcacacgtgccgagtggatctctttgatgacccctgctacattaatacacaggctcttcaaagtacacctggctctgctggaaatcaaaggtcagcccaaccactggggagcccatggcactgcggaaaggcaccagaaactgttcagccgggtgccacagcccagcctgccagctcacattctttgccacacattaagcagcagctgtggagcgaagaatgctatcatggcaagctgagcaggaaggcggcagagagcctcttggtaaaggatggggactttttggttcgagagagtgcaacatcccctggccaatatgtgctgagtggactacagggaggccaagcaaaacatcttctcctggtggatcctgaaggcaaggtgaggaccaaggatcatgtatttgataatgtcggccaccttatcagataccatatggataacagtttgccaatcatctcctctggaagcgaagtaagccttaaacaaccagtgagaaaagataataatccagcacttttgcattccaacaaatgacagtattgaagcaccatcacactgatatttcaagaaaccccattttgtattaggacacaaagataatttaaactttgtttgtagataaaatagagcacaaactgtgaagtgcatctttccaagaccatcatggaccaggtcctctataaaatgaagaactaacaaaaattagtcttcagaaatgaaaatcagaaaagaggaagagggttggtcattttaaaagaaattatatgtatgcacggatgtcactttttaaggccatattgcattgataacaagctaaaagcacaactaaaatttcacatgctaacgacaacttgaatgaactgctggggcagtggtatgtgcctttcaacttgataatttgggggacattttcatattgggagattaattctaagtatcttcatgttctatgactatagaaccatttgccaaaaaaaaaagcttttcttgctacaaaaaataagcaattttcttgagccttattgactttattacattttctgtttagcagcatttttcactgcaatgttaaaataaatatgacattgaattcgaactgtgtgtatgtcagtggaatcaaatcaaaagccactaacatggctgtctgtttcactggactgtcccatttgctggttaaaaggattggggcccaaatcctctggcctagcatttctcagtgtttgctattcagactgtctaaatacagcatgtgacaagctgaagaagccaaatctagcagtcatttctgatttcattatattctccccctcttcctgctaaaaagacaaaaaacaaaaaacaaaaaaacaaaaaaaacctcatgagtgcatggatttaaaagagggcaaacaaaaccagtattcttcatatttactattcaaattggtttcattcttagtaaaagtacagaatctatttgaaattatagtaaaatttcttcttgattggctgacactgaatcatagtttctcacctacatatatccttagcacctcgtatagatatgatcagacaaaatgcagaaggaaaaaaaaaacatattgaatgaagcacttggaaagattttccacatgtagaccaactggtaaactaacagagtgattaagcatggtgtacagaaaagcattacgctgagtcttaccagtgtgaccttcagcaagttgctgaatctgtttgggttccagtttccttggcaataaaatgagctaaatgggctaggtgaatttggaggactacttcagtcctaacttatagtatgagtctctaaaaagcaagtttttcatttgttagaggtcgttattgataaccagtctgtatagttaaggtaaaaaattaagcttttcttctatagtctgtgtccatactcacagaatgaatggcacacctgagatcaacattcacatagtttagactccaaaccattcagtctaaaatactgaaactttggaatatagggaatgatgataaaagtggattggttgagtagcagaaaactacttatgtccttttcttgcctttccaagaaaaatgttttttgttttttttaaatcttgagttatctggatattgccttgactccatttcatttgggctatgtagatacaacttagtcttggtgatggtgatatattggctaagttttaaataaaacttctttgggatagaaatcattagaaaccaagcatactgcactctaatattttactgtaaaggcttatgatttttatttctactgccattaattttttagatggatttgtttcctcttacacaactagaattaatgtatttttcaccagttttccatataccttaggtcttgatcgtttgtccttaaaaaggggatcagcatgagtatagacagtagaaatgtatgggtagtctaaccacttttatcagagacagagcagggctgtggtctcactctagctgagcagagtattaacttggtagcaagagttcctgatacaaatagatgcaatgactgtaaatggtgtcagcagtacacatggataatcagtatttgactgtaatagtatagtagttaaatacagcacttaaaaataccacagacacagttaaagcaaaaggaaacaataaaaggaatgtctgcatgctattttaatctcacattctttatctgtcttaaagtggaaatccatttgcctataaatacctgtaaacgactttaaaaaataaatgattattgctttgtgacaattgacagaatatgtctgatgt

SEQ ID NO: 293768 - DNA, 1621 bp, Homo sapiens
ctcctacttggcgcgccactgtggttggagtagctcagtgttttctccggggtgttggcgtcgccttttgagctacgtttccatcgattcgaacttcgtatctagggaccctgcatgcaagagcgtaacagtttctgtgttacttaaccctactgctgcttgtaatgctgcaaaccggaaaataaccttacatggccttcgtaacatttaatgctccttcccccccttcctcttcccctgggcaatttaccgatgtactgatgacttgtaaatccacgtctccaaaccagacaacatccataaccacagatcagcatattaagaactaatccattttgtccttttagtgttttcatttaaaaagttaaattcacaaacaacagatatattgtactttttttttttttaagttatagtgaagaaatacttggtcccatttcttttcgcctgggaggtatctttccactattagcaatgcggtgtgtattctttgaattctttttatttgcatttacatgtatctttatgtattgacagcaaaatactattttgtgtgttttttaaaaacatgttttacctgtttttaccttcaacttaaaagcctcaggttttaagttgtatatacttatatgaattatatgactgtgtatacttacaggattcaagcacatttcatttattctgcactttatttctattattattacattatagttatgtagaattatacaactcaccataatgtagaatcaatgggagccctgagcttgttttcctgcaactagatggtcccatctgggggtgatgagacacagtgacacccgaggtgtgttccttatgtccggtctattctgtaatctcattttggttgctgttactgtggaaaatcctgcctcacaaagataggatgttgaaaatggaaggaggcttttcagtacttttgtggcaatctcaggatgttccgccttgactttaatcgagaacgtatggagatttgaagttgtctcaaacatacttttaaggccaccgtcatttgcaatatcaagcagttgatcctcttctagcgtggacaaagtggattcacctggcttattcacaaatgggtcacagatccattccgtcttttgtggatgagaagtgtgatggttaatactgagtgtcaacttgattggattgaaggatacaagtattgatcattggtgtgtctgtgagggtgttgccaaaggagattaacatttgagtcagtgggctgcgaaaggcagacccacccttaatctggttgggcacaatctaatcagctgccagcttggctagaatataagcaggcagaaaaatgtgaaaagagagactggcctagcctcccagcctaaatctttctcctgtgttggatgcttcctgccctcgaacattggattcccaagttcttcagtttcagaactcggactggctctcctctctccttagcctgcagacagcctattgtaggaccttgtgatcatattattgcaaatcatcatatgcagtctatttcatttgcctctggaggggatcctgtaagtatggattcacagaagttctttttatgagttaaaataacttcttgacatttggggctggatga

SEQ ID NO: 293769 - DNA, 300 bp, Homo sapiens
ttggcttaccccgttttgtctacagaaagctaaacaactcaaccatctgactgctcccatccaaatgtttaacatcacttaagcacagctataaactgaaaacatgaatgcaaagtttttcaggatgatttgcttggttctgatccccttgcatcccttacagtatttgaattttcgcccagcctcttgaggattcttttttccttcacagtgaggaggtgcatattgatagccatgccgaggagagagaagatcatgaatattacaatgaaattccagggaagcagccaccagtaggtg

SEQ ID NO: 293770 - DNA, 1922 bp, Homo sapiens
cgccatgacaggttcctgggccgcgccgcctcgccctgcctgggcggggttgggacctttctggcacctgcgtcgaagccggcggcaggatggactttgttgtcccggtcccagaccaccctcctccaccgtcgcctcccactgcaaaaaggcctggataaggaacctaattcgagctacccttctctgtgaagctcgacggctgagaacgtcagggctcgttcccaagtctctttccagaggccaggctttatgggagcatgggttaccagcgacgcaccctgatcaagcagagaaagagaggctggagaaggaagagtgacagaagtaagaagagagtgtctctccacttccactccagccccctacagctcatcctccagcaggcagccaagggcacttttaggatctcacatcaggtccttgcctcacattctgcactggcttcccaagtaattaaagtaaaatccaaattccagctcacagcttagaaaactcagcaggactggcctctgtcctatcccacaccccacctcagtccctcaagctcatctcctgtcattcctgcccatttctggaccccagccactcctcaaacagggtgaggatgcagtgtccaaggcaccatcttgaactcatcatcgccaaatatgtgagcaccttgatgttggacttcccaacctccagaccgtaaggcagtacatttctttgtaaattacgcagtctcagctattctgttacagcagcacaaatggactaagacaacccccgagataggaaggggtaaggtaaatgcaatgagagttggggttttcgatcttagtccagtaaaggagctggaactgttctgtataaacaaagggcaaggtaattgctacatagattcttttcttattattgctgattcttatcctaaaataaaggacattgccactacacatcctctagaatgaccaaaaataaaaatacagcatcaaatgggacgacatggtgccaactggaattctcataccctgctgatgggagtataatgtggtacagtcactttggaaaaaagtttgacaatttcttataaaattatacataaacctgtactatgacctagagattctactcctgtttgttcaaaagaaaggcaaacatctgtccactaaaagatatgtacaagaatgctcacagtggcattatttatgacggtccaaaccaggagataatccaaatgtctgtaaccaagagaatggataaagaaattttgatacgtcaatttaatggattactacttagcaataaaaataattagccatgctgggcgcggtggcttatgcctgtaatcccagcactttgggaggctgaggcaggtggatcacctgaggttgggagttcaagaccagcctgaccaacatggagaacccccgtctctactaaaatacaaaattagccggggtggtggcgcatgcctgtaatcccagctactcgggaggctgaggcaggagaatcacttgaacccgggaggtggaggttgcattgagccgagattgcgccattgcactccagcatgggcaaaaagagcaaaactccgtctcaaaaaaaataaataaataataattagccacatatccacacaacaatattgcattatcacaggtatagtgataaatactgtatgattccatttatatgaagttcaagaacaggcaagtaatccatgatgaaagaagtacttacctctgggggtggcagcattgactaaagaggtacaagggagtcttctggggcctggaaatgttctatatcttgatctgggtggtggttacacaggtatacgcgtgttaagaaatcatcaggctgtatacttagtgtactgtaatggcattacactgtctttcaattaaaatgtgaaagaaaaaacgggggtgtctttt

SEQ ID NO: 293771 - DNA, 857 bp, Homo sapiens
cgccatgacaggttcctgggccgcgccgcctcgccctgcctgggcggggttgggacctttctggcacctgcgtcgaagccggcggcaggatggactttgttgtcccggtcccagaccaccctcctccaccgtcgcctcccactgcaaaaaggcctggataaggaacctaattcgagctacccttctctgtgaagctcgacggctgagaacgtcagggctcgttcccaagtctctttccagaggccaggctttatgggagcatgggttaccagcgacgcaccctgatcaagcagagaaagagaggctggagaaggaagagtgacagaagtaagaagagagtgtctctccacttccactccagccccctacagctcatcctccagcaggcagccaagggcacttttaggatctcacatcaggtccttgcctcacattctgcactggcttcccaagtaattaaagtaaaatccaaattccagctcacagcttagaaaactcagcaggactggcctctgtcctatcccacaccccacctcagtccctcaagctcatctcctgtcattcctgcccatttctggaccccagccactcctcaaacagggtaagtccattcctgcttcagggcctttgtacgtattgtttcctcttcctggaatcttcttccttgtacagccccagggttttctttttttcatccagatcacagcacagatgtcacatcctggtaacagccagctgtgactcatctccctaattctcaattgtattactctctttttattttcttcgtatcgtaactgatagtctcatacagtacagaagccaagttttaagatatgcaatcaccaaatacctgc

SEQ ID NO: 293772 - DNA, 961 bp, Homo sapiens
  misc_feature (915)..(915): n is a, c, g, or t
  misc_feature (925)..(925): n is a, c, g, or t
gaagacacttcccaaggcgacttcctgtctctccactttctttccctctccgttttggtgggctggttgaagatgaaatccactgaggagggaagtccagcaccctgtgtgccagtccagaactggcccatctgtagaccccctgaaaatcatatgggcttggatttggatattctcaacagaaagggttaaaggctgatggtacctaaagcctggtacttgaattttgatcaagataagctgccttaagttctcttcattacacaaatgatcctagataattgatagatcctgtggttcaactggatttctagatagaagctggattcatgtgatgccagaggagtaaaatttcaagagactgaaaccagatctgagtttcgctgttccagtctggacctctttggtgctgtaaatcctggatatactgtagatgagtactgcgtttttcttttatggactctcttcagcttctggagacctcactatcctattatgtctttgtgtgaagacatgctgctttgtaattatcgaaagtgtcgcatcaaactctctggctatgcatgggtcactgcctgctctcacatcttctgtgatcagcatggcagtggtgagtttagtcgctcaccagctatctgtcctgcctgcaacagtaccctttctggaaagctagatattgtccgcacagaactcagtccatcagaggaatataaagctatggtattggcaggactgcgaccagagatcgtgttggacattagctcccgagcgctggccttctggacatatcaggtactccaggaacgtctctatcaagaatacaatttcagcaaggctgagggccatctgaacagatggggaagatattttcccgaatcaaagcagggtggtaatggcccttgaaggggggctccngagaaagatnaaaaacagaaaaacggtctcgaaataggggccgata

SEQ ID NO: 293773 - DNA, 1341 bp, Homo sapiens
  misc_feature (1076)..(1076): n is a, c, g, or t
  misc_feature (1093)..(1093): n is a, c, g, or t
  misc_feature (1128)..(1128): n is a, c, g, or t
  misc_feature (1153)..(1153): n is a, c, g, or t
  misc_feature (1186)..(1186): n is a, c, g, or t
  misc_feature (1228)..(1228): n is a, c, g, or t
  misc_feature (1236)..(1236): n is a, c, g, or t
  misc_feature (1238)..(1239): n is a, c, g, or t
  misc_feature (1243)..(1243): n is a, c, g, or t
  misc_feature (1258)..(1258): n is a, c, g, or t
  misc_feature (1261)..(1261): n is a, c, g, or t
  misc_feature (1275)..(1275): n is a, c, g, or t
  misc_feature (1279)..(1280): n is a, c, g, or t
  misc_feature (1285)..(1285): n is a, c, g, or t
  misc_feature (1295)..(1295): n is a, c, g, or t
  misc_feature (1301)..(1301): n is a, c, g, or t
  misc_feature (1311)..(1312): n is a, c, g, or t
  misc_feature (1316)..(1316): n is a, c, g, or t
  misc_feature (1319)..(1319): n is a, c, g, or t
  misc_feature (1321)..(1322): n is a, c, g, or t
  misc_feature (1326)..(1326): n is a, c, g, or t
  misc_feature (1332)..(1332): n is a, c, g, or t
gaagacacttcccaaggcgacttcctgtctctccactttctttccctctccgttttggtgggctggttgaagatgaaatccactgaggagggaagtccagcaccctgtgtgccagtccagaactggcccatctgtagaccccctgaaaatcatatgggcttggatttggatattctcaacagaaagggttaaaggctgatggtacctaaagcctggtacttgaattttgatcaagataagctgccttaagttctcttcattacacaaatgatcctagataattgatagatcctgtggttcaactggatttctagatagaagctggattcatgtgatgccagaggagtaaaatttcaagagactgaaaccagatctgagtttcgctgttccagtctggacctctttggtgctgtaaatcctggatatactgtagatgagtactgcgtttttcttttatggactctcttcagcttctggagacctcactatcctattatgtctttgtgtgaagacatgctgctttgtaattatcgaaagtgtcgcatcaaactctctggctatgcatgggtcactgcctgctctcacatcttctgtgatcagcatggcagtggtgagtttagtcgctcaccagctatctgtcctgcctgcaacagtaccctttctggaaagctagatattgtccgcacagaactcagtccatcagaggaatataaagctatggtattggcaggactgcgaccagagatcgtgttggacattagctcccgagcgctggccttctggacatatcagtatttcctttgaaagacctccctgtggatgactttaagcatgtccttgaatgtattgttatatcttacatatacacttatacttcttaaggatgtttgtcatctgtcaagtaactttttattatatttttctggggtctttcacagagcagagatttttaagtttaatgaagtcctgcttatcaattttctctttcacggattatacctttggtgtattttgtcactgccaaatccaagatcacctggattttaccctatgttatcttctgggagtttcatagntttgcattttatgtttnaagtctgtgaaccattttgagtttatttttgtggnccagaggctgttcttagttacttgnctcttgggcctttctgacatgactgcttgcttnctcgcagcaagggagtgtgctcctagtaagacagaccttatngcctaggnanntacntatgaagggcacctngcncatttctgggattntagnnccagncctgccacgncggggntaggagtacnngggngtntnncagngacatnttggggtgg

SEQ ID NO: 293774 - DNA, 994 bp, Homo sapiens
gaagacacttcccaaggcgacttcctgtctctccactttctttccctctccgttttggtgggctggttgaagatgaaatccactgaggagggaagtccagcaccctgtgtgccagtccagaactggcccatctgtagaccccctgaaaatcatatgggcttggatttggatattctcaacagaaagggttaaaggctgatggtacctaaagcctggtacttgaattttgatcaagataagctgccttaagttctcttcattacacaaatgatcctagataattgatagatcctgtggttcaactggatttctagatagaagctggattcatgtgatgccagaggagtaaaatttcaagagactgaaaccagatctgagtttcgctgttccagtctggacctctttggtgctgtaaatcctggatatactgtagatgagtactgcgtttttcttttatggactctcttcagcttctggagacctcactatcctattatgtctttgtgtgaagacatgctgctttgtaattatcgaaagtgtcgcatcaaactctctggctatgcatgggtcactgcctgctctcacatcttctgtgatcagcatggcagtggtgagtttagtcgctcaccagctatctgtcctgcctgcaacagtaccctttctggaaagctagatattgtccgcacagaactcagtccatcagaggaatataaagctatggtattggcaggactgcgaccagagatcgtgttggacattagctcccgagcgctggccttctggacatatcaggtacatcaggaacagtcgtctaatcacagacatacgaactcttcaagcgaaggggctgaagggccatctgaaacacgatggagaagatatatactcagcaaatacaaagcaaaggatgtagacattgaacctgctatgaaaaggggaagggttaccatcccatgcacgaaaagtagctaggacagaactacaaaggaatcag

SEQ ID NO: 293775 - DNA, 1522 bp, Homo sapiens
  misc_feature (1257)..(1257): n is a, c, g, or t
  misc_feature (1274)..(1274): n is a, c, g, or t
  misc_feature (1309)..(1309): n is a, c, g, or t
  misc_feature (1334)..(1334): n is a, c, g, or t
  misc_feature (1367)..(1367): n is a, c, g, or t
  misc_feature (1409)..(1409): n is a, c, g, or t
  misc_feature (1417)..(1417): n is a, c, g, or t
  misc_feature (1419)..(1420): n is a, c, g, or t
  misc_feature (1424)..(1424): n is a, c, g, or t
  misc_feature (1439)..(1439): n is a, c, g, or t
  misc_feature (1442)..(1442): n is a, c, g, or t
  misc_feature (1456)..(1456): n is a, c, g, or t
  misc_feature (1460)..(1461): n is a, c, g, or t
  misc_feature (1466)..(1466): n is a, c, g, or t
  misc_feature (1476)..(1476): n is a, c, g, or t
  misc_feature (1482)..(1482): n is a, c, g, or t
  misc_feature (1492)..(1493): n is a, c, g, or t
  misc_feature (1497)..(1497): n is a, c, g, or t
  misc_feature (1500)..(1500): n is a, c, g, or t
  misc_feature (1502)..(1503): n is a, c, g, or t
  misc_feature (1507)..(1507): n is a, c, g, or t
  misc_feature (1513)..(1513): n is a, c, g, or t
gaagacacttcccaaggcgacttcctgtctctccactttctttccctctccgttttggtgggctggttgaagatgaaatccactgaggagggaagtccagcaccctgtgtgccagtccagaactggcccatctgtagaccccctgaaaatcatatgggcttggatttggatattctcaacagaaagggttaaaggctgatggtacctaaagcctggtacttgaattttgatcaagataagctgccttaagttctcttcattacacaaatgatcctagataattgatagatcctgtggttcaactggatttctagatagaagctggattcatgtgatgccagaggagtaaaatttcaagagactgaaaccagatctgagtttcgctgttccagtctggacctctttggtgctgtaaatcctggatatactgtagatgagtactgcgtttttcttttatgccggagctgcggcccgcaactccctcagcctggcaggtcccaggatgcttcggggcaaccccacgcatgcgcgctctggcgtagttccctgaagcactcgctcgcagagaatcctggaatcttcgcttgtggagctgtggaggcaacggagtttttccgcgctttttctttcagcctcagagactctcttcagcttctggagacctcactatcctattatgtctttgtgtgaagacatgctgctttgtaattatcgaaagtgtcgcatcaaactctctggctatgcatgggtcactgcctgctctcacatcttctgtgatcagcatggcagtggtgagtttagtcgctcaccagctatctgtcctgcctgcaacagtaccctttctggaaagctagatattgtccgcacagaactcagtccatcagaggaatataaagctatggtattggcaggactgcgaccagagatcgtgttggacattagctcccgagcgctggccttctggacatatcagtatttcctttgaaagacctccctgtggatgactttaagcatgtccttgaatgtattgttatatcttacatatacacttatacttcttaaggatgtttgtcatctgtcaagtaactttttattatatttttctggggtctttcacagagcagagatttttaagtttaatgaagtcctgcttatcaattttctctttcacggattatacctttggtgtattttgtcactgccaaatccaagatcacctggattttaccctatgttatcttctgggagtttcatagntttgcattttatgtttnaagtctgtgaaccattttgagtttatttttgtggnccagaggctgttcttagttacttgnctcttgggcctttctgacatgactgcttgcttnctcgcagcaagggagtgtgctcctagtaagacagaccttatngcctaggnanntacntatgaagggcacctngcncatttctgggattntagnnccagncctgccacgncggggntaggagtacnngggngtntnncagngacatnttggggtgg

SEQ ID NO: 293776 - DNA, 714 bp, Homo sapiens
gaagacacttcccaaggcgacttcctgtctctccactttctttccctctccgttttggtgggctggttgaagatgaaatccactgaggagggaagtccagcaccctgtgtgccagtccagaactggcccatctgtagaccccctgaaaatcatatgggcttggatttggatattctcaacagaaagggttaaaggctgatggtacctaaagcctggtacttgaattttgatcaagataagctgccttaagttctcttcattacacaaatgatcctagataattgatagatcctgtggttcaactggatttctagatagaagctggattcatgtgatgccagaggagtaaaatttcaagagactgaaaccagatctgagtttcgctgttccagtctggacctctttggtgctgtaaatcctggatatactgtagatgagtactgcgtttttcttttatgacggagggtcgctcttgttgccgtggctggagtgcaatggtgcgatctcggctcactgcaacctttgcctcgtgggttcaagtgattctcctgcctcagctacttaggaggttgaggctgggaggatcacttgagcccaggagtctgaggctttagtgatctaagatcatgccactgcactccagcctgggcaacagagtgagaccctgtttctaaaaaaaaataaagataatttagctaactttaaaaaaaaaaa

SEQ ID NO: 293777 - DNA, 1140 bp, Homo sapiens
  misc_feature (875)..(875): n is a, c, g, or t
  misc_feature (892)..(892): n is a, c, g, or t
  misc_feature (927)..(927): n is a, c, g, or t
  misc_feature (952)..(952): n is a, c, g, or t
  misc_feature (985)..(985): n is a, c, g, or t
  misc_feature (1027)..(1027): n is a, c, g, or t
  misc_feature (1035)..(1035): n is a, c, g, or t
  misc_feature (1037)..(1038): n is a, c, g, or t
  misc_feature (1042)..(1042): n is a, c, g, or t
  misc_feature (1057)..(1057): n is a, c, g, or t
  misc_feature (1060)..(1060): n is a, c, g, or t
  misc_feature (1074)..(1074): n is a, c, g, or t
  misc_feature (1078)..(1079): n is a, c, g, or t
  misc_feature (1084)..(1084): n is a, c, g, or t
  misc_feature (1094)..(1094): n is a, c, g, or t
  misc_feature (1100)..(1100): n is a, c, g, or t
  misc_feature (1110)..(1111): n is a, c, g, or t
  misc_feature (1115)..(1115): n is a, c, g, or t
  misc_feature (1118)..(1118): n is a, c, g, or t
  misc_feature (1120)..(1121): n is a, c, g, or t
  misc_feature (1125)..(1125): n is a, c, g, or t
  misc_feature (1131)..(1131): n is a, c, g, or t
agctcggtaccctcataggttcgcagggatcaagataagctgccttaagttctcttcattacacaaatgatcctagataattgatagatcctgtggttcaactggatttctagatagaagctggattcatgtgatgccagaggagtaaaatttcaagagactgaaaccagatctgagtttcgctgttccagtctggacctctttggtgctgtaaatcctggatatactgtagatgagtactgcgtttttcttttatggactctcttcagcttctggagacctcactatcctattatgtctttgtgtgaagacatgctgctttgtaattatcgaaagtgtcgcatcaaactctctggctatgcatgggtcactgcctgctctcacatcttctgtgatcagcatggcagtggtgagtttagtcgctcaccagctatctgtcctgcctgcaacagtaccctttctggaaagctagatattgtccgcacagaactcagtccatcagaggaatataaagctatggtattggcaggactgcgaccagagatcgtgttggacattagctcccgagcgctggccttctggacatatcagtatttcctttgaaagacctccctgtggatgactttaagcatgtccttgaatgtattgttatatcttacatatacacttatacttcttaaggatgtttgtcatctgtcaagtaactttttattatatttttctggggtctttcacagagcagagatttttaagtttaatgaagtcctgcttatcaattttctctttcacggattatacctttggtgtattttgtcactgccaaatccaagatcacctggattttaccctatgttatcttctgggagtttcatagntttgcattttatgtttnaagtctgtgaaccattttgagtttatttttgtggnccagaggctgttcttagttacttgnctcttgggcctttctgacatgactgcttgcttnctcgcagcaagggagtgtgctcctagtaagacagaccttatngcctaggnanntacntatgaagggcacctngcncatttctgggattntagnnccagncctgccacgncggggntaggagtacnngggngtntnncagngacatnttggggtgg

SEQ ID NO: 293778 - DNA, 1288 bp, Homo sapiens
  misc_feature (1023)..(1023): n is a, c, g, or t
  misc_feature (1040)..(1040): n is a, c, g, or t
  misc_feature (1075)..(1075): n is a, c, g, or t
  misc_feature (1100)..(1100): n is a, c, g, or t
  misc_feature (1133)..(1133): n is a, c, g, or t
  misc_feature (1175)..(1175): n is a, c, g, or t
  misc_feature (1183)..(1183): n is a, c, g, or t
  misc_feature (1185)..(1186): n is a, c, g, or t
  misc_feature (1190)..(1190): n is a, c, g, or t
  misc_feature (1205)..(1205): n is a, c, g, or t
  misc_feature (1208)..(1208): n is a, c, g, or t
  misc_feature (1222)..(1222): n is a, c, g, or t
  misc_feature (1226)..(1227): n is a, c, g, or t
  misc_feature (1232)..(1232): n is a, c, g, or t
  misc_feature (1242)..(1242): n is a, c, g, or t
  misc_feature (1248)..(1248): n is a, c, g, or t
  misc_feature (1258)..(1259): n is a, c, g, or t
  misc_feature (1263)..(1263): n is a, c, g, or t
  misc_feature (1266)..(1266): n is a, c, g, or t
  misc_feature (1268)..(1269): n is a, c, g, or t
  misc_feature (1273)..(1273): n is a, c, g, or t
  misc_feature (1279)..(1279): n is a, c, g, or t
gaagacacttcccaaggcgacttcctgtctctccactttctttccctctccgttttggtgggctggttgaagatgaaatccactgaggagggaagtccagcaccctgtgtgccagtccagaactggcccatctgtagaccccctgaaaatcatatgggcttggatttggatattctcaacagaaagggttaaaggctgatggtacctaaagcctggtacttgaattttgatcaagataagctgccttaagttctcttcattacacaaatgatcctagataattgatagatcctgtggttcaactggatttctagatagaagctggattcatgtgatgccagaggacctctttggtgctgtaaatcctggatatactgtagatgagtactgcgtttttcttttatggactctcttcagcttctggagacctcactatcctattatgtctttgtgtgaagacatgctgctttgtaattatcgaaagtgtcgcatcaaactctctggctatgcatgggtcactgcctgctctcacatcttctgtgatcagcatggcagtggtgagtttagtcgctcaccagctatctgtcctgcctgcaacagtaccctttctggaaagctagatattgtccgcacagaactcagtccatcagaggaatataaagctatggtattggcaggactgcgaccagagatcgtgttggacattagctcccgagcgctggccttctggacatatcagtatttcctttgaaagacctccctgtggatgactttaagcatgtccttgaatgtattgttatatcttacatatacacttatacttcttaaggatgtttgtcatctgtcaagtaactttttattatatttttctggggtctttcacagagcagagatttttaagtttaatgaagtcctgcttatcaattttctctttcacggattatacctttggtgtattttgtcactgccaaatccaagatcacctggattttaccctatgttatcttctgggagtttcatagntttgcattttatgtttnaagtctgtgaaccattttgagtttatttttgtggnccagaggctgttcttagttacttgnctcttgggcctttctgacatgactgcttgcttnctcgcagcaagggagtgtgctcctagtaagacagaccttatngcctaggnanntacntatgaagggcacctngcncatttctgggattntagnnccagncctgccacgncggggntaggagtacnngggngtntnncagngacatnttggggtgg

SEQ ID NO: 293779 - DNA, 772 bp, Homo sapiens
gtgagtgtgcgcttaattttgctctctaattgttttgaatttctcttccatttgagttatatacccaggtggcaggcctttatttcaagtcggcataggagtgtgtgtgagtcgcaaggagattaatttcggctgtgtggaggttgggagaaggcagtgaaatgctcttcctggcttgtttccacgtgggcctctgcagtactgggtttgccttccgtctccgagtcctggtgacccaggaacaatagactgtgcttcatgtgcacagtgcgtgtgttcttggaaaacgccggcttcattttgcttggcgggaaagatattatcatcctaatgctgttttgatttatatctccctgggtgaggtcagatttcgggagaaggcgttcagctcagtagagtttaattctccggtgagtgtctagagggcccaggtccttactgggtttgtggaagctgcagcgtaccttgtctttctcctggccttcgctcagatcatttcggctttcttggtgaacctgggcagcaaactctgaagacagataagccttaaaaggagctcctaatttttaatgttgccactgtggtgattgtgtccttaaaagctatggaaaaagattagggaccttagttcagggcaagcctctagatttaaattccagcgccacagtttacagctctggtgaccttgggagaagcagtgagccattccgaggcttagctttccaagatcagataaaatatataaaaactaggctctagttggtgtgtaata

SEQ ID NO: 293780 - DNA, 440 bp, Homo sapiens
aatgcatgtttgtaatgcagactcaaggaaaattataatttccttaaatgtgtatagaggatgtgtgagagtggaaagatgtctattccaaggtggataaaaaataaaatggtggactacctcaacatggaggtgccagctgtccaattacagctgtcactctgtttctgggaatttctcccgattcttagccggagctgcggcccgcaactccctcagcctggcaggtcccaggatgcttcggggcaaccccacgcatgcgcgctctggcgtagttccctgaagcactcgctcgcagagaatcctggaatcttcgcttgtggagctgtggaggcaacggagtttttccgcgctttttctttcagcctcagattaagtatcatttgttactattattttctctactgagcgtggaaagctggctgaaaattccagagtgt

SEQ ID NO: 293781 - DNA, 4393 bp, Homo sapiens
  misc_feature (1041)..(1041): n is a, c, g, or t
  misc_feature (1382)..(1382): n is a, c, g, or t
  misc_feature (1548)..(1548): n is a, c, g, or t
  misc_feature (2914)..(2914): n is a, c, g, or t
  misc_feature (3164)..(3164): n is a, c, g, or t
  misc_feature (4034)..(4034): n is a, c, g, or t
cccaggagttctgggcgagctgcagcctaggggcctggaaggccaggaagacttgaaggatctgtgttggtaggcctggagtttggctaacgtggggatgatttggattctgagatgcagatacattgcctttttggtatccaatttgaaaagtagcaaccattttgctatcccaaagaacatccatggaggctttcaacaaataatatgctcacctgtttcagggaattatctatatcccttaagtggattttcgatcttgtgtttctgagggcaagcagttaagaagggaagatgaacataaagtagggaagagcaaaaatgagttggaacctaagacacgagctggtcattctttcactgtctccaactttaaagatatgagtatccttgctagaggagctgacactttttgccacaggactagacacacacacagctcaggaatcaaaaaaggtgaaggaagactcagggaaaagcttctgccccatcccaacaaggtgaaccagctgattggtgacaaagtagatgagccgcagtagcacctagtgtccctgcaccaccgtttcaagtataaaactggagggatgcttcagttctccccttcaagacttacacaaccatgtctctgttgggctattctaaccagaaacaaaaggaaaggaaattctgggaaacatagtttagcttagcaaagttgatatattacaaaattaccactgtccactctgcatcgagttgacatccatacagacctctttaaaacacactttcaaaataaagtccacaccctacacataagctatctctagagaaatttgaagtctgttgtgcactgaggataaccacaacaacaaactgtaaacctagcccaatttctgactagactgataccaccgaaccactgctatgcactcaagagcactaaaggcctagcagaaggaaagacacactcatctccaagcataaaaacaatctttacttcatactgtgaagagagaattgaaaaaataatttaagcaaaaaaaatacaacatgacnaacttttaacagaaagaaaaaaagacgcatacagaaaggcaagaaaaaacacagtccaaagagataaaacaatcattagaaccagattcataagacatagacattagaaatatgagagaattttaaataactgtgattaatgtgatgaaggccctaaggggaaaggtgaacaaaatgcaagctcagatgggtgattttagcaaatagatggaaactatcaggaaaaataaaatggaaactataaaaataaaaaatataataatagagatgaagaatgccctccatgggcccattaggagactgaacacagttgaggaaaaaatcagacttgaaggtaggtnaatagaaattgctgaaacacacacacacacacacacaaaaagagtgacagaaacagaacacagcatccaagactggtgggaaaatatcaacatcaaatcaagaaataggcgcagtggctcacccctgtaatcccagcacttggggaggccgaggcaggcagatcangaggtcaggagatcgagaccatcctagctaacgcagtgaaaccccgtctctactaaaaattcaaaaaaattagccgggcatggtagcaggcacctgtcgtcccagctactcgggaggctgaggtaagagaattgcgtgaacccgggaggcggagcttgcagtgagctgagatcacaccactgcactccagcctgggcgacagagcaagactctatctcaaaaaaaaaaaaaaaatcaagaaataatggctgagaatttccaaaatttgtaagacaccaaaccaatccaaggagctcagagaacacagagcaggataaattctttaaaaagaaactaagcttattgtattcaaactaagcttattgtattgatacctggtagttataacttaccaaatacactgcccaacatctccagatgatctattatttctgaaagtttcctttattacatttcttacttcagggagatatagccttcgcttcatgttatggttggtgcagtcagtattctcagaaagaaagtactggttccattttacctccatcttttgtttcctgtcagaaaacctaccataccaccaagtactccttctctacactgcctctgatatttaagtaatttgagaattctgttgagactatctcccttttttggtatgatgaatctggtcctaaattgcatgccaaagactttgagaactaaactgtagacccagatctcatgtcccagactggccttttgttacccacacaatgaatgggttaaattgcttggcaggggacagtccaatgaccacaaccaaggaggatttcccagggggattttattacttgcgataagtaaggaggacactgggaataattccccaaagcaatgcctccctgagcaatggtgcaaacatggcttttattagtctggttagctgagtcattgtatgtagaggtggagtcaaggcagcgcagtcccagttgtcggttatgctgctacatatgtcacatgtatagaaaatggtgaataagctcctccttggacaggattttaagtatggtgatgaggaaagttggccaaagttcatctccaactcaggcatctctgggtccaactggtctttgtttttcctgggctaagcttcttcctggaactttttaaaacaaaaattcaagatgtaacagttacaagtgtgtaactttttcacagtgcgtacccaaaacccaaggaccctgggttacactttaggtgccacccatgtgggacctatcagaagagtactacaaaggctttgaaaactgaactgacattggaaccacaaccctcagaaggctggtcaaaacttatgacttgaacccaaatgggttaattaccntttaaaacataaatatcaacatcctccaccaaatttaaccaagacccagagcatcctaatgacattcaaaatgtccaggatacaatcgatattaattggcaggtgaagaaccaggaaaatctcaactcacgttgggaaaaaatgtaacagatgcagaatgtaagttgccacacatgttggaattatcaagactataaagctgctattcaaatggaaagtttaaaagtctcagagaagtaatagaaaatanaaagaatagccccatggaaattttagaacgggaaaatacaaaaaccgtcatcacatcatatccggggcacatgctgtcaacattgctcatcactgttgatgttaaccttgatcacccggctgaggtagtatttgatgggtttctccctgtaaagttattctttcccctccccctattttactgtttagtgggaagtcactatgtgcagcccatgcctaaaaagggagtagttggtgggcacggtggctcacgcctgtaatcccagcactttgggaggctgagtgggtggatcacctgaggtcaggagttcgagaccagcttggccgacatggtgaaaccccgtctctgctaaaaatacaaaaattagccaggcatggtggtgcacgcctgtaatcccagctattcaggaggctgaggcaggagaactgcttgaacctgggaggcagagattgcagtgatcctgccattgcactccagcctgggcgatgagcaaaattccatctcaaaagaaaaaaaagtgagtagttatatttcccctccttgcggtggagtatctacattcttctgcatgagaaatttgtcagttatctcctatttattcaattatttatattatgaattcatggattcctattttatactttgggtataatccaatactatgttgtttattttactgctcagattattcctgtgttggccattgggaactttttcagttgacatctgtgtccctttgacaaactcctgtcattttgtggggaagagggagtagcactttcttactttctaccgctacaaaatcctccagtcttatcttgtatttctcttccctaaccctaaagtcaatcattctcatttctctaatgntaaatgatgttaaacatcttttcatatgctttcttattatctgtatatcttctctgatgattaccaaggatgggaagggtagtagggggaaagtggagatggttaatgggtacaaaaaatagaatgaataagaattagtagttgatagcacaacagggtgattacagtcaaaaataattgtacattataaaataactagtataattggattatttataacaaaggctgaaggcttgaggtgataaataccccatttaccctgatgtgactattacacattgcatacctgtatcaaaataccttgtataccccataaatatataacctactatgtacccatttaaataaaaaaagttttt

SEQ ID NO: 293782 - DNA, 1259 bp, Homo sapiens
cggccttcctgtacagcgacggccagtccgagaccatccttggcggcctggggctccgaatgggcagcagcgactgcagagtgaaaattgctaccaaggccaatccatggattgggaactccctgaagcctgacagtgtccgatcccagctggagacgtcactgaagcggctgcagtgtccctgagtggacctcttctatctacatgcacctgaccacagcgccccggtggaagagacactgcgtgcctgccaccagctgcaccaggagggcaagttcgtggagcttggcctctccaactatgccgcctgggaagtggccgagatctgtaccctctgcaagagcaacggctggatcctgcccactgtgtaccagcttctggaaggagcaccacttcgagggcattgccctggtggagaaggccctgcaggccgcgtatggcgccagcgctcccagcatgacctcggccgccctccggtggatgtaccaccactcacagctgcagggtgcccacggggacgcggtcatcctgggcatgtccagcctggagcagctggagcagaacttggcagcggcagaggaagggcccctggagccggctgtcgtggacgcctttaatcaagcctggcatttggttgcccacgaatgtcccaactacttcatctaagctcattgtggctcaggctgcccaaggcttttctgtcaactcttttgctctctcccgctttgtctaatttagaactgcctcactaaattcttagggatggaagtatttggaaaaaaacctaacagtagagtcaccacctaaggaagaataaaatctcccagggtgctgtgtgttagtctgtttgcgttgctataaaagaatacctgagactgggtcatgtataaagaaaagaggtttctttggctcacagttctgcagtctgtacaagagggtgtggtgccggcatctgctcttggtgagggcctcaggaagcttagaatcatggcagaaggggaaacggagccagcgtgtcacatggtgagagagggagcaagagacagacaggggaggaaattcacacactgatggtggggatgtaaaatggtacaaccagtttggaaaacagtttggcagtttctcaaaggattaaacataaaattaccataggattcagcagttccacttgtgggtatgtagcccagagaaatgaaaacatatctccccaccttgggtatgagatttcacattatcattgctcataatagcccgtaagt

SEQ ID NO: 293783 - DNA, 4969 bp, Homo sapiens
cgcgcacccggagaaacagttttatacagaaatgcaacaagtagtacccggggtctgcagagcgccccgcgccgcctgacttggccgggcgaagcccgcctgcagagacccgggccggcctccggacaaaggacggaggaggggctggacggcgctgcgaagtccgaaagaggccatttagcgactctggccaggctaaggggaatgcagaggagacacagagccggcgggccaagaggacgatccggccgctgcacgcagggcgggaggcgatggaggctgcccgcgccttgcgcctcctgctcgtggtgtgcggctgcctcgcgctcccgccgctggccgagcccgtgtgcccggagcgctgcgactgccagcatccccagcatctcctgtgcaccaacagggggctccgcgtagtgcccaagaccagctcgctgccgagcccccacgacgtgctcacctacagcctcggcggcaacttcataaccaacatcacggccttcgacttccaccgtctggggcagctcagacggctggacctgcagtacaaccagatccgctctctgcaccccaagaccttcgagaagctctcgcggctggaagagctgtacctggggaacaacctcttgcaggcgctcgccccgggcacgctggccccgctgcgcaagctgcgcatcctctacgccaacgggaacgagatcagccgcctaagccgcggctccttcgagggcctggagagtctagtcaagctgcggctggacgggaacgccctgggggcgctgccggacgcggtcttcgctcccttgggcaacctgctctacctacatctggagtccaaccggatccgctttctgggcaagaacgccttcgcccagctaggcaagctgcgcttcctcaacctctctgccaacgagctacagccctccctgcgccacgcggccaccttcgcaccgctgcgctccctctcctccctcatcctctcggccaacagcctgcagcacctcgggccgcgcatcttccagcacctgccacgtctcggcctgctctcgctcaggggcaaccagctcacgcacctcgcgcctgaggccttttggggcttggaggccctgcgcgagctgcgcctggagggtaatcggctgagccagctgccaactgcgctgctggagcctctgcacagcctggaggcgctggacctgagcggcaatgagctgtccgccctgcacccggccaccttcggccacctgggccggctgcgcgagctcagcctgcgcaacaacgcgctcagcgccctatccggggacatcttcgccgccagcccagccctttatcggctggatctagacggcaacggctggacctgcgactgccggctgcgaggcctgaagcgctggatgggcgactggcactcgcagggccggctcctcactgtcttcgtgcagtgtcgccaccccccggccctgcgaggcaaatacctggattacctggatgaccagcagctgcaaaatggatcctgcgcggatccctcgccctcagcttccctgaccgctgaccgcaggcggcagcccctacccacggccgcaggggaggagatgacgccacctgcaggtctcgcggaggagctgccgccgcagccgcagctccagcagcaggggcgatttctagctggggtggcctgggatggggccgccagggagctggtaggcaaccgcagcgctctaaggctgagtcggcggggcccgggcctccagcagcccagcccctccgtcgctgccgccgcgggcccggctccacagtccctagacctgcacaagaagccccagcggggccgtccgactcgggcagatcccgccctcgcggagcccaccccaacggcctctcctggctctgcgccatcgcccgccggcgacccctggcagcgcgcgacgaagcatcgtctgggcacggagcaccaggagcgtgccgcccagtccgacggtggggccgggctgccgccgctggtgtccgacccatgcgacttcaacaagttcattctgtgcaacctgacggtggaggcggtgggcgcagacagcgcctcggtgcgctgggccgtgcgcgagcaccgcagtccccggccgctgggcggcgcgcgcttccgcctgctctttgaccgctttggccagcagcccaagttccaccgcttcgtctacctgcctgagagcagcgactcggccacgctgcgcgagctgcgcggggacaccccctacctggtgtgcgtggagggcgtgcttgggggccgtgtctgccctgtggctccccgggaccactgcgcggggctggtcaccctaccggaggccgggagccggggcggcgtcgactaccagctgctgaccttggccctgctgacggtcaacgcgctgctggtgctcctggccttggcggcctgggcgtctcgctggctgcgtaggaaactgcgggctaggcggaagggcggggccccggtccacgttcggcacatgtactccacccgacggcccctgcgctccatgggcaccggcgtgtccgccgacttctcgggattccagtcgcaccggccacgcaccaccgtgtgcgcgctcagtgaggcggacctcatcgaattcccctgcgaccgcttcatggacagtgcgggcggcggcgcgggcggcagcctgagacgggaggaccgtctcctgcagcgatttgccgactaggtccagggcatatagagaccatctcattggccctaaggagccgcctctccgtgaggcccaccagcccacctcaggggaagtgccgttttgtgcacttgccagagaggccggtggggacagagggccaattcgggcaccatcccccaattcccaatactcgagaagtaaatggatggtacttggtggtcagagccagagtaggggacaaatggatggtgggatgctgaggtcggaggcttcgcttggaggctttgacacagctatgcgaatggcttttgtagcactgcaatgcagaagccaggctttgggggtagaaagggggtgcttgtgcccccaacatggccagaaatatttgggtgcatgctttttgtttgctcagtgtcaaacagagaagttttgtttctatttaaggaaggaacttattaccattacaaaggaggcttggccagggactccactggtttggtgatctctgccaagaagggggatgtaaacaggtggtaaagtttaacatacccgccaaggaactcgtttatgttggctgatagagcattcaggataccttaaagtttaataagagacgcatttttttttttcaaaaatgtgaaaagctctgacatttaacgaactgaccaatagactcaaggactgttttagttggactgggccattttattatgttccttttaatattaacagtacaagagcgcttgctgacttcgaggataactaagattacatactttctcaggagaaggctgcatgcaagacttctctgtcagggttgctcctgtggcttttttaattttatttttttaaacctatatatggaaaaggaaatttcaatgccagatttgataaaagaatgtgatgtatatgtagctgatgacccactggggaacaccagtgttccagttcacttaccacatctgtgacagtgtgtttagattggaataaatgtgatgcattacttcttatgtttttatcagtgacatggttgactgtgccctaattctcttgagttgcagttaagcaatgaaggttatttcctaatagggaagcaaaaggtgattgtcaattgatagtttaatgtttgaccacattagtgtctttatatgaaatagtagaggggaagaaattatagaaaacaaatgtgaaaaaaatacaccagtgggtatctgttctactaaaaccagaagattgttatgagtacttaaacctcactgtgaaataatgatatattttgcaattaatccctccccaactgagtgtcttactgtgttattaaatcttatcttttagttaatagttgcagtatttcttttaaatgtttttgttttaaacttaggggtaggatcctttatttgttcagttgtttccaactatttgggatactttcattccctgctatttatgaagtacatgtttatcactaagtgtagtggtttggtttacattaataattttatgtgtggtctaaaaatgcagtcactaagagaatgtacactgtggttatggtcacagtggttatggatttattggcagtggagtaccatggaggtcactgcaatggtgctaaggctgacagtggaatcttctgtttagggccttaagcccctgagggtcctggtgactcagggaatccatcacagccccgggtctttcaccccagttcactccttttatgtttggcctagattgacccatgcctgccctcttctcaacagctgagtagggaaccagccatctgaatgagctgatcgttgtttatgttcaaatgagtaaatgtccagaccacttaaaactacagctgcttttctggcagtctcgtctgcggggccaaaacttaataaaccacaggaaatagactgtcattcttagtttgctgccagggcttattttagattgagagcatactggtacatgagagcagtagtgttgtttgctcttattttcaaccagggagctatctggcaccttttgtgctcctggcttttttcaatcatagcactattgcatctcctagctatttcttttgcccagcagggtaatattgagtcccattgcaagtatggacaaggcctctggttctcctcaccacccaccttttcagccatagaacatcactgaaaatgcctaatgcctggatctgtgttctactttagtttcactgggaagtctttcagtgggagatgaataaatgttatacattgttatgtccagttatgtcaataaacccactaatagagataaaaaaaaaa

SEQ ID NO: 293784 - DNA, 4915 bp, Homo sapiens
cgcgcacccggagaaacagttttatacagaaatgcaacaagtagtacccggggtctgcagagcgccccgcgccgcctgacttggccgggcgaagcccgcctgcagagacccgggccggcctccggacaaaggacggaggaggggctggacggcgctgcgaagtccgaaagaggccatttagcgactctggccaggctaaggggaatgcagaggagacacagagccggcgggccaagaggacgatccggccgctgcacgcagggcgggaggcgatggaggctgcccgcgccttgcgcctcctgctcgtggtgtgcggctgcctcgcgctcccgccgctggccgagcccgtgtgcccggagcgctgcgactgccagcatccccagcatctcctgtgcaccaacagggggctccgcgtagtgcccaagaccagctcgctgccgagcccccacgacgtgctcacctacagcctcggcggcaacttcataaccaacatcacggccttcgacttccaccgtctggggcagctcagacggctggacctgcagtacaaccagatccgctctctgcaccccaagaccttcgagaagctctcgcggctggaagagctgtacctggggaacaacctcttgcaggcgctcgccccgggcacgctggccccgctgcgcaagctgcgcatcctctacgccaacgggaacgagatcagccgcctaagccgcggctccttcgagggcctggagagtctagtcaagctgcggctggacgggaacgccctgggggcgctgccggacgcggtcttcgctcccttgggcaacctgctctacctacatctggagtccaaccggatccgctttctgggcaagaacgccttcgcccagctaggcaagctgcgcttcctcaacctctctgccaacgagctacagccctccctgcgccacgcggccaccttcgcaccgctgcgctccctctcctccctcatcctctcggccaacagcctgcagcacctcgggccgcgcatcttccagcacctgccacgtctcggcctgctctcgctcaggggcaaccagctcacgcacctcgcgcctgaggccttttggggcttggaggccctgcgcgagctgcgcctggagggtaatcggctgagccagctgccaactgcgctgctggagcctctgcacagcctggaggcgctggacctgagcggcaatgagctgtccgccctgcacccggccaccttcggccacctgggccggctgcgcgagctcagcctgcgcaacaacgcgctcagcgccctatccggggacatcttcgccgccagcccagccctttatcggctggatctagacggcaacggctggacctgcgactgccggctgcgaggcctgaagcgctggatgggcgactggcactcgcagggccggctcctcactgtcttcgtgcagtgtcgccaccccccggccctgcgaggcaaatacctggattacctggatgaccagcagctgcaaaatggatcctgcgcggatccctcgccctcagcttccctgaccgctgaccgcaggcggcagcccctacccacggccgcaggggaggagatgacgccacctgcaggtctcgcggaggagctgccgccgcagccgcagctccagcagcaggggcgatttctagctggggtggcctgggatggggccgccagggagctggtaggcaaccgcagcgctctaaggctgagtcggcggggcccgggcctccagcagcccagcccctccgtcgctgccgccgcgggcccggctccacagtccctagacctgcacaagaagccccagcggggccgtccgactcgggcagatcccgccctcgcggagcccaccccaacggcctctcctggctctgcgccatcgcccgccggcgacccctggcagcgcgcgacgaagcatcgtctgggcacggagcaccaggagcgtgccgcccagtccgacggtggggccgggctgccgccgctggtgtccgacccatgcgacttcaacaagttcattctgtgcaacctgacggtggaggcggtgggcgcagacagcgcctcggtgcgctgggccgtgcgcgagcaccgcagtccccggccgctgggcggcgcgcgcttccgcctgctctttgaccgctttggccagcagcccaagttccaccgcttcgtctacctgcctgagagcagcgactcggccacgctgcgcgagctgcgcggggacaccccctacctggtgtgcgtggagggcgtgcttgggggccgtgtctgccctgtggctccccgggaccactgcgcggggctggtcaccctaccggaggccgggagccggggcggcgtcgactaccagctgctgaccttggccctgctgacggtcaacgcgctgctggtgctcctggccttggcggcctgggcgtctcgctggctgcgtaggaaactgcgggctaggcggaagggcggggccccggtccacgttcggcacatgtactccacccgacggcccctgcgctccatgggcaccggcgtgtccgccgacttctcgggattccagtcgcaccggccacgcaccaccgtgtgcgcgctcagtgaggcggacctcatcgaattcccctgcgaccgcttcatggacagtgcgggcggcggcgcgggcggcagcctgagacgggaggaccgtctcctgcagcgatttgccgactaggtccagggcatatagagaccatctcattggccctaaggagccgcctctccgtgaggcccaccagcccacctcaggggaagtgccgttttgtgcacttgccagagaggccggtggggacagagggccaattcgggcaccatcccccaattcccaatactcgagaagtaaatggatggtacttggtggtcagagccagagtaggggacaaatggatggtgggatgctgaggtcggaggcttcgcttggaggctttgacacagctatgcgaatggcttttgtagcactgcaatgcagaagccaggctttgggggtagaaagggggtgcttgtgcccccaacatggccagaaatatttgggtgcatgctttttgtttgctcagtgtcaaacagagaagttttgtttctatttaaggaaggaacttattaccattacaaaggaggcttggccagggactccactggtttggtgatctctgccaagaagggggatgtaaacaggtggtaaagtttaacatacccgccaaggaactcgtttatgttggctgatagagcattcaggataccttaaagtttaataagagacgcatttttttttttcaaaaatgtgaaaagctctgacatttaacgaactgaccaatagactcaaggactgttttagttggactgggccattttattatgttccttttaatattaacagtacaagagcgcttgctgacttcgaggataactaagattacatactttctcaggagaaggctgcatgcaagacttctctgtcagggttgctcctgtggcttttttaattttatttttttaaacctatatatggaaaaggaaatttcaatgccagatttgataaaagaatgtgatgtatatgtagctgatgacccactggggaacaccagtgttccagttcacttaccacatctgtgacagtgtgtttagattggaataaatgtgatgcattacttcttatgtttttatcagtgacatggttgactgtgccctaattctcttgagttgcagttaagcaatgaaggttatttcctaatagggaagcaaaaggtgattgtcaattgatagtttaatgtttgaccacattagtgtctttatatgaaatagtagaggggaagaaattatagaaaacaaatgtgaaaaaaatacaccagtgggtatctgttctactaaaaccagaagattgttatgagtacttaaacctcactgtgaaataatgatatattttgcaattaatccctccccaactgagtgtcttactgtgttattaaatcttatcttttagttaatagttgcagtatttcttttaaatgtttttgttttaaacttaggggtaggatcctttatttgttcagttgtttccaactatttgggatactttcattccctgctatttatgaagtacatgtttatcactaagtgtagtggtttggtttacattaataattttatgtgtggtctaatttattggcagtggagtaccatggaggtcactgcaatggtgctaaggctgacagtggaatcttctgtttagggccttaagcccctgagggtcctggtgactcagggaatccatcacagccccgggtctttcaccccagttcactccttttatgtttggcctagattgacccatgcctgccctcttctcaacagctgagtagggaaccagccatctgaatgagctgatcgttgtttatgttcaaatgagtaaatgtccagaccacttaaaactacagctgcttttctggcagtctcgtctgcggggccaaaacttaataaaccacaggaaatagactgtcattcttagtttgctgccagggcttattttagattgagagcatactggtacatgagagcagtagtgttgtttgctcttattttcaaccagggagctatctggcaccttttgtgctcctggcttttttcaatcatagcactattgcatctcctagctatttcttttgcccagcagggtaatattgagtcccattgcaagtatggacaaggcctctggttctcctcaccacccaccttttcagccatagaacatcactgaaaatgcctaatgcctggatctgtgttctactttagtttcactgggaagtctttcagtgggagatgaataaatgttatacattgttatgtccagttatgtcaataaacccactaatagagataaaaaaaaaa

SEQ ID NO: 293785 - DNA, 4013 bp, Homo sapiens
cgcgcacccggagaaacagttttatacagaaatgcaacaagtagtacccggggtctgcagagcgccccgcgccgcctgacttggccgggcgaagcccgcctgcagagacccgggccggcctccggacaaaggacggaggaggggctggacggcgctgcgaagtccgaaagaggccatttagcgactctggccaggctaaggggaatgcagaggagacacagagccggcgggccaagaggacgatccggccgctgcacgcagggcgggaggcgatggaggctgcccgcgccttgcgcctcctgctcgtggtgtgcggctgcctcgcgctcccgccgctggccgagcccgtgtgcccggagcgctgcgactgccagcatccccagcatctcctgtgcaccaacagggggctccgcgtagtgcccaagaccagctcgctgccgagcccccacgacgtgctcacctacagcctcggcggcaacttcataaccaacatcacggccttcgacttccaccgtctggggcagctcagacggctggacctgcagtacaaccagatccgctctctgcaccccaagaccttcgagaagctctcgcggctggaagagctgtacctggggaacaacctcttgcaggcgctcgccccgggcacgctggccccgctgcgcaagctgcgcatcctctacgccaacgggaacgagatcagccgcctaagccgcggctccttcgagggcctggagagtctagtcaagctgcggctggacgggaacgccctgggggcgctgccggacgcggtcttcgctcccttgggcaacctgctctacctacatctggagtccaaccggatccgctttctgggcaagaacgccttcgcccagctaggcaagctgcgcttcctcaacctctctgccaacgagctacagccctccctgcgccacgcggccaccttcgcaccgctgcgctccctctcctccctcatcctctcggccaacagcctgcagcacctcgggccgcgcatcttccagcacctgccacgtctcggcctgctctcgctcaggggcaaccagctcacgcacctcgcgcctgaggccttttggggcttggaggccctgcgcgagctgcgcctggagggtaatcggctgagccagctgccaactgcgctgctggagcctctgcacagcctggaggcgctggacctgagcggcaatgagctgtccgccctgcacccggccaccttcggccacctgggccggctgcgcgagctcagcctgcgcaacaacgcgctcagcgccctatccggggacatcttcgccgccagcccagccctttatcggctggatctagacggcaacggctggacctgcgactgccggctgcgaggcctgaagcgctggatgggcgactggcactcgcagggccggctcctcactgtcttcgtgcagtgtcgccaccccccggccctgcgaggcaaatacctggattacctggatgaccagcagctgcaaaatggatcctgcgcggatccctcgccctcagcttccctgaccgctgaccgcaggcggcagcccctacccacggccgcaggggaggagatgacgccacctgcaggtctcgcggaggagctgccgccgcagccgcagctccagcagcaggggcgatttctagctggggtggcctgggatggggccgccagggagctggtaggcaaccgcagcgctctaaggctgagtcggcggggcccgggcctccagcagcccagcccctccgtcgctgccgccgcgggcccggctccacagtccctagacctgcacaagaagccccagcggggccgtccgactcgggcagatcccgccctcgcggagcccaccccaacggcctctcctggctctgcgccatcgcccgccggcgacccctggcagcgcgcgacgaagcatcgtctgggcacggagcaccaggagcgtgccgcccagtccgacggtggggccgggctgccgccgctggtgtccgacccatgcgacttcaacaagttcattctgtgcaacctgacggtggaggcggtgggcgcagacagcgcctcggtgcgctgggccgtgcgcgagcaccgcagtccccggccgctgggcggcgcgcgcttccgcctgctctttgaccgctttggccagcagcccaagttccaccgcttcgtctacctgcctgagagcagcgactcggccacgctgcgcgagctgcgcggggacaccccctacctggtgtgcgtggagggcgtgcttgggggccgtgtctgccctgtggctccccgggaccactgcgcggggctggtcaccctaccggaggccgggagccggggcggcgtcgactaccagctgctgaccttggccctgctgacggtcaacgcgctgctggtgctcctggccttggcggcctgggcgtctcgctggctgcgtaggaaactgcgggctaggcggaagggcggggccccggtccacgttcggcacatgtactccacccgacggcccctgcgctccatgggcaccggcgtgtccgccgacttctcgggattccagtcgcaccggccacgcaccaccgtgtgcgcgctcagtgaggcggacctcatcgaattcccctgcgaccgcttcatggacagtgcgggcggcggcgcgggcggcagcctgagacgggaggaccgtctcctgcagcgatttgccgactaggtccagggcatatagagaccatctcattggccctaaggagccgcctctccgtgaggcccaccagcccacctcaggggaagtgccgttttgtgcacttgccagagaggccggtggggacagagggccaattcgggcaccatcccccaattcccaatactcgagaagtaaatggatggtacttggtggtcagagccagagtaggggacaaatggatggtgggatgctgaggtcggaggcttcgcttggaggctttgacacagctatgcgaatggcttttgtagcactgcaatgcagaagccaggctttgggggtagaaagggggtgcttgtgcccccaacatggccagaaatatttgggtgcatgctttttgtttgctcagtgtcaaacagagaagttttgtttctatttaaggaaggaacttattaccattacaaaggaggcttggccagggactccactggtttggtgatctctgccaagaagggggatgtaaacaggtggtaaagtttaacatacccgccaaggaactcgtttatgttggctgatagagcattcaggataccttaaagtttaataagagacgcatttttttttttcaaaaatgtgaaaagctctgacatttaacgaactgaccaatagactcaaggactgttttagttggactgggccattttattatgttccttttaatattaacagtacaagagcgcttgctgacttcgaggataactaagattacatactttctcaggagaaggctgcatgcaagacttctctgtcagggttgctcctgtggcttttttaattttatttttttaaacctatatatggaaaaggaaatttcaatgccagatttgataaaagaatgtgatgtatatgtagctgatgacccactggggaacaccagtgttccagttcacttaccacatctgtgacagtgtgtttagattggaataaatgtgatgcattacttcttatgtttttatcagtgacatggttgactgtgccctaattctcttgagttgcagttaagcaatgaaggttatttcctaatagggaagcaaaaggtgattgtcaattgatagtttaatgtttgaccacattagtgtctttatatgaaatagtagaggggaagaaattatagaaaacaaatgtgaaaaaaatacaccagtgggtatctgttctactaaaaccagaagattgttatgagtacttaaacctcactgtgaaataatgatatattttgcaattaatccctccccaactgagtgtcttactgtgttattaaatcttatcttttagtta

SEQ ID NO: 293786 - DNA, 866 bp, Homo sapiens
  misc_feature (8)..(8): n is a, c, g, or t
  misc_feature (46)..(46): n is a, c, g, or t
gtttgttntggttttcaaataaatataaatatgatatatatagganctaatatagtaatgcaccatgtaacaaagcctagttcagtccatggcttttaattctcttaacactatagataaggattgtgttacagttgctagtagcggctgccattgggcagccgagtcactgcaatggtgctaaggctgacagtggaatcttctgtttagggccttaagcccctgagggtcctggtgactcagggaatccatcacagccccgggtctttcaccccagttcactccttttatgtttggcctagattgacccatgcctgccctcttctcaacagctgagtagggaaccagccatctgaatgagctgatcgttgtttatgttcaaatgagtaaatgtccagaccacttaaaactacagctgcttttctggcagtctcgtctgcggggccaaaacttaataaaccacaggaaatagactgtcattcttagtttgctgccagggcttattttagattgagagcatactggtacatgagagcagtagtgttgtttgctcttattttcaaccagggagctatctggcaccttttgtgctcctggcttttttcaatcatagcactattgcatctcctagctatttcttttgcccagcagggtaatattgagtcccattgcaagtatggacaaggcctctggttctcctcaccacccaccttttcagccatagaacatcactgaaaatgcctaatgcctggatctgtgttctactttagtttcactgggaagtctttcagtgggagatgaataaatgttatacattgttatgtccagttatgtcaataaacccactaatagagataaaaaaaaaa

SEQ ID NO: 293787 - DNA, 2036 bp, Homo sapiens
gcagaaggaggaaggacagcacagctgacagccgtgctcaggaagattctggagcctaggctcatctccacagaggagaacacgcagggagcagagaccatggggcccctctcagcccctccctgcacacagcatataacctggaaagggctcctgctcacagcatcacttttaaacttctggaacccgcccaccacagcccaagtcacgattgaagcccagccaccaaaagtttctgaggggaaggatgttcttctacttgtccacaatttgccccagaatcttactggctacatctggtacaaaggacaaatcagggacctctaccattatgttacatcatatgtagtagacggtcaaataattaaatatgggcctgcatacagtggacgagaaacagtatattccaatgcatccctgctgatccagaatgtcacccaggaagacacaggatcctacactttacacatcataaagcgaggtgatgggactggaggagtaactggacgtttcaccttcaccttatacctggagactcccaaaccctccatctccagcagcaatttcaaccccagggaggccacggaggctgtgatcttaacctgtgatcctgagactccagatgcaagctacctgtggtggatgaatggtcagagcctccctatgactcacagcttgcagctgtctgaaaccaacaggaccctctacctatttggtgtcacaaactatactgcaggaccctatgaatgtgaaatacggaacccagtgagtgccagccgcagtgacccagtcaccctgaatctcctcccgaagctgcccaagccctacatcaccatcaataacttaaaccccagggagaataaggatgtctcaaccttcacctgtgaacctaagagtgagaactacacctacatttggtggctaaatggtcagagcctcccggtcagtcccagggtaaagcgacgcattgaaaacaggatcctcattctacccagtgtcacgagaaatgaaacaggaccctatcaatgtgaaatacgggaccgatatggtggcatccgcagtgacccagtcaccctgaatgtcctctatggtccagacctccccagaatttacccttcattcacctattaccattcaggacaaaacctctacttgtcctgctttgcggactctaacccaccggcacagtattcttggacaattaatgggaagtttcagctatcaggacaaaagctttctatcccccagattactacaaagcatagcgggctctatgcttgctctgttcgtaactcagccactggcaaggaaagctccaaatccgtgacagtcagagtctctgactggacattaccctgaattctactagttcctccaattccatcttctcccatggaacctcaaagagcaagacccactctgttccagaagccctataagtcagagttggacaactcaatgtaaatttcatgggaaaatccttgtacctgatgtctgagccactcagaactcaccaaaatgttcaacaccataacaacagctgctcaaactgtaaacaaggaaaacaagttgatgacttcacactgtggacagtttttcccaagatgtcagaataagactccccatcatgatgaggctctcacccctcttagctgtccttgcttgtgcctgcctctttcacttggcaggataatgcagtcattagaatttcacatgtagtataggagcttctgagggtaacaacagagtgtcagatatgtcatctcaacctcagacttttacataacatctcaggaggaaatgtggctctctccatcttgcatacagggctcccaatagaaatgaacacagagatattgcctgtgtgtttgcagagaagatggtttctataaagagtaggaaagctgaaattatagtagagtcccctttaaatgcacattgtgtggatggctctcaccatttcctaagagatacattgtaaaacgtgacagtaagactgattctagcagaataaaacatgtactacatttgctaaa

SEQ ID NO: 293788 - DNA, 289 bp, Homo sapiens
gcagaaggaggaaggacagcacagctgacagccgtgctcaggaagattctggagcctaggctcatctccacagaggagaacacgcagggagcagagaccatggggcccctctcagcccctccctgcacacagcatataacctggaaagggctcctgctcacagcgtcacttttaaacttctggaacccgcccaccacagccgcgtagtcagatcgagccgcgtagtcagatcgagccgcgtagtcagatcgagccgcgtagtcagatcgagccgcgtagtcagatcgag

SEQ ID NO: 293789 - DNA, 2725 bp, Homo sapiens
  misc_feature (96)..(96): n is a, c, g, or t
  misc_feature (112)..(112): n is a, c, g, or t
  misc_feature (128)..(129): n is a, c, g, or t
  misc_feature (142)..(142): n is a, c, g, or t
  misc_feature (151)..(151): n is a, c, g, or t
  misc_feature (153)..(153): n is a, c, g, or t
  misc_feature (157)..(157): n is a, c, g, or t
  misc_feature (194)..(194): n is a, c, g, or t
  misc_feature (204)..(204): n is a, c, g, or t
  misc_feature (222)..(222): n is a, c, g, or t
ggtctatgaggcaggacactggaggacgattcagtgtgactgggtcactgcggctggcactccctgagttccatatttcacattcatagggtcctncagtatactttgtgcnccaaatagaaagaggnncctgttggtttcngacagctgnancctntgagtcatagggaggctctgaccattcatccaccacnggtagcttgngtccggagtctcaggatnacaggttaagatcacagtttccatggccaccaaaagtttctgaggggaaggatgttcttctacttgtccacaatttgccccagaatcttactggctacatctggtacaaaggacaaatcagggacctctaccattatgttacatcatatgtagtagacggtcaaataattaaatatgggcctgcatacagtggacgagaaacagtatattccaatgcatccctgctgatccagaatgtcacccaggaagacacaggatcctacactttacacatcataaagcgaggtgatgggactggaggagtaactggacgtttcaccttcaccttatacctggagactcccaaaccctccatctccagcagcaatttcaaccccagggaggccacggaggctgtgatcttaacctgtgatcctgagactccagatgcaagctacctgtggtggatgaatggtcagagcctccctatgactcacagcttgcagctgtctgaaaccaacaggaccctctacctatttggtgtcacaaactatactgcaggaccctatgaatgtgaaatacggaacccagtgagtgccagccgcagtgacccagtcaccctgaatctcctccgtgagtatcttctgttcctctgtgagccaggctgccatcccaaatacaagtggccagaggccaggcctctcagtccctctcaggtccaagtacagagacctttatccctgaacatcaaagctggccatgactttctgctccaggcaaaccagagtaggcctaggcttgatcaacaataagagagaagaggcttctcctgtcatgggagactcaggttccacagcttgtgatggaagaaacaggtgaatgtctcaggctccagatcagtgaacacagcggggatttggctgggacttcagtgttgcaacttggctcacagggtcactgtgactgtgtcccttccacagaccaggattttcccttccctctgacaatatcgcctgtgacattattctctttgctccgcatggcctggatgctcccaccgttttcttcctcatacacctattaccatacaggggaagtccccaagctttcctggcctcacagattctcacccactggcagagcattcttggctgattgatgggaagttccagcaatcagcacaagtgttctttataccccaaatcactaaaacatatagaggggtctatgtctgtttcatccataactcagccactggtggaacaaatctcataatcaagaggatcatagtccctgcgaagctgcccaagccctacatcaccatcaataacttaaaccccagggagaataaggatgtctcaaccttcacctgtgaacctaagagtgagaactacacctacatttggtggctaaatggtcagagcctcccggtcagtcccagggtaaagcgacgcattgaaaacaggatcctcattctacccagtgtcacgagaaatgaaacaggaccctatcaatgtgaaatacgggaccgatatggtggcatccgcagtgacccagtcaccctgaatgtcctctatggtccagacctccccagaatttacccttcattcacctattaccattcaggacaaaacctctacttgtcctgctttgcggactctaacccaccggcacagtattcttggacaattaatgggaagtttcagctatcaggacaaaagctttctatcccccagattactacaaagcatagcgggctctatgcttgctctgttcgtaactcagccactggcaaggaaagctccaaatccgtgacagtcagagtctctgactggacattaccctgaattctactagttcctccaattccatcttctcccatggaacctcaaagagcaagacccactctgttccagaagccctataagtcagagttggacaactcaatgtaaatttcatgggaaaatccttgtacctgatgtctgagccactcagaactcaccaaaatgttcaacaccataacaacagctgctcaaactgtaaacaaggaaaacaagttgatgacttcacactgtggacagtttttcccaagatgtcagaataagactccccatcatgatgaggctctcacccctcttagctgtccttgcttgtgcctgcctctttcacttggcaggataatgcagtcattagaatttcacatgtagtataggagcttctgagggtaacaacagagtgtcagatatgtcatctcaacctcagacttttacataacatctcaggaggaaatgtggctctctccatcttgcatacagggctcccaatagaaatgaacacagagatattgcctgtgtgtttgcagagaagatggtttctataaagagtaggaaagctgaaattatagtagagtcccctttaaatgcacattgtgtggatggctctcaccatttcctaagagatacattgtaaaacgtgacagtaagactgattctagcagaataaaacatgtactacatttgctaaa

SEQ ID NO: 293790 - DNA, 2214 bp, Homo sapiens
gcagaaggaggaaggacagcacagctgacagccgtgctcaggaagattctggagcctaggctcatctccacagaggagaacacgcagggagcagagaccatggggcccctctcagcccctccctgcacacagcatataacctggaaagggctcctgctcacagcatcacttttaaacttctggaacccgcccaccactgtctgaaaccaacaggaccctctacctatttggtgtcacaaactatactgcaggaccctatgaatgtgaaatacggaacccagtgagtgccagccgcagtgacccagtcaccctgaatctcctccgtgagtatcttctgttcctctgtgagccaggctgccatcccaaatacaagtggccagaggccaggcctctcagtccctctcaggtccaagtacagagacctttatccctgaacatcaaagctggccatgactttctgctccaggcaaaccagagtaggcctaggcttgatcaacaataagagagaagaggcttctcctgtcatgggagactcaggttccacagcttgtgatggaagaaacaggtgaatgtctcaggctccagatcagtgaacacagcggggatttggctgggacttcagtgttgcaacttggctcacagggtcactgtgactgtgtcccttccacagaccaggattttcccttccctctgacaatatcgcctgtgacattattctctttgctccgcatggcctggatgctcccaccgttttcttcctcatacacctattaccatacaggggaagtccccaagctttcctggcctcacagattctcacccactggcagagcattcttggctgattgatgggaagttccagcaatcagcacaagtgttctttataccccaaatcactaaaacatatagaggggtctatgtctgtttcatccataactcagccactggtggaacaaatctcataatcaagaggatcatagtccctgcgaagctgcccaagccctacatcaccatcaataacttaaaccccagggagaataaggatgtctcaaccttcacctgtgaacctaagagtgagaactacacctacatttggtggctaaatggtcagagcctcccggtcagtcccagggtaaagcgacgcattgaaaacaggatcctcattctacccagtgtcacgagaaatgaaacaggaccctatcaatgtgaaatacgggaccgatatggtggcatccgcagtgacccagtcaccctgaatgtcctctatggtccagacctccccagaatttacccttcattcacctattaccattcaggacaaaacctctacttgtcctgctttgcggactctaacccaccggcacagtattcttggacaattaatgggaagtttcagctatcaggacaaaagctttctatcccccagattactacaaagcatagcgggctctatgcttgctctgttcgtaactcagccactggcaaggaaagctccaaatccgtgacagtcagagtctctgactggacattaccctgaattctactagttcctccaattccatcttctcccatggaacctcaaagagcaagacccactctgttccagaagccctataagtcagagttggacaactcaatgtaaatttcatgggaaaatccttgtacctgatgtctgagccactcagaactcaccaaaatgttcaacaccataacaacagctgctcaaactgtaaacaaggaaaacaagttgatgacttcacactgtggacagtttttcccaagatgtcagaataagactccccatcatgatgaggctctcacccctcttagctgtccttgcttgtgcctgcctctttcacttggcaggataatgcagtcattagaatttcacatgtagtataggagcttctgagggtaacaacagagtgtcagatatgtcatctcaacctcagacttttacataacatctcaggaggaaatgtggctctctccatcttgcatacagggctcccaatagaaatgaacacagagatattgcctgtgtgtttgcagagaagatggtttctataaagagtaggaaagctgaaattatagtagagtcccctttaaatgcacattgtgtggatggctctcaccatttcctaagagatacattgtaaaacgtgacagtaagactgattctagcagaataaaacatgtactacatttgctaaa

SEQ ID NO: 293791 - DNA, 2139 bp, Homo sapiens
gtgaggcaggacactgtgggaggcagtcgctgtgatcttaacctgtgatcctgagactccagatgcaagctacctgtggtggatgaatggtcagagcctccctatgactcacagcttgcagctgtctgaaaccaacaggaccctctacctatttggtgtcacaaactatactgcaggaccctatgaatgtgaaatacggaacccagtgagtgccagccgcagtgacccagtcaccctgaatctcctccgtgagtatcttctgttcctctgtgagccaggctgccatcccaaatacaagtggccagaggccaggcctctcagtccctctcaggtccaagtacagagacctttatccctgaacatcaaagctggccatgactttctgctccaggcaaaccagagtaggcctaggcttgatcaacaataagagagaagaggcttctcctgtcatgggagactcaggttccacagcttgtgatggaagaaacaggtgaatgtctcaggctccagatcagtgaacacagcggggatttggctgggacttcagtgttgcaacttggctcacagggtcactgtgactgtgtcccttccacagaccaggattttcccttccctctgacaatatcgcctgtgacattattctctttgctccgcatggcctggatgctcccaccgttttcttcctcatacacctattaccatacaggggaagtccccaagctttcctggcctcacagattctcacccactggcagagcattcttggctgattgatgggaagttccagcaatcagcacaagtgttctttataccccaaatcactaaaacatatagaggggtctatgtctgtttcatccataactcagccactggtggaacaaatctcataatcaagaggatcatagtccctgcgaagctgcccaagccctacatcaccatcaataacttaaaccccagggagaataaggatgtctcaaccttcacctgtgaacctaagagtgagaactacacctacatttggtggctaaatggtcagagcctcccggtcagtcccagggtaaagcgacgcattgaaaacaggatcctcattctacccagtgtcacgagaaatgaaacaggaccctatcaatgtgaaatacgggaccgatatggtggcatccgcagtgacccagtcaccctgaatgtcctctatggtccagacctccccagaatttacccttcattcacctattaccattcaggacaaaacctctacttgtcctgctttgcggactctaacccaccggcacagtattcttggacaattaatgggaagtttcagctatcaggacaaaagctttctatcccccagattactacaaagcatagcgggctctatgcttgctctgttcgtaactcagccactggcaaggaaagctccaaatccgtgacagtcagagtctctgactggacattaccctgaattctactagttcctccaattccatcttctcccatggaacctcaaagagcaagacccactctgttccagaagccctataagtcagagttggacaactcaatgtaaatttcatgggaaaatccttgtacctgatgtctgagccactcagaactcaccaaaatgttcaacaccataacaacagctgctcaaactgtaaacaaggaaaacaagttgatgacttcacactgtggacagtttttcccaagatgtcagaataagactccccatcatgatgaggctctcacccctcttagctgtccttgcttgtgcctgcctctttcacttggcaggataatgcagtcattagaatttcacatgtagtataggagcttctgagggtaacaacagagtgtcagatatgtcatctcaacctcagacttttacataacatctcaggaggaaatgtggctctctccatcttgcatacagggctcccaatagaaatgaacacagagatattgcctgtgtgtttgcagagaagatggtttctataaagagtaggaaagctgaaattatagtagagtcccctttaaatgcacattgtgtggatggctctcaccatttcctaagagatacattgtaaaacgtgacagtaagactgattctagcagaataaaacatgtactacatttgctaaa

SEQ ID NO: 293792 - DNA, 924 bp, Homo sapiens
gagcgtcagaggatcccctgctgacagacatgccctctacttgtcctgctttgcggactctaacccaccggcacagtattcttggacaattaatgggaagtttcagctatcaggacaaaagctttctatcccccagattactacaaagcatagcgggctctatgcttgctctgttcgtaactcagccactggcaaggaaagctccaaatccgtgacagtcagagtctctgactggacattaccctgaattctactagttcctccaattccatcttctcccatggaacctcaaagagcaagacccactctgttccagaagccctataagtcagagttggacaactcaatgtaaatttcatgggaaaatccttgtacctgatgtctgagccactcagaactcaccaaaatgttcaacaccataacaacagctgctcaaactgtaaacaaggaaaacaagttgatgacttcacactgtggacagtttttcccaagatgtcagaataagactccccatcatgatgaggctctcacccctcttagctgtccttgcttgtgcctgcctctttcacttggcaggataatgcagtcattagaatttcacatgtagtataggagcttctgagggtaacaacagagtgtcagatatgtcatctcaacctcagacttttacataacatctcaggaggaaatgtggctctctccatcttgcatacagggctcccaatagaaatgaacacagagatattgcctgtgtgtttgcagagaagatggtttctataaagagtaggaaagctgaaattatagtagagtcccctttaaatgcacattgtgtggatggctctcaccatttcctaagagatacattgtaaaacgtgacagtaagactgattctagcagaataaaacatgtactacatttgctaaa

SEQ ID NO: 293793 - DNA, 978 bp, Homo sapiens
  misc_feature (96)..(96): n is a, c, g, or t
  misc_feature (112)..(112): n is a, c, g, or t
  misc_feature (128)..(129): n is a, c, g, or t
  misc_feature (142)..(142): n is a, c, g, or t
  misc_feature (151)..(151): n is a, c, g, or t
  misc_feature (153)..(153): n is a, c, g, or t
  misc_feature (157)..(157): n is a, c, g, or t
  misc_feature (194)..(194): n is a, c, g, or t
  misc_feature (204)..(204): n is a, c, g, or t
  misc_feature (222)..(222): n is a, c, g, or t
ggtctatgaggcaggacactggaggacgattcagtgtgactgggtcactgcggctggcactccctgagttccatatttcacattcatagggtcctncagtatactttgtgcnccaaatagaaagaggnncctgttggtttcngacagctgnancctntgagtcatagggaggctctgaccattcatccaccacnggtagcttgngtccggagtctcaggatnacaggttaagatcacagtttccatggccaccaaaagtttctgaggggaaggatgttcttctacttgtccacaatttgccccagaatcttactggctacatctggtacaaaggacaaatcagggacctctaccattatgttacatcatatgtagtagacggtcaaataattaaatatgggcctgcatacagtggacgagaaacagtatattccaatgcatccctgctgatccagaatgtcacccaggaagacacaggatcctacactttacacatcataaagcgaggtgatgggactggaggagtaactggacgtttcaccttcaccttatacctggagactcccaaaccctccatctccagcagcaatttcaaccccagggaggccacggaggctgtgatcttaacctgtgatcctgagactccagatgcaagctacctgtggtggatgaatggtcagagcctccctatgactcacagcttgcagctgtctgaaaccaacaggaccctctacctatttggtgtcacaaactatactgcaggaccctatgaatgtgaaatacggaacccagtgagtgccagccgcagtgacccagtcaccctgaatctcctccgtgagtatcttctgttcctctgtgagccaggctgccatcctgtctaggaagtgaggagcgtctctgcccggattgccatcgtctgggatgtgaggagcccctctgacttgatagccagtctggaaaggggaatccctcttagag

SEQ ID NO: 293794 - DNA, 1333 bp, Homo sapiens
agcggggcgtgagcggcggccaggccgctctgcttggcgctcatgtccgccctgctccggaccgggccgcgcgctgtgccccgagagccaagaaggcaggagcgaacgcgggagctagagggcagggccgaggcgctgcggccggcccagagaggcccccgcacgtccagggccgccgcccggcgccccgaggggcagtcggcgcccggcgcgctcttctcggggcggtgggcaaggctggcggcctgacgcgggcgcgggagacgaggagacgcggagaagaaggtgtcccggctgcaggcacccctcgctgtctccagcaggaaggggcgactcaggtggcggtgcgactgccgctggtttcggttctggtgcgccatgacgggccgctgccgctttctgccgccgcgcttggcgccccgggcctccgcaccgcctagtctccggcggccgctgctaccgccgccatcctccggctcccacggcggctggcggctgagtgggaggcgcccgcccagactccgccggagccaccttccctcctcccccagccacccagccgttattaacggagaaagaggaaaaacgggtggcgcgcgaggggaggacgaagaatgggagggagggaggggtggcccgcgcttcccggcaaccgtcgcttccctccccctgcgagattaatttcacaggggattaatttctcatttacaaataaaaatgtaatcatagcctcctggtatcgcacatccatgggaatactgaatttatttggactagaaactaacacctgctggaatgtcaccagaatagaacctcttaatgaagttcaaagctgtgaaggcatgtttcttccaaaaatgctgtcatttgtaaacattcataaacatttaataatattatgattcactttaaagaattattgtaaaatactgttgttgatttaaaaaaaaattagaactggctcacctcaatgagtattttacattttaaagtagttttctgagaaggctgtgtacttacaaatttgagtataaattttggaatttgagtattaacatatcccattgtaaggcaaccttgactataagttagtcttctatttcagaatgcgaagatacagacagatgttttttggggtagcttcaatatataaattttgaggatagattaaagagtcaaatatctatttgtaatagctaatgtataaatttaattatgcatacatatttaaaaatcggatatgcaataatagattgatttagaaacattacttttttatatatgctcatagtccgtgagtagtattaataaaactcttcctatttatcttcta

SEQ ID NO: 293795 - DNA, 612 bp, Homo sapiens
cctccggcccccggctctggtcccggtcccattggccactccgctgctactggaaggtaatcatagcctcctggtatcgcacatccatgggaatactgaatttatttggactagaaactaacacctgctggaatgtcaccagaatagaacctcttaatgaagttcaaagctgtgaaggcatgtttcttccaaaaatgctgtcatttgtaaacattcataaacatttaataatattatgattcactttaaagaattattgtaaaatactgttgttgatttagagaaggctgtgtacttacaaatttgagtataaattttggaatttgagtattaacatatcccattgtaaggcaaccttgactataagttagtcttctatttcagaatgcgaagatacagacagatgttttttggggtagcttcaatatataaattttgaggatagattaaagagtcaaatatctatttgtaatagctaatgtataaatttaattatgcatacatatttaaaaatcggatatgcaataatagattgatttagaaacattacttttttatatatgctcatagtccgtgagtagtattaataaaactcttcctatttatcttcta

SEQ ID NO: 293796 - DNA, 1156 bp, Homo sapiens
agcggggcgtgagcggcggccaggccgctctgcttggcgctcatgtccgccctgctccggaccgggccgcgcgctgtgccccgagagccaagaaggcaggagcgaacgcgggagctagagggcagggccgaggcgctgcggccggcccagagaggcccccgcacgtccagggccgccgcccggcgccccgaggggcagtcggcgcccggcgcgctcttctcggggcggtgggcaaggctggcggcctgacgcgggcgcgggagacgaggagacgcggagaagaaggtgtcccggctgcaggcacccctcgctgtctccagcaggaaggggcgactcaggtggcggtgcgactgccgctggtttcggttctggtgcgccatgacgggccgctgccgctttctgccgccgcgcttggcgccccgggcctccgcaccgcctagtctccggcggccgctgctaccgccgccatcctccggctcccacggcggctggcggctgagtgggaggcgcccgcccagactccgccggagccaccttccctcctcccccagccacccagccgttattaacggagaaagaggaaaaacgggtggcgcgcgaggggaggacgaagaatgggagggagggaggggtggcccgcgcttcccggcaaccgtcgcttccctccccctgcgagattaatttcacaggggattaatttctcatttacaaataaaaatgtaatcatagcctcctggtatcgcacatccatgggaatactgaatttatttggactagaaactaacacctgctggaatgtcaccagaatagaacctcttaatgaagttcaaagctgtgaaggatgtcatgcccagagctgtagcggtcatcttgtgaccataagggaaaggccataaaaatagcagatatatctggcctaccatccttctgctgctgaaccaatgccaacagtgggactcaactaggaggtcttattacagtactgtgctgctttttcaaccatggagaggtcactcgtgtgatgtggacaccacctctccgtgaaagtttttcctatccatttcttgtacttcagatgtatattttaactttgattctcaggtaacttcgatttataaaacaaaggcaaataaattataattttagtgtcttaaaa

SEQ ID NO: 293797 - DNA, 352 bp, Homo sapiens
gcgcaggtgaccttgctcctggaaggcgccgcggctgatgcgctccaggtggcagctgtgcaggctgaggctctccaggagagggaagcatatgcattcatctcatgaatagcacagtgatctgagagcaagagttccagggccaatgcttcgtggctctgcttttgatcaaatgggtgacctttggatggttacggaaccgaaagagacctccattaccctgcctgtaaaaccgaaattatactcgtcattttcgcatagcgttttttttcaggatcaagtgtgactgttgaggtgaaacacatttactgtgcttaataaatgtgagctataattattaggatgatctaat

SEQ ID NO: 293798 - DNA, 380 bp, Homo sapiens
tggagttctattttgagatctctttttggatagcatttcaaagagtcccagaggatctctgacatctgagctctagctcaggctagatggattactcaagtgagtcatgtctgtgtggtgctctgaagtttacagagaacctttgcagggcagcatactcatcctggttcactcgtcctgtgtttgggatggactcatctcactcttgagcatgctgcctggaatctagggaaatggtctaccagtgtagcatttaagggttgaaatggactgggcatggtggcttacatctgtagctctagcactttgggaggccaacacgggaggatcactggagcccaggagttcgagaccagcctgggcaacatagtatgattctg

SEQ ID NO: 293799 - DNA, 490 bp, Homo sapiens
  misc_feature (7)..(7): n is a, c, g, or t
  misc_feature (42)..(42): n is a, c, g, or t
  misc_feature (53)..(53): n is a, c, g, or t
ataattnccgaaattaaaaacgacctcacctaaaggaaattngccccctccangccccaaaaatcggccaccaggaaaatgtaccccccccatactcctgtgcatgggtggggtggcatgtttcagaagtatattaaaaacacaaaatgttaatttccccttaaaaccatgactcatttgttccacacgattaggagtctcttaattggaccttaagaaaagttgagtttgacagagagaatagaagaccacctctaaagatgaagcacttgttgctatatcctggcataagataaaattgtttctagttaaaaattgtttgtagagctgcgtgtggtaggggcacacctgtagttccagctacttaggaggctgcggtgggaggatggcttgagcccaggagtttgaggttacagtgagctataatcacaccactgcattccagctcgggcaacagatctagactctgtctgtaaaaacataaataaaa

SEQ ID NO: 293800 - DNA, 4317 bp, Homo sapiens
gaattccgggcccccggccgtccctcttaaggctcttcctccgctccgccagtgtccggccgcgggccggccttagtgactggggcggcgggccccggggccgcggcgtggggcgggcaggcggacgccggccgcgggctgctttcgtcggctcccaagctctcccggagcgagcagccgcccgcgagccgccgcggagcctcctcgcccgctcccgccggcgagcaagatgatgtgcgaggtgatgccgaccatcagcgaagcagaaggcccccctggaggaggtggaggccatggttccggctccccttcacagccagatgcagattcacattttgaacagttgatggtctccatgctagaagaaagggaccgccttcttgatacactgagagagactcaagaaacgctggccttaacccaggggaagttacacgaggttggtcatgaaagagattccttgcagagacagctcaacacggcacttccacaggagttcgcagcacttactaaagaactcaatgtatgcagggaacagctccttgaaagggaagaagaaattgctgaactgaaagcagaaaggaataacaccaggctgctgttagagcatttggaatgccttgtctccaggcatgagcggtctcttaggatgaccgtggtgaagagacaagcgcagtctccagcaggcgtgtccagcgaagtggaagtgctgaaagcactgaagtccttatttgaacaccacaaagctctggatgaaaaggtgagagagcgattacgagtagcacttgaaagatgtagtttgttagaagaggaattaggtgccacacacaaagagctaatgattcttaaagaacagaataatcagaaaaaaactctaacagatggagtgctggacataaaccatgaacaagaaaatacaccaagcacgagtggaaagagatcttctgatggttctttaagccacgaggaagaccttgctaaagtaattgagctccaagaaatcataagtaagcagtcaagggaacagagccaaatgaaagaacgcctggcttccctttccagtcatgtgacagaactggaagaggatctggacacggctagaaaagatctcatcaaatctgaagaaatgaacacaaaattgcaacgagatgtccgtgaagccatggcccaaaaggaagatatggaagagagaatcactactcttgaaaaacgctacctcgctgcacagcgtgaagccacatctgtgcatgacctcaatgataaacttgaaaatgaaattgcaaataaagattctatgcatcgacagactgaagataaaaaccgccagttacaggagcgcttggaattggcagagcaaaagctgcaacagacactgaggaaggcagagacgctcccggaggtggaggcggagctggcccagagggtggcagcgctttccaaggctgaagagagacacggcaacattgaagaaaggttacgacagatggaagcacagttggaggagaagaatcaagaactgcagcgggcaaggcaaagagaaaaaatgaacgaagaacataataaacgtttatcagacactgttgacaagctgctttcagaatctaatgagaggcttcaacttcatcttaaagagagaatggctgctttggaagataagaactctcttttaagagaagttgaaagtgcaaaaaagcagttagaagaaacacaacacgataaggatcagcttgtcctaaacattgaagcactgagggctgaactagaccacatgagactaagaggtgcttcacttcatcatggccgaccccacttgggcagtgtcccagatttcaggttccccatggcagacggccacacagactcctacagcaccagtgcagtgctgcggcgcccacagaaaggccggctggcagccctgcgagatgagccttccaaggtacaaactcttaatgagcaggattgggaacgtgcccagcaagctagtgtcttggcaaatgtagcacaagcattcgagagtgatgctgacgtgtctgatggtgaagatgacagggacactctcctcagctcagttgacctgctatcgcccagcgggcaggccgacgcgcacacactagccatgatgcttcaggagcagctggacgccatcaacaaagagatcaggttgattcaggaagaaaaagaaaatacagagcagcgggcagaggagattgaaagtcgagttggcagtggaagtctagacaatcttggtcgttttagatcaatgagctccattcccccctaccctgcttcctcgcttgctagctcctcccctccgggcagtgggcgctccaccccacgaaggatccctcacagcccagctcgggaagtggacagactgggcgtcatgacccttttgccaccttccagagaagaggtacgagatgacaagacaaccataaagtgtgaaacctccccgccttcctccccgagagcccttcggttagaccggctgcacaaaggggcgctgcacaccgtcagccacgaggacatcagggacataaggaactccacaggctcccaggatggtcccgtgagcaaccccagcagtagcaacagtagccaggactcgctccacaaagccccaaagaagaaaggcattaagtcctccattggccgcttgtttggcaagaaagaaaagggccgacctggacaaactggcaaagaagcattaggacaagctggtgtttccgagacggataactcatctcaggatgccttgggacttagcaaattggggggacaggctgaaaaaaatcgtaaacttcaaaaaaagcatgaattgctggaggaagcccggagacaaggtttaccttttgcccaatgggacgggccaacggttgtggtctggctagagctctgggttgggatgccagcctggtatgtggctgcctgccgagcaaacgtgaaaagcggggccatcatgtcggccctgtccgacacagagatccagcgtgagattggcatcagcaaccccctgcacaggctgaagctgaggctggccatccaggagatcatgtcgctgaccagcccgtctgccccgcccacatctagaacgacactcgcctatggggacatgaaccacgagtggatcggcaacgagtggctccccagcctgggcctcccccagtaccgcagctacttcatggagtgccttgtagacgccaggatgctggaccacttgaccaagaaagaccttcgagggcagctgaaaatggtcgacagttttcacagaaacagtttccagtgtggaattatgtgcctgagaaggttaaattatgaccggaaagaactggaaagaaaaagagaagaaagtcagagtgaaataaaagacgtgcttgtttggagcaatgatcgagtgattcgctggatcctgtcaattggccttaaagaatatgcaaacaatcttatagagagtggtgttcacggagcacttctggccttagatgaaaccttcgacttcagtgcactggcactgctgttacagatcccgacgcagaacacacaggctcgtgctgtcttggaaagagaatttaacaaccttttggtcatggggactgatagaaggtttgatgaagatgatgataaaagctttaggagagcaccttcatggagaaaaaagtttagaccaaaggacattcgtggcttagctgctgggtcagcagagactctccctgcaaacttccgggtgacttcttctatgtcttccccctctatgcagccaaagaagatgcagatggacggtatgtgatgggtcacactaacctgtcacttgttgggagcatgagcagctttctgtctggaacattaataatgatctaaaacggcctatttaatatgttacaaggcacttgagtatggttgcatgtccaaatataaatgtttttaaattaactctaacatttgtttataaaagtttaaccataataatagaatttttaaaacacgcttgtctggttgaatcttagcatatttttccaactaataaagctcagtattcgtctgtgttctcagagagagactgaggcatacttgtaaatatgtgtctgtgacaggccgtgctagaaagctctttcaggaaatagtagtgtagtagtagcttccaaaccacataatttactgctctccacaccagagaaaataactgagtacatttttaagaacacacagtttccagcttgtgtgagctctgcctatgctttctgccctccctgctgctgctgttccgtgcagtcacatgtctacccattagagggcagggaagggaggaaggtgaacctc

SEQ ID NO: 293801 - DNA, 925 bp, Homo sapiens
agggcgaggagaaagtcccacagcctttccagtcctggtcttggaagccacagccttcacttcctctctattctgttcatttgagtgaggtgctgagtcctgcccacactcagcgtttggggtacaaactcttaatgagcaggattgggaacgtgcccagcaagctagtgtcttggcaaatgtagcacaagcattcgagagtgatgctgacgtgtctgatggtgaagatgacagggacactctcctcagctcagttgacctgctatcgcccagcgggcaggccgacgcgcacacactagccatgatgcttcaggagcagctggacgccatcaacaaagagatcaggttgattcaggaagaaaaagaaaatacagagcagcgggcagaggagattgaaagtcgagttggcagtggaagtctagacaatcttggtcgttttagatcaatgagctccattcccccctaccctgcttcctcgcttgctagctcctcccctccgggcagtgggcgctccaccccacgaaggatccctcacagcccagctcgggaagtggacagactgggcgtcatgacccttttgccaccttccagagaagaggtacgagatgacaagacaaccataaagtgtgaaacctccccgccttcctccccgagagcccttcggttagaccggctgcacaaaggggcgctgcacaccgtcagccacgaggacatcagggacataaggaactccacaggctcccaggatggtcccgtgagcaaccccagcagtagcaacagtagccaggactcgctccacaaagccccaaagaagaaaggcattaagtcctccattggccgcttgtttggcaagaaagaaaagggccgacctggacaaactggcaaagaagcattaggacaaggttggttggttttccgcaccctt

SEQ ID NO: 293802 - DNA, 761 bp, Homo sapiens
acatctctgacctttattttttaaatgaatcttgttttttgttccttaatttaccaggatgatgataaaagctttaggagagcaccttcatggagaaaaaagtttagaccaaaggacattcgtggcttagctgctgggtcagcagagactctccctgcaaacttccgggtgacttcttctatgtcttccccctctatgcagccaaagaagatgcagatggacggtatgtgatgggtcacactaacctgtcacttgttgggagcatgagcagctttctgtctggaacattaataatgatctaaaacggcctatttaatatgttacaaggcacttgagtatggttgcatgtccaaatataaatgtttttaaattaactctaacatttgtttataaaagtttaaccataataatagaatttttaaaacacgcttgtctggttgaatcttagcatatttttccaactaataaagctcagtattcgtctgtgttctcagagagagactgaggcatacttgtaaatatgtgtctgtgacaggccgtgctagaaagctctttcaggaaatagtagtgtagtagtagcttccaaaccacataatttactgctctccacaccagagaaaataactgagtacatttttaagaacacacagtttccagcttgtgtgagctctgcctatgctttctgccctccctgctgctgctgttccgtgcagtcacatgtctacccattagagggcagggaagggaggaaggtgaacctc

SEQ ID NO: 293803 - DNA, 287 bp, Homo sapiens
taatttagagccattaacaagttttcttgacagtaagatcaatgacagacattaatggtattttattatgttatattacactaatatatacattaagtgtatatattacacttaactatatattaagaataaaataaacagtatacacacacacacacaaactcaaccccttttattttcaggtgagagagcgattacgagtagcacttgaaagatgtagtttgttagaagaggaattaggtgccacacacaaagaggccgcgaatttagtagtagtaggcggccgc

SEQ ID NO: 293804 - DNA, 5243 bp, Homo sapiens
gaattccgggcccccggccgtccctcttaaggctcttcctccgctccgccagtgtccggccgcgggccggccttagtgactggggcggcgggccccggggccgcggcgtggggcgggcaggcggacgccggccgcgggctgctttcgtcggctcccaagctctcccggagcgagcagccgcccgcgagccgccgcggagcctcctcgcccgctcccgccggcgagcaagatgatgtgcgaggtgatgccgaccatcagcgaagcagaaggcccccctggaggaggtggaggccatggttccggctccccttcacagccagatgcagattcacattttgaacagttgatggtctccatgctagaagaaagggaccgccttcttgatacactgagagagactcaagaaacgctggccttaacccaggggaagttacacgaggttggtcatgaaagagattccttgcagagacagctcaacacggcacttccacaggagttcgcagcacttactaaagaactcaatgtatgcagggaacagctccttgaaagggaagaagaaattgctgaactgaaagcagaaaggaataacaccaggctgctgttagagcatttggaatgccttgtctccaggcatgagcggtctcttaggatgaccgtggtgaagagacaagcgcagtctccagcaggcgtgtccagcgaagtggaagtgctgaaagcactgaagtccttatttgaacaccacaaagctctggatgaaaaggtgagagagcgattacgagtagcacttgaaagatgtagtttgttagaagaggaattaggtgccacacacaaagagctaatgattcttaaagaacagaataatcagaaaaaaactctaacagatggagtgctggacataaaccatgaacaagaaaatacaccaagcacgagtggaaagagatcttctgatggttctttaagccacgaggaagaccttgctaaagtaattgagctccaagaaatcataagtaagcagtcaagggaacagagccaaatgaaagaacgcctggcttccctttccagtcatgtgacagaactggaagaggatctggacacggctagaaaagatctcatcaaatctgaagaaatgaacacaaaattgcaacgagatgtccgtgaagccatggcccaaaaggaagatatggaagagagaatcactactcttgaaaaacgctacctcgctgcacagcgtgaagccacatctgtgcatgacctcaatgataaacttgaaaatgaaattgcaaataaagattctatgcatcgacagactgaagataaaaaccgccagttacaggagcgcttggaattggcagagcaaaagctgcaacagacactgaggaaggcagagacgctcccggaggtggaggcggagctggcccagagggtggcagcgctttccaaggctgaagagagacacggcaacattgaagaaaggttacgacagatggaagcacagttggaggagaagaatcaagaactgcagcgggcaaggcaaagagaaaaaatgaacgaagaacataataaacgtttatcagacactgttgacaagctgctttcagaatctaatgagaggcttcaacttcatcttaaagagagaatggctgctttggaagataagaactctcttttaagagaagttgaaagtgcaaaaaagcagttagaagaaacacaacacgataaggatcagcttgtcctaaacattgaagcactgagggctgaactagaccacatgagactaagaggtgcttcacttcatcatggccgaccccacttgggcagtgtcccagatttcaggttccccatggcagacggccacacagactcctacagcaccagtgcagtgctgcggcgcccacagaaaggccggctggcagccctgcgagatgagccttccaaggtacaaactcttaatgagcaggattgggaacgtgcccagcaagctagtgtcttggcaaatgtagcacaagcattcgagagtgatgctgacgtgtctgatggtgaagatgacagggacactctcctcagctcagttgacctgctatcgcccagcgggcaggccgacgcgcacacactagccatgatgcttcaggagcagctggacgccatcaacaaagagatcaggttgattcaggaagaaaaagaaaatacagagcagcgggcagaggagattgaaagtcgagttggcagtggaagtctagacaatcttggtcgttttagatcaatgagctccattcccccctaccctgcttcctcgcttgctagctcctcccctccgggcagtgggcgctccaccccacgaaggatccctcacagcccagctcgggaagtggacagactgggcgtcatgacccttttgccaccttccagagaagaggtacgagatgacaagacaaccataaagtgtgaaacctccccgccttcctccccgagagcccttcggttagaccggctgcacaaaggggcgctgcacaccgtcagccacgaggacatcagggacataaggaactccacaggctcccaggatggtcccgtgagcaaccccagcagtagcaacagtagccaggactcgctccacaaagccccaaagaagaaaggcattaagtcctccattggccgcttgtttggcaagaaagaaaagggccgacctggacaaactggcaaagaagcattaggacaagctggtgtttccgagacggataactcatctcaggatgccttgggacttagcaaattggggggacaggctgaaaaaaatcgtaaacttcaaaaaaagcatgaattgctggaggaagcccggagacaaggtttaccttttgcccaatgggacgggccaacggttgtggtctggctagagctctgggttgggatgccagcctggtatgtggctgcctgccgagcaaacgtgaaaagcggggccatcatgtcggccctgtccgacacagagatccagcgtgagattggcatcagcaaccccctgcacaggctgaagctgaggctggccatccaggagatcatgtcgctgaccagcccgtctgccccgcccacatctagaacgacactcgcctatggggacatgaaccacgagtggatcggcaacgagtggctccccagcctgggcctcccccagtaccgcagctacttcatggagtgccttgtagacgccaggatgctggaccacttgaccaagaaagaccttcgagggcagctgaaaatggtcgacagttttcacagaaacagtttccagtgtggaattatgtgcctgagaaggttaaattatgaccggaaagaactggaaagaaaaagagaagaaagtcagagtgaaataaaagacgtgcttgtttggagcaatgatcgagtgattcgctggatcctgtcaattggccttaaagaatatgcaaacaatcttatagagagtggtgttcacggagcacttctggccttagatgaaaccttcgacttcagtgcactggcactgctgttacagatcccgacgcagaacacacaggctcgtgctgtcttggaaagagaatttaacaaccttttggtcatggggactgatagaaggtttgatgaagatgatgataaaagctttaggagagcaccttcatggagaaaaaagtttagaccaaaggacattcgtggcttagctgctgggtcagcagagactctccctgcaaacttccgggtgacttcttctatgtcttccccctctatgcagccaaagaagatgcagatggacggcaatgtatcaggaacacagaggttggattctgctacagtcaggacttactcctgctaaagtctcctgttgtttacccacactacttctacagatgattatgcagcatttgaatccaacaaagactacattttggaatccagtggaatctttaatcttgttaatacttgttatatggaccctaagatattttattacagagtttttaattagtgaaaaattcatgaataccatagagaaaatattttagaatttaatgtttcttatatttatgtaaacttatgactcttcatttatatagttacttactttttcatgtatatccaggctataaatatcctttcaaatcatgttcttatacctaattttagtctttcaaatgaatgtactgtaatgcttgtatgtataaatcctatgaatagagggcttttgtaaattatgcatttattgtaattatcattaattttttaatgataaaccatgacaaaggattttacgtttataaaattatgacagaagccatgtgcattatcctttacggacgcagcctagctctacagcaatcatcctgaaataagcatacctaatttcaagcaattgttgtattttcatgactgaccttaactgtactttttctagcaagagatgctttattctgcagcatgaacagatttaaaatggctggtgttaaatatcagctcctaataagatgtggactgaaaacactatcacaacactatgagaagcccctagcactggttaacgctttcctagcctagtctctggatttggggagcttgtcttcagtggctgagactgtgagctgggagcagttctctcagctggagagactcgggatggggtaacctggggaccagtctagcccctgcaccctcttccctgcctctgctccttgggagcgggtggagagacacccatgtggctccccttagggccagcaccaagcaccacgctctcatcctgcaagtcggcgcacacagtggatgaaggcaggagacccagaaagcagtgcagtgcagctctaataaaggccttatttttcttatgtaaatcatctttttacatttgtttgtaaacatgtttaaagaacgaacctagtgggacatttttagactttgatgctctagccattttggattgtgtaagttgcagatgtggcttttactttttaaatggcatattaacaagccagcaaagtgtgtcagaccatggcgtggtatttattgtgcagcagatccagagacagaggcagcctgtcttttcagttggtttctgcttttaatttacttgtacaattcattgttactgttctgtttttctattaatcttttgtcaacttcctgattatgtaacaaagtatgtacagtctacttttgaactatttttatcacagtattatttattgctttctttcaataaagtactgaagcattttccactgcca

SEQ ID NO: 293805 - DNA, 5415 bp, Homo sapiens
gaattccgggcccccggccgtccctcttaaggctcttcctccgctccgccagtgtccggccgcgggccggccttagtgactggggcggcgggccccggggccgcggcgtggggcgggcaggcggacgccggccgcgggctgctttcgtcggctcccaagctctcccggagcgagcagccgcccgcgagccgccgcggagcctcctcgcccgctcccgccggcgagcaagatgatgtgcgaggtgatgccgaccatcagcgaagcagaaggcccccctggaggaggtggaggccatggttccggctccccttcacagccagatgcagattcacattttgaacagttgatggtctccatgctagaagaaagggaccgccttcttgatacactgagagagactcaagaaacgctggccttaacccaggggaagttacacgaggttggtcatgaaagagattccttgcagagacagctcaacacggcacttccacaggagttcgcagcacttactaaagaactcaatgtatgcagggaacagctccttgaaagggaagaagaaattgctgaactgaaagcagaaaggaataacaccaggctgctgttagagcatttggaatgccttgtctccaggcatgagcggtctcttaggatgaccgtggtgaagagacaagcgcagtctccagcaggcgtgtccagcgaagtggaagtgctgaaagcactgaagtccttatttgaacaccacaaagctctggatgaaaaggtgagagagcgattacgagtagcacttgaaagatgtagtttgttagaagaggaattaggtgccacacacaaagagctaatgattcttaaagaacagaataatcagaaaaaaactctaacagatggagtgctggacataaaccatgaacaagaaaatacaccaagcacgagtggaaagagatcttctgatggttctttaagccacgaggaagaccttgctaaagtaattgagctccaagaaatcataagtaagcagtcaagggaacagagccaaatgaaagaacgcctggcttccctttccagtcatgtgacagaactggaagaggatctggacacggctagaaaagatctcatcaaatctgaagaaatgaacacaaaattgcaacgagatgtccgtgaagccatggcccaaaaggaagatatggaagagagaatcactactcttgaaaaacgctacctcgctgcacagcgtgaagccacatctgtgcatgacctcaatgataaacttgaaaatgaaattgcaaataaagattctatgcatcgacagactgaagataaaaaccgccagttacaggagcgcttggaattggcagagcaaaagctgcaacagacactgaggaaggcagagacgctcccggaggtggaggcggagctggcccagagggtggcagcgctttccaaggctgaagagagacacggcaacattgaagaaaggttacgacagatggaagcacagttggaggagaagaatcaagaactgcagcgggcaaggcaaagagaaaaaatgaacgaagaacataataaacgtttatcagacactgttgacaagctgctttcagaatctaatgagaggcttcaacttcatcttaaagagagaatggctgctttggaagataagaactctcttttaagagaagttgaaagtgcaaaaaagcagttagaagaaacacaacacgataaggatcagcttgtcctaaacattgaagcactgagggctgaactagaccacatgagactaagaggtgcttcacttcatcatggccgaccccacttgggcagtgtcccagatttcaggttccccatggcagacggccacacagactcctacagcaccagtgcagtgctgcggcgcccacagaaaggccggctggcagccctgcgagatgagccttccaaggtacaaactcttaatgagcaggattgggaacgtgcccagcaagctagtgtcttggcaaatgtagcacaagcattcgagagtgatgctgacgtgtctgatggtgaagatgacagggacactctcctcagctcagttgacctgctatcgcccagcgggcaggccgacgcgcacacactagccatgatgcttcaggagcagctggacgccatcaacaaagagatcaggttgattcaggaagaaaaagaaaatacagagcagcgggcagaggagattgaaagtcgagttggcagtggaagtctagacaatcttggtcgttttagatcaatgagctccattcccccctaccctgcttcctcgcttgctagctcctcccctccgggcagtgggcgctccaccccacgaaggatccctcacagcccagctcgggaagtggacagactgggcgtcatgacccttttgccaccttccagagaagaggtacgagatgacaagacaaccataaagtgtgaaacctccccgccttcctccccgagagcccttcggttagaccggctgcacaaaggggcgctgcacaccgtcagccacgaggacatcagggacataaggaactccacaggctcccaggatggtcccgtgagcaaccccagcagtagcaacagtagccaggactcgctccacaaagccccaaagaagaaaggcattaagtcctccattggccgcttgtttggcaagaaagaaaagggccgacctggacaaactggcaaagaagcattaggacaagctggtgtttccgagacggataactcatctcaggatgccttgggacttagcaaattggggggacaggctgaaaaaaatcgtaaacttcaaaaaaagcatgaattgctggaggaagcccggagacaaggtttaccttttgcccaatgggacgggccaacggttgtggtctggctagagctctgggttgggatgccagcctggtatgtggctgcctgccgagcaaacgtgaaaagcggggccatcatgtcggccctgtccgacacagagatccagcgtgagattggcatcagcaaccccctgcacaggctgaagctgaggctggccatccaggagatcatgtcgctgaccagcccgtctgccccgcccacatctagaacgacactcgcctatggggacatgaaccacgagtggatcggcaacgagtggctccccagcctgggcctcccccagtaccgcagctacttcatggagtgccttgtagacgccaggatgctggaccacttgaccaagaaagaccttcgagggcagctgaaaatggtcgacagttttcacagaaacagtttccagtgtggaattatgtgcctgagaaggttaaattatgaccggaaagaactggaaagaaaaagagaagaaagtcagagtgaaataaaagacgtgcttgtttggagcaatgatcgagtgattcgctggatcctgtcaattggccttaaagaatatgcaaacaatcttatagagagtggtgttcacggagcacttctggccttagatgaaaccttcgacttcagtgcactggcactgctgttacagatcccgacgcagaacacacaggctcgtgctgtcttggaaagagaatttaacaaccttttggtcatggggactgatagaaggtttgatgaagatgatgataaaagctttaggagagcaccttcatggagaaaaaagtttagaccaaaggacattcgtggcttagctgctgggtcagcagagactctccctgcaaacttccgggtgacttcttctatgtcttccccctctatgcagccaaagaagatgcagatggacggcaatgtatcaggaacacagaggttggattctgctacagtcaggacttactcctgctaaagtctcctgttgtttacccacactacttctacagatgattatgcagcatttgaatccaacaaagactacattttggaatccagtggaatctttaatcttgttaatacttgttatatggaccctaagatattttattacagagtttttaattagtgaaaaattcatgaataccatagagaaaatattttagaatttaatgtttcttatatttatgtaaacttatgactcttcatttatatagttacttactttttcatgtatatccaggctataaatatcctttcaaatcatgttcttatacctaattttagtctttcaaatgaatgtactgtaatgcttgtatgtataaatcctatgaatagagggcttttgtaaattatgcatttattgtaattatcattaattttttaatgataaaccatgacaaaggattttacgtttataaaattatgacagaagccatgtgcattatcctttacggacgcagcctagctctacagcaatcatcctgaaataagcatacctaatttcaagcaattgttgtattttcatgactgaccttaactgtactttttctagcaagagatgctttattctgcagcatgaacagatttaaaatggctggtgttaaatatcagctcctaataagatgtggactgaaaacactatcacaacactatgagaagcccctagcactggttaacgctttcctagcctagtctctggatttggggagcttgtcttcagtggctgagactgtgagctgggagcagttctctcagctggagagactcgggatggggtaacctggggaccagtctagcccctgcaccctcttccctgcctctgctccttgggagcgggtggagagacacccatgtggctccccttagggccagcaccaagcaccacgctctcatcctgcaagtcggcgcacacagtggatgaaggcaggagacccagaaagcagtgcagtgcagctctaataaaggccttatttttcttatgtaaatcatctttttacatttgtttgtaaacatgtttaaagaacgaacctagtgggacatttttagactttgatgctctagccattttggattgtgtaagttgcagatgtggcttttactttttaaatggcatattaacaagccagcaaagtgtgtcagaccatggcgtggtatttattgtgcagcagatccagagacagaggcagcctgtcttttcagttggtttctgcttttaatttacttgtacaattcattgttactgttctgtttttctattaatcttttgtcaacttcctgattatgtaacaaagtatgtacagtctacttttgaactatttttatcacagtattatttattgctttctttcaataaagtactgaagcattttccactgccaatgaagaatactgagaataagctctaactgttttggaaggcagtgtcaccatatggaaattgtattacagaagtcaattgacagaataaagcagccaggagatgaagtgcaggttcagggcgtcatcctgcccgctgctctggaggtcccgagcctgcatcactgcaggaga

SEQ ID NO: 293806 - DNA, 4802 bp, Homo sapiens
gaattccgggcccccggccgtccctcttaaggctcttcctccgctccgccagtgtccggccgcgggccggccttagtgactggggcggcgggccccggggccgcggcgtggggcgggcaggcggacgccggccgcgggctgctttcgtcggctcccaagctctcccggagcgagcagccgcccgcgagccgccgcggagcctcctcgcccgctcccgccggcgagcaagatgatgtgcgaggtgatgccgaccatcagcgaagcagaaggcccccctggaggaggtggaggccatggttccggctccccttcacagccagatgcagattcacattttgaacagttgatggtctccatgctagaagaaagggaccgccttcttgatacactgagagagactcaagaaacgctggccttaacccaggggaagttacacgaggttggtcatgaaagagattccttgcagagacagctcaacacggcacttccacaggagttcgcagcacttactaaagaactcaatgtatgcagggaacagctccttgaaagggaagaagaaattgctgaactgaaagcagaaaggaataacaccaggctgctgttagagcatttggaatgccttgtctccaggcatgagcggtctcttaggatgaccgtggtgaagagacaagcgcagtctccagcaggcgtgtccagcgaagtggaagtgctgaaagcactgaagtccttatttgaacaccacaaagctctggatgaaaaggtgagagagcgattacgagtagcacttgaaagatgtagtttgttagaagaggaattaggtgccacacacaaagagctaatgattcttaaagaacagaataatcagaaaaaaactctaacagatggagtgctggacataaaccatgaacaagaaaatacaccaagcacgagtggaaagagatcttctgatggttctttaagccacgaggaagaccttgctaaagtaattgagctccaagaaatcataagtaagcagtcaagggaacagagccaaatgaaagaacgcctggcttccctttccagtcatgtgacagaactggaagaggatctggacacggctagaaaagatctcatcaaatctgaagaaatgaacacaaaattgcaacgagatgtccgtgaagccatggcccaaaaggaagatatggaagagagaatcactactcttgaaaaacgctacctcgctgcacagcgtgaagccacatctgtgcatgacctcaatgataaacttgaaaatgaaattgcaaataaagattctatgcatcgacagactgaagataaaaaccgccagttacaggagcgcttggaattggcagagcaaaagctgcaacagacactgaggaaggcagagacgctcccggaggtggaggcggagctggcccagagggtggcagcgctttccaaggctgaagagagacacggcaacattgaagaaaggttacgacagatggaagcacagttggaggagaagaatcaagaactgcagcgggcaaggcaaagagaaaaaatgaacgaagaacataataaacgtttatcagacactgttgacaagctgctttcagaatctaatgagaggcttcaacttcatcttaaagagagaatggctgctttggaagataagaactctcttttaagagaagttgaaagtgcaaaaaagcagttagaagaaacacaacacgataaggatcagcttgtcctaaacattgaagcactgagggctgaactagaccacatgagactaagaggtgcttcacttcatcatggccgaccccacttgggcagtgtcccagatttcaggttccccatggcagacggccacacagactcctacagcaccagtgcagtgctgcggcgcccacagaaaggccggctggcagccctgcgagatgagccttccaaggtacaaactcttaatgagcaggattgggaacgtgcccagcaagctagtgtcttggcaaatgtagcacaagcattcgagagtgatgctgacgtgtctgatggtgaagatgacagggacactctcctcagctcagttgacctgctatcgcccagcgggcaggccgacgcgcacacactagccatgatgcttcaggagcagctggacgccatcaacaaagagatcaggttgattcaggaagaaaaagaaaatacagagcagcgggcagaggagattgaaagtcgagttggcagtggaagtctagacaatcttggtcgttttagatcaatgagctccattcccccctaccctgcttcctcgcttgctagctcctcccctccgggcagtgggcgctccaccccacgaaggatccctcacagcccagctcgggaagtggacagactgggcgtcatgacccttttgccaccttccagagaagaggtacgagatgacaagacaaccataaagtgtgaaacctccccgccttcctccccgagagcccttcggttagaccggctgcacaaaggggcgctgcacaccgtcagccacgaggacatcagggacataaggaactccacaggctcccaggatggtcccgtgagcaaccccagcagtagcaacagtagccaggactcgctccacaaagccccaaagaagaaaggcattaagtcctccattggccgcttgtttggcaagaaagaaaagggccgacctggacaaactggcaaagaagcattaggacaagctggtgtttccgagacggataactcatctcaggatgccttgggacttagcaaattggggggacaggctgaaaaaaatcgtaaacttcaaaaaaagcatgaattgctggaggaagcccggagacaaggtttaccttttgcccaatgggacgggccaacggttgtggtctggctagagctctgggttgggatgccagcctggtatgtggctgcctgccgagcaaacgtgaaaagcggggccatcatgtcggccctgtccgacacagagatccagcgtgagattggcatcagcaaccccctgcacaggctgaagctgaggctggccatccaggagatcatgtcgctgaccagcccgtctgccccgcccacatctagaacgacactcgcctatggggacatgaaccacgagtggatcggcaacgagtggctccccagcctgggcctcccccagtaccgcagctacttcatggagtgccttgtagacgccaggatgctggaccacttgaccaagaaagaccttcgagggcagctgaaaatggtcgacagttttcacagaaacagtttccagtgtggaattatgtgcctgagaaggttaaattatgaccggaaagaactggaaagaaaaagagaagaaagtcagagtgaaataaaagacgtgcttgtttggagcaatgatcgagtgattcgctggatcctgtcaattggccttaaagaatatgcaaacaatcttatagagagtggtgttcacggagcacttctggccttagatgaaaccttcgacttcagtgcactggcactgctgttacagatcccgacgcagaacacacaggctcgtgctgtcttggaaagagaatttaacaaccttttggtcatggggactgatagaaggtttgatgaagatgatgataaaagctttaggagagcaccttcatggagaaaaaagtttagaccaaaggacattcgtggcttagctgctgggtcagcagagactctccctgcaaacttccgggtgacttcttctatgtcttccccctctatgcagccaaagaagatgcagatggacggcaatgtatcaggaacacagaggttggattctgctacagtcaggacttactcctgctaaagtctcctgttgtttacccacactacttctacagatgattatgcagcatttgaatccaacaaagactacattttggaatccagtggaatctttaatcttgttaatacttgttatatggaccctaagatattttattacagagtttttaattagtgaaaaattcatgaataccatagagaaaatattttagaatttaatgtttcttatatttatgtaaacttatgactcttcatttatatagttacttactttttcatgtatatccaggctataaatatcctttcaaatcatgttcttatacctaattttagtctttcaaatgaatgtactgtaatgcttgtatgtataaatcctatgaatagagggcttttgtaaattatgcatttattgtaattatcattaattttttaatgataaaccatgacaaaggattttacgtttataaaattatgacagaagccatgtgcattatcctttacggacgcagcctagctctacagcaatcatcctgaaataagcatacctaatttcaagcaattgttgtattttcatgactgaccttaactgtactttttctagcaagagatgctttattctgcagcatgaacagatttaaaatggctggtgttaaatatcagctcctaataagatgtggactgaaaacactatcacaacactatgagaagcccctagcactggttaacgctttcctagcctagtctctggatttggggagcttgtcttcagtggctgagactgtgagctgggagcagttctctcagctggagagactcgggatggggtaacctggggaccagtctagcccctgcaccctcttccctgcctctgctccttgggagcgggtggagagacacccatgtggctccccttagggccagcaccaagcactgctttctgggtctcctgccttcatccactgtgtgcgccgacttgcaggtcgagc

SEQ ID NO: 293807 - DNA, 4356 bp, Homo sapiens
gaattccgggcccccggccgtccctcttaaggctcttcctccgctccgccagtgtccggccgcgggccggccttagtgactggggcggcgggccccggggccgcggcgtggggcgggcaggcggacgccggccgcgggctgctttcgtcggctcccaagctctcccggagcgagcagccgcccgcgagccgccgcggagcctcctcgcccgctcccgccggcgagcaagatgatgtgcgaggtgatgccgaccatcagcgaagcagaaggcccccctggaggaggtggaggccatggttccggctccccttcacagccagatgcagattcacattttgaacagttgatggtctccatgctagaagaaagggaccgccttcttgatacactgagagagactcaagaaacgctggccttaacccaggggaagttacacgaggttggtcatgaaagagattccttgcagagacagctcaacacggcacttccacaggagttcgcagcacttactaaagaactcaatgtatgcagggaacagctccttgaaagggaagaagaaattgctgaactgaaagcagaaaggaataacaccaggctgctgttagagcatttggaatgccttgtctccaggcatgagcggtctcttaggatgaccgtggtgaagagacaagcgcagtctccagcaggcgtgtccagcgaagtggaagtgctgaaagcactgaagtccttatttgaacaccacaaagctctggatgaaaaggtgagagagcgattacgagtagcacttgaaagatgtagtttgttagaagaggaattaggtgccacacacaaagagctaatgattcttaaagaacagaataatcagaaaaaaactctaacagatggagtgctggacataaaccatgaacaagaaaatacaccaagcacgagtggaaagagatcttctgatggttctttaagccacgaggaagaccttgctaaagtaattgagctccaagaaatcataagtaagcagtcaagggaacagagccaaatgaaagaacgcctggcttccctttccagtcatgtgacagaactggaagaggatctggacacggctagaaaagatctcatcaaatctgaagaaatgaacacaaaattgcaacgagatgtccgtgaagccatggcccaaaaggaagatatggaagagagaatcactactcttgaaaaacgctacctcgctgcacagcgtgaagccacatctgtgcatgacctcaatgataaacttgaaaatgaaattgcaaataaagattctatgcatcgacagactgaagataaaaaccgccagttacaggagcgcttggaattggcagagcaaaagctgcaacagacactgaggaaggcagagacgctcccggaggtggaggcggagctggcccagagggtggcagcgctttccaaggctgaagagagacacggcaacattgaagaaaggttacgacagatggaagcacagttggaggagaagaatcaagaactgcagcgggcaaggcaaagagaaaaaatgaacgaagaacataataaacgtttatcagacactgttgacaagctgctttcagaatctaatgagaggcttcaacttcatcttaaagagagaatggctgctttggaagataagaactctcttttaagagaagttgaaagtgcaaaaaagcagttagaagaaacacaacacgataaggatcagcttgtcctaaacattgaagcactgagggctgaactagaccacatgagactaagaggtgcttcacttcatcatggccgaccccacttgggcagtgtcccagatttcaggttccccatggcagacggccacacagactcctacagcaccagtgcagtgctgcggcgcccacagaaaggccggctggcagccctgcgagatgagccttccaaggtacaaactcttaatgagcaggattgggaacgtgcccagcaagctagtgtcttggcaaatgtagcacaagcattcgagagtgatgctgacgtgtctgatggtgaagatgacagggacactctcctcagctcagttgacctgctatcgcccagcgggcaggccgacgcgcacacactagccatgatgcttcaggagcagctggacgccatcaacaaagagatcaggttgattcaggaagaaaaagaaaatacagagcagcgggcagaggagattgaaagtcgagttggcagtggaagtctagacaatcttggtcgttttagatcaatgagctccattcccccctaccctgcttcctcgcttgctagctcctcccctccgggcagtgggcgctccaccccacgaaggatccctcacagcccagctcgggaagtggacagactgggcgtcatgacccttttgccaccttccagagaagaggtacgagatgacaagacaaccataaagtgtgaaacctccccgccttcctccccgagagcccttcggttagaccggctgcacaaaggggcgctgcacaccgtcagccacgaggacatcagggacataaggaactccacaggctcccaggatggtcccgtgagcaaccccagcagtagcaacagtagccaggactcgctccacaaagccccaaagaagaaaggcattaagtcctccattggccgcttgtttggcaagaaagaaaagggccgacctggacaaactggcaaagaagcattaggacaagctggtgtttccgagacggataactcatctcaggatgccttgggacttagcaaattggggggacaggctgaaaaaaatcgtaaacttcaaaaaaagcatgaattgctggaggaagcccggagacaaggtttaccttttgcccaatgggacgggccaacggttgtggtctggctagagctctgggttgggatgccagcctggtatgtggctgcctgccgagcaaacgtgaaaagcggggccatcatgtcggccctgtccgacacagagatccagcgtgagattggcatcagcaaccccctgcacaggctgaagctgaggctggccatccaggagatcatgtcgctgaccagcccgtctgccccgcccacatctagaacgacactcgcctatggggacatgaaccacgagtggatcggcaacgagtggctccccagcctgggcctcccccagtaccgcagctacttcatggagtgccttgtagacgccaggatgctggaccacttgaccaagaaagaccttcgagggcagctgaaaatggtcgacagttttcacagaaacagtttccagtgtggaattatgtgcctgagaaggttaaattatgaccggaaagaactggaaagaaaaagagaagaaagtcagagtgaaataaaagacgtgcttgtttggagcaatgatcgagtgattcgctggatcctgtcaattggccttaaagaatatgcaaacaatcttatagagagtggtgttcacggagcacttctggccttagatgaaaccttcgacttcagtgcactggcactgctgttacagatcccgacgcagaacacacaggctcgtgctgtcttggaaagagaatttaacaaccttttggtcatggggactgatagaaggtttgatgaagatgatgataaaagctttaggagagcaccttcatggagaaaaaagtttagaccaaaggacattcgtggcttagctgctgggtcagcagagactctccctgcaaacttccgggtgacttcttctatgtcttccccctctatgcagccaaagaagatgcagatggacggcaatgtatcaggaacacagaggttggattctgctacagtcaggacttactcctgctaaagtctcctgttgtttacccacactacttctacagatgattatgcagcatttgaatccaacaaagactacattttggaatccagtggaatctttaatcttgttaatacttgttatatggaccctaagatattttattacagagtttttaattagtgaaaaattcatgaataccatagagaaaatattttagaatttaatgtttcttatatttatgtaaacttatgactcttcatttatatagttacttactttttcatgtatatccaggctataaatatcctttcaaatcatgttcttatacctaattttagtctttcaaatgaatgtactgtaatgcttgtatgtataaatcctatgaatagagggcttttgtaaattatgcatttattgtaattatcattaattttttaatgataaaccatgacaaaggattttacgtttataaaattatgacagaagccatgtgcattatcctttacggacgcagcctcgacatgttcggggtcctctagacagcc

SEQ ID NO: 293808 - DNA, 4202 bp, Homo sapiens
ctgggggtcaatttgaatgaagaaacggcatttactatagtttttttctctcttaagtatcttaatgtgtaatcgttaattacctacttttttgtcccctctgaaatacctaatttaggccatggcccaaaaggaagatatggaagagagaatcactactcttgaaaaacgctacctcgctgcacagcgtgaagccacatctgtgcatgacctcaatgataaacttgaaaatgaaattgcaaataaagattctatgcatcgacagactgaagataaaaaccgccagttacaggagcgcttggaattggcagagcaaaagctgcaacagacactgaggaaggcagagacgctcccggaggtggaggcggagctggcccagagggtggcagcgctttccaaggctgaagagagacacggcaacattgaagaaaggttacgacagatggaagcacagttggaggagaagaatcaagaactgcagcgggcaaggcaaagagaaaaaatgaacgaagaacataataaacgtttatcagacactgttgacaagctgctttcagaatctaatgagaggcttcaacttcatcttaaagagagaatggctgctttggaagataagaactctcttttaagagaagttgaaagtgcaaaaaagcagttagaagaaacacaacacgataaggatcagcttgtcctaaacattgaagcactgagggctgaactagaccacatgagactaagaggtgcttcacttcatcatggccgaccccacttgggcagtgtcccagatttcaggttccccatggcagacggccacacagactcctacagcaccagtgcagtgctgcggcgcccacagaaaggccggctggcagccctgcgagatgagccttccaaggtacaaactcttaatgagcaggattgggaacgtgcccagcaagctagtgtcttggcaaatgtagcacaagcattcgagagtgatgctgacgtgtctgatggtgaagatgacagggacactctcctcagctcagttgacctgctatcgcccagcgggcaggccgacgcgcacacactagccatgatgcttcaggagcagctggacgccatcaacaaagagatcaggttgattcaggaagaaaaagaaaatacagagcagcgggcagaggagattgaaagtcgagttggcagtggaagtctagacaatcttggtcgttttagatcaatgagctccattcccccctaccctgcttcctcgcttgctagctcctcccctccgggcagtgggcgctccaccccacgaaggatccctcacagcccagctcgggaagtggacagactgggcgtcatgacccttttgccaccttccagagaagaggtacgagatgacaagacaaccataaagtgtgaaacctccccgccttcctccccgagagcccttcggttagaccggctgcacaaaggggcgctgcacaccgtcagccacgaggacatcagggacataaggaactccacaggctcccaggatggtcccgtgagcaaccccagcagtagcaacagtagccaggactcgctccacaaagccccaaagaagaaaggcattaagtcctccattggccgcttgtttggcaagaaagaaaagggccgacctggacaaactggcaaagaagcattaggacaagctggtgtttccgagacggataactcatctcaggatgccttgggacttagcaaattggggggacaggctgaaaaaaatcgtaaacttcaaaaaaagcatgaattgctggaggaagcccggagacaaggtttaccttttgcccaatgggacgggccaacggttgtggtctggctagagctctgggttgggatgccagcctggtatgtggctgcctgccgagcaaacgtgaaaagcggggccatcatgtcggccctgtccgacacagagatccagcgtgagattggcatcagcaaccccctgcacaggctgaagctgaggctggccatccaggagatcatgtcgctgaccagcccgtctgccccgcccacatctagaacgacactcgcctatggggacatgaaccacgagtggatcggcaacgagtggctccccagcctgggcctcccccagtaccgcagctacttcatggagtgccttgtagacgccaggatgctggaccacttgaccaagaaagaccttcgagggcagctgaaaatggtcgacagttttcacagaaacagtttccagtgtggaattatgtgcctgagaaggttaaattatgaccggaaagaactggaaagaaaaagagaagaaagtcagagtgaaataaaagacgtgcttgtttggagcaatgatcgagtgattcgctggatcctgtcaattggccttaaagaatatgcaaacaatcttatagagagtggtgttcacggagcacttctggccttagatgaaaccttcgacttcagtgcactggcactgctgttacagatcccgacgcagaacacacaggctcgtgctgtcttggaaagagaatttaacaaccttttggtcatggggactgatagaaggtttgatgaagatgatgataaaagctttaggagagcaccttcatggagaaaaaagtttagaccaaaggacattcgtggcttagctgctgggtcagcagagactctccctgcaaacttccgggtgacttcttctatgtcttccccctctatgcagccaaagaagatgcagatggacggcaatgtatcaggaacacagaggttggattctgctacagtcaggacttactcctgctaaagtctcctgttgtttacccacactacttctacagatgattatgcagcatttgaatccaacaaagactacattttggaatccagtggaatctttaatcttgttaatacttgttatatggaccctaagatattttattacagagtttttaattagtgaaaaattcatgaataccatagagaaaatattttagaatttaatgtttcttatatttatgtaaacttatgactcttcatttatatagttacttactttttcatgtatatccaggctataaatatcctttcaaatcatgttcttatacctaattttagtctttcaaatgaatgtactgtaatgcttgtatgtataaatcctatgaatagagggcttttgtaaattatgcatttattgtaattatcattaattttttaatgataaaccatgacaaaggattttacgtttataaaattatgacagaagccatgtgcattatcctttacggacgcagcctagctctacagcaatcatcctgaaataagcatacctaatttcaagcaattgttgtattttcatgactgaccttaactgtactttttctagcaagagatgctttattctgcagcatgaacagatttaaaatggctggtgttaaatatcagctcctaataagatgtggactgaaaacactatcacaacactatgagaagcccctagcactggttaacgctttcctagcctagtctctggatttggggagcttgtcttcagtggctgagactgtgagctgggagcagttctctcagctggagagactcgggatggggtaacctggggaccagtctagcccctgcaccctcttccctgcctctgctccttgggagcgggtggagagacacccatgtggctccccttagggccagcaccaagcaccacgctctcatcctgcaagtcggcgcacacagtggatgaaggcaggagacccagaaagcagtgcagtgcagctctaataaaggccttatttttcttatgtaaatcatctttttacatttgtttgtaaacatgtttaaagaacgaacctagtgggacatttttagactttgatgctctagccattttggattgtgtaagttgcagatgtggcttttactttttaaatggcatattaacaagccagcaaagtgtgtcagaccatggcgtggtatttattgtgcagcagatccagagacagaggcagcctgtcttttcagttggtttctgcttttaatttacttgtacaattcattgttactgttctgtttttctattaatcttttgtcaacttcctgattatgtaacaaagtatgtacagtctacttttgaactatttttatcacagtattatttattgctttctttcaataaagtactgaagcattttccactgcca

SEQ ID NO: 293809 - DNA, 5273 bp, Homo sapiens
gaattccgggcccccggccgtccctcttaaggctcttcctccgctccgccagtgtccggccgcgggccggccttagtgactggggcggcgggccccggggccgcggcgtggggcgggcaggcggacgccggccgcgggctgctttcgtcggctcccaagctctcccggagcgagcagccgcccgcgagccgccgcggagcctcctcgcccgctcccgccggcgagcaagatgatgtgcgaggtgatgccgaccatcagcgaagcagaaggcccccctggaggaggtggaggccatggttccggctccccttcacagccagatgcagattcacattttgaacagttgatggtctccatgctagaagaaagggaccgccttcttgatacactgagagagactcaagaaacgctggccttaacccaggggaagttacacgaggttggtcatgaaagagattccttgcagagacagctcaacacggcacttccacaggagttcgcagcacttactaaagaactcaatgtatgcagggaacagctccttgaaagggaagaagaaattgctgaactgaaagcagaaaggaataacaccaggctgctgttagagcatttggaatgccttgtctccaggcatgagcggtctcttaggatgaccgtggtgaagagacaagcgcagtctccagcaggcgtgtccagcgaagtggaagtgctgaaagcactgaagtccttatttgaacaccacaaagctctggatgaaaaggtgagagagcgattacgagtagcacttgaaagatgtagtttgttagaagaggaattaggtgccacacacaaagagctaatgattcttaaagaacagaataatcagaaaaaaactctaacagatggagtgctggacataaaccatgaacaagaaaatacaccaagcacgagtggaaagagatcttctgatggttctttaagccacgaggaagaccttgctaaagtaattgagctccaagaaatcataagtaagcagtcaagggaacagagccaaatgaaagaacgcctggcttccctttccagtcatgtgacagaactggaagaggatctggacacggctagaaaagatctcatcaaatctgaagaaatgaacacaaaattgcaacgagatgtccgtgaagccatggcccaaaaggaagatatggaagagagaatcactactcttgaaaaacgctacctcgctgcacagcgtgaagccacatctgtgcatgacctcaatgataaacttgaaaatgaaattgcaaataaagattctatgcatcgacagactgaagataaaaaccgccagttacaggagcgcttggaattggcagagcaaaagctgcaacagacactgaggaaggcagagacgctcccggaggtggaggcggagctggcccagagggtggcagcgctttccaaggctgaagagagacacggcaacattgaagaaaggttacgacagatggaagcacagttggaggagaagaatcaagaactgcagcgggcaaggcaaagagaaaaaatgaacgaagaacataataaacgtttatcagacactgttgacaagctgctttcagaatctaatgagaggcttcaacttcatcttaaagagagaatggctgctttggaagataagaactctcttttaagagaagttgaaagtgcaaaaaagcagttagaagaaacacaacacgataaggatcagcttgtcctaaacattgaagcactgagggctgaactagaccacatgagactaagaggtgcttcacttcatcatggccgaccccacttgggcagtgtcccagatttcaggttccccatggcagacggccacacagactcctacagcaccagtgcagtgctgcggcgcccacagaaaggccggctggcagccctgcgagatgagccttccaaggtacaaactcttaatgagcaggattgggaacgtgcccagcaagctagtgtcttggcaaatgtagcacaagcattcgagagtgatgctgacgtgtctgatggtgaagatgacagggacactctcctcagctcagttgacctgctatcgcccagcgggcaggccgacgcgcacacactagccatgatgcttcaggagcagctggacgccatcaacaaagagatcaggttgattcaggaagaaaaagaaaatacagagcagcgggcagaggagattgaaagtcgagttggcagtggaagtctagacaatcttggtcgttttagatcaatgagctccattcccccctaccctgcttcctcgcttgctagctcctcccctccgggcagtgggcgctccaccccacgaaggatccctcacagcccagctcgggaagtggacagactgggcgtcatgacccttcctagtgatttaaggaaacatcgtagaaagttgccaccttccagagaagaggtacgagatgacaagacaaccataaagtgtgaaacctccccgccttcctccccgagagcccttcggttagaccggctgcacaaaggggcgctgcacaccgtcagccacgaggacatcagggacataaggaactccacaggctcccaggatggtcccgtgagcaaccccagcagtagcaacagtagccaggactcgctccacaaagccccaaagaagaaaggcattaagtcctccattggccgcttgtttggcaagaaagaaaagggccgacctggacaaactggcaaagaagcattaggacaagctggtgtttccgagacggataactcatctcaggatgccttgggacttagcaaattggggggacaggctgaaaaaaatcgtaaacttcaaaaaaagcatgaattgctggaggaagcccggagacaaggtttaccttttgcccaatgggacgggccaacggttgtggtctggctagagctctgggttgggatgccagcctggtatgtggctgcctgccgagcaaacgtgaaaagcggggccatcatgtcggccctgtccgacacagagatccagcgtgagattggcatcagcaaccccctgcacaggctgaagctgaggctggccatccaggagatcatgtcgctgaccagcccgtctgccccgcccacatctagaacgacactcgcctatggggacatgaaccacgagtggatcggcaacgagtggctccccagcctgggcctcccccagtaccgcagctacttcatggagtgccttgtagacgccaggatgctggaccacttgaccaagaaagaccttcgagggcagctgaaaatggtcgacagttttcacagaaacagtttccagtgtggaattatgtgcctgagaaggttaaattatgaccggaaagaactggaaagaaaaagagaagaaagtcagagtgaaataaaagacgtgcttgtttggagcaatgatcgagtgattcgctggatcctgtcaattggccttaaagaatatgcaaacaatcttatagagagtggtgttcacggagcacttctggccttagatgaaaccttcgacttcagtgcactggcactgctgttacagatcccgacgcagaacacacaggctcgtgctgtcttggaaagagaatttaacaaccttttggtcatggggactgatagaaggtttgatgaagatgatgataaaagctttaggagagcaccttcatggagaaaaaagtttagaccaaaggacattcgtggcttagctgctgggtcagcagagactctccctgcaaacttccgggtgacttcttctatgtcttccccctctatgcagccaaagaagatgcagatggacggcaatgtatcaggaacacagaggttggattctgctacagtcaggacttactcctgctaaagtctcctgttgtttacccacactacttctacagatgattatgcagcatttgaatccaacaaagactacattttggaatccagtggaatctttaatcttgttaatacttgttatatggaccctaagatattttattacagagtttttaattagtgaaaaattcatgaataccatagagaaaatattttagaatttaatgtttcttatatttatgtaaacttatgactcttcatttatatagttacttactttttcatgtatatccaggctataaatatcctttcaaatcatgttcttatacctaattttagtctttcaaatgaatgtactgtaatgcttgtatgtataaatcctatgaatagagggcttttgtaaattatgcatttattgtaattatcattaattttttaatgataaaccatgacaaaggattttacgtttataaaattatgacagaagccatgtgcattatcctttacggacgcagcctagctctacagcaatcatcctgaaataagcatacctaatttcaagcaattgttgtattttcatgactgaccttaactgtactttttctagcaagagatgctttattctgcagcatgaacagatttaaaatggctggtgttaaatatcagctcctaataagatgtggactgaaaacactatcacaacactatgagaagcccctagcactggttaacgctttcctagcctagtctctggatttggggagcttgtcttcagtggctgagactgtgagctgggagcagttctctcagctggagagactcgggatggggtaacctggggaccagtctagcccctgcaccctcttccctgcctctgctccttgggagcgggtggagagacacccatgtggctccccttagggccagcaccaagcaccacgctctcatcctgcaagtcggcgcacacagtggatgaaggcaggagacccagaaagcagtgcagtgcagctctaataaaggccttatttttcttatgtaaatcatctttttacatttgtttgtaaacatgtttaaagaacgaacctagtgggacatttttagactttgatgctctagccattttggattgtgtaagttgcagatgtggcttttactttttaaatggcatattaacaagccagcaaagtgtgtcagaccatggcgtggtatttattgtgcagcagatccagagacagaggcagcctgtcttttcagttggtttctgcttttaatttacttgtacaattcattgttactgttctgtttttctattaatcttttgtcaacttcctgattatgtaacaaagtatgtacagtctacttttgaactatttttatcacagtattatttattgctttctttcaataaagtactgaagcattttccactgcca

SEQ ID NO: 293810 - DNA, 3204 bp, Homo sapiens
agggcgaggagaaagtcccacagcctttccagtcctggtcttggaagccacagccttcacttcctctctattctgttcatttgagtgaggtgctgagtcctgcccacactcagcgtttggggttgattcaggaagaaaaagaaaatacagagcagcgggcagaggagattgaaagtcgagttggcagtggaagtctagacaatcttggtcgttttagatcaatgagctccattcccccctaccctgcttcctcgcttgctagctcctcccctccgggcagtgggcgctccaccccacgaaggatccctcacagcccagctcgggaagtggacagactgggcgtcatgacccttttgccaccttccagagaagaggtacgagatgacaagacaaccataaagtgtgaaacctccccgccttcctccccgagagcccttcggttagaccggctgcacaaaggggcgctgcacaccgtcagccacgaggacatcagggacataaggaactccacaggctcccaggatggtcccgtgagcaaccccagcagtagcaacagtagccaggactcgctccacaaagccccaaagaagaaaggcattaagtcctccattggccgcttgtttggcaagaaagaaaagggccgacctggacaaactggcaaagaagcattaggacaagctggtgtttccgagacggataactcatctcaggatgccttgggacttagcaaattggggggacaggctgaaaaaaatcgtaaacttcaaaaaaagcatgaattgctggaggaagcccggagacaaggtttaccttttgcccaatgggacgggccaacggttgtggtctggctagagctctgggttgggatgccagcctggtatgtggctgcctgccgagcaaacgtgaaaagcggggccatcatgtcggccctgtccgacacagagatccagcgtgagattggcatcagcaaccccctgcacaggctgaagctgaggctggccatccaggagatcatgtcgctgaccagcccgtctgccccgcccacatctagaacgacactcgcctatggggacatgaaccacgagtggatcggcaacgagtggctccccagcctgggcctcccccagtaccgcagctacttcatggagtgccttgtagacgccaggatgctggaccacttgaccaagaaagaccttcgagggcagctgaaaatggtcgacagttttcacagaaacagtttccagtgtggaattatgtgcctgagaaggttaaattatgaccggaaagaactggaaagaaaaagagaagaaagtcagagtgaaataaaagacgtgcttgtttggagcaatgatcgagtgattcgctggatcctgtcaattggccttaaagaatatgcaaacaatcttatagagagtggtgttcacggagcacttctggccttagatgaaaccttcgacttcagtgcactggcactgctgttacagatcccgacgcagaacacacaggctcgtgctgtcttggaaagagaatttaacaaccttttggtcatggggactgatagaaggtttgatgaagatgatgataaaagctttaggagagcaccttcatggagaaaaaagtttagaccaaaggacattcgtggcttagctgctgggtcagcagagactctccctgcaaacttccgggtgacttcttctatgtcttccccctctatgcagccaaagaagatgcagatggacggcaatgtatcaggaacacagaggttggattctgctacagtcaggacttactcctgctaaagtctcctgttgtttacccacactacttctacagatgattatgcagcatttgaatccaacaaagactacattttggaatccagtggaatctttaatcttgttaatacttgttatatggaccctaagatattttattacagagtttttaattagtgaaaaattcatgaataccatagagaaaatattttagaatttaatgtttcttatatttatgtaaacttatgactcttcatttatatagttacttactttttcatgtatatccaggctataaatatcctttcaaatcatgttcttatacctaattttagtctttcaaatgaatgtactgtaatgcttgtatgtataaatcctatgaatagagggcttttgtaaattatgcatttattgtaattatcattaattttttaatgataaaccatgacaaaggattttacgtttataaaattatgacagaagccatgtgcattatcctttacggacgcagcctagctctacagcaatcatcctgaaataagcatacctaatttcaagcaattgttgtattttcatgactgaccttaactgtactttttctagcaagagatgctttattctgcagcatgaacagatttaaaatggctggtgttaaatatcagctcctaataagatgtggactgaaaacactatcacaacactatgagaagcccctagcactggttaacgctttcctagcctagtctctggatttggggagcttgtcttcagtggctgagactgtgagctgggagcagttctctcagctggagagactcgggatggggtaacctggggaccagtctagcccctgcaccctcttccctgcctctgctccttgggagcgggtggagagacacccatgtggctccccttagggccagcaccaagcaccacgctctcatcctgcaagtcggcgcacacagtggatgaaggcaggagacccagaaagcagtgcagtgcagctctaataaaggccttatttttcttatgtaaatcatctttttacatttgtttgtaaacatgtttaaagaacgaacctagtgggacatttttagactttgatgctctagccattttggattgtgtaagttgcagatgtggcttttactttttaaatggcatattaacaagccagcaaagtgtgtcagaccatggcgtggtatttattgtgcagcagatccagagacagaggcagcctgtcttttcagttggtttctgcttttaatttacttgtacaattcattgttactgttctgtttttctattaatcttttgtcaacttcctgattatgtaacaaagtatgtacagtctacttttgaactatttttatcacagtattatttattgctttctttcaataaagtactgaagcattttccactgcca

SEQ ID NO: 293811 - DNA, 5333 bp, Homo sapiens
gaattccgggcccccggccgtccctcttaaggctcttcctccgctccgccagtgtccggccgcgggccggccttagtgactggggcggcgggccccggggccgcggcgtggggcgggcaggcggacgccggccgcgggctgctttcgtcggctcccaagctctcccggagcgagcagccgcccgcgagccgccgcggagcctcctcgcccgctcccgccggcgagcaagatgatgtgcgaggtgatgccgaccatcagcgaagcagaaggcccccctggaggaggtggaggccatggttccggctccccttcacagccagatgcagattcacattttgaacagttgatggtctccatgctagaagaaagggaccgccttcttgatacactgagagagactcaagaaacgctggccttaacccaggggaagttacacgaggttggtcatgaaagagattccttgcagagacagctcaacacggcacttccacaggagttcgcagcacttactaaagaactcaatgtatgcagggaacagctccttgaaagggaagaagaaattgctgaactgaaagcagaaaggaataacaccaggctgctgttagagcatttggaatgccttgtctccaggcatgagcggtctcttaggatgaccgtggtgaagagacaagcgcagtctccagcaggcgtgtccagcgaagtggaagtgctgaaagcactgaagtccttatttgaacaccacaaagctctggatgaaaaggtgagagagcgattacgagtagcacttgaaagatgtagtttgttagaagaggaattaggtgccacacacaaagagctaatgattcttaaagaacagaataatcagaaaaaaactctaacagatggagtgctggacataaaccatgaacaagaaaatacaccaagcacgagtggaaagagatcttctgatggttctttaagccacgaggaagaccttgctaaagtaattgagctccaagaaatcataagtaagcagtcaagggaacagagccaaatgaaagaacgcctggcttccctttccagtcatgtgacagaactggaagaggatctggacacggctagaaaagatctcatcaaatctgaagaaatgaacacaaaattgcaacgagatgtccgtgaagccatggcccaaaaggaagatatggaagagagaatcactactcttgaaaaacgctacctcgctgcacagcgtgaagccacatctgtgcatgacctcaatgataaacttgaaaatgaaattgcaaataaagattctatgcatcgacagactgaagataaaaaccgccagttacaggagcgcttggaattggcagagcaaaagctgcaacagacactgaggaaggcagagacgctcccggaggtggaggcggagctggcccagagggtggcagcgctttccaaggctgaagagagacacggcaacattgaagaaaggttacgacagatggaagcacagttggaggagaagaatcaagaactgcagcgggcaaggcaaagagaaaaaatgaacgaagaacataataaacgtttatcagacactgttgacaagctgctttcagaatctaatgagaggcttcaacttcatcttaaagagagaatggctgctttggaagataagaactctcttttaagagaagttgaaagtgcaaaaaagcagttagaagaaacacaacacgataaggatcagcttgtcctaaacattgaagcactgagggctgaactagaccacatgagactaagaggtgcttcacttcatcatggccgaccccacttgggcagtgtcccagatttcaggttccccatggcagacggccacacagactcctacagcaccagtgcagtgctgcggcgcccacagaaaggccggctggcagccctgcgagatgagccttccaaggtacaaactcttaatgagcaggattgggaacgtgcccagcaagctagtgtcttggcaaatgtagcacaagcattcgagagtgatgctgacgtgtctgatggtgaagatgacagggacactctcctcagctcagttgacctgctatcgcccagcgggcaggccgacgcgcacacactagccatgatgcttcaggagcagctggacgccatcaacaaagagatcaggttgattcaggaagaaaaagaaaatacagagcagcgggcagaggagattgaaagtcgagttggcagtggaagtctagacaatcttggtcgttttagatcaatgagctccattcccccctaccctgcttcctcgcttgctagctcctcccctccgggcagtgggcgctccaccccacgaaggatccctcacagcccagctcgggaagtggacagactgggcgtcatgacccttttgccaccttccagagaagaggtacgagatgacaagacaaccataaagtgtgaaacctccccgccttcctccccgagagcccttcggttagaccggctgcacaaaggggcgctgcacaccgtcagccacgaggacatcagggacataaggaactccacaggctcccaggatggtcccgtgagcaaccccagcagtagcaacagtagccaggactcgctccacaaagccccaaagaagaaaggcattaagtcctccattggccgcttgtttggcaagaaagaaaagggccgacctggacaaactggcaaagaagcattaggacaagctggtgtttccgagacggataactcatctcaggatgccttgggacttagcaaattggggggacaggctgaaaaaaatcgtaaacttcaaaaaaagcatgaattgctggaggaagcccggagacaaggtttaccttttgcccaatgggacgggccaacggttgtggtctggctagagctctgggttgggatgccagcctggtatgtggctgcctgccgagcaaacgtgaaaagcggggccatcatgtcggccctgtccgacacagagatccagcgtgagattggcatcagcaaccccctgcacaggctgaagctgaggctggccatccaggagatcatgtcgctgaccagcccgtctgccccgcccacatctagaacgaccacaggaaatgtctggttaacacacgaagagatggaaacgctcgcagccacgccgcaaacggaagatgaggagggaagctgggctcagacactcgcctatggggacatgaaccacgagtggatcggcaacgagtggctccccagcctgggcctcccccagtaccgcagctacttcatggagtgccttgtagacgccaggatgctggaccacttgaccaagaaagaccttcgagggcagctgaaaatggtcgacagttttcacagaaacagtttccagtgtggaattatgtgcctgagaaggttaaattatgaccggaaagaactggaaagaaaaagagaagaaagtcagagtgaaataaaagacgtgcttgtttggagcaatgatcgagtgattcgctggatcctgtcaattggccttaaagaatatgcaaacaatcttatagagagtggtgttcacggagcacttctggccttagatgaaaccttcgacttcagtgcactggcactgctgttacagatcccgacgcagaacacacaggctcgtgctgtcttggaaagagaatttaacaaccttttggtcatggggactgatagaaggtttgatgaagatgatgataaaagctttaggagagcaccttcatggagaaaaaagtttagaccaaaggacattcgtggcttagctgctgggtcagcagagactctccctgcaaacttccgggtgacttcttctatgtcttccccctctatgcagccaaagaagatgcagatggacggcaatgtatcaggaacacagaggttggattctgctacagtcaggacttactcctgctaaagtctcctgttgtttacccacactacttctacagatgattatgcagcatttgaatccaacaaagactacattttggaatccagtggaatctttaatcttgttaatacttgttatatggaccctaagatattttattacagagtttttaattagtgaaaaattcatgaataccatagagaaaatattttagaatttaatgtttcttatatttatgtaaacttatgactcttcatttatatagttacttactttttcatgtatatccaggctataaatatcctttcaaatcatgttcttatacctaattttagtctttcaaatgaatgtactgtaatgcttgtatgtataaatcctatgaatagagggcttttgtaaattatgcatttattgtaattatcattaattttttaatgataaaccatgacaaaggattttacgtttataaaattatgacagaagccatgtgcattatcctttacggacgcagcctagctctacagcaatcatcctgaaataagcatacctaatttcaagcaattgttgtattttcatgactgaccttaactgtactttttctagcaagagatgctttattctgcagcatgaacagatttaaaatggctggtgttaaatatcagctcctaataagatgtggactgaaaacactatcacaacactatgagaagcccctagcactggttaacgctttcctagcctagtctctggatttggggagcttgtcttcagtggctgagactgtgagctgggagcagttctctcagctggagagactcgggatggggtaacctggggaccagtctagcccctgcaccctcttccctgcctctgctccttgggagcgggtggagagacacccatgtggctccccttagggccagcaccaagcaccacgctctcatcctgcaagtcggcgcacacagtggatgaaggcaggagacccagaaagcagtgcagtgcagctctaataaaggccttatttttcttatgtaaatcatctttttacatttgtttgtaaacatgtttaaagaacgaacctagtgggacatttttagactttgatgctctagccattttggattgtgtaagttgcagatgtggcttttactttttaaatggcatattaacaagccagcaaagtgtgtcagaccatggcgtggtatttattgtgcagcagatccagagacagaggcagcctgtcttttcagttggtttctgcttttaatttacttgtacaattcattgttactgttctgtttttctattaatcttttgtcaacttcctgattatgtaacaaagtatgtacagtctacttttgaactatttttatcacagtattatttattgctttctttcaataaagtactgaagcattttccactgcca

SEQ ID NO: 293812 - DNA, 3458 bp, Homo sapiens
agggcgaggagaaagtcccacagcctttccagtcctggtcttggaagccacagccttcacttcctctctattctgttcatttgagtgaggtgctgagtcctgcccacactcagcgtttggggtacaaactcttaatgagcaggattgggaacgtgcccagcaagctagtgtcttggcaaatgtagcacaagcattcgagagtgatgctgacgtgtctgatggtgaagatgacagggacactctcctcagctcagttgacctgctatcgcccagcgggcaggccgacgcgcacacactagccatgatgcttcaggagcagctggacgccatcaacaaagagatcaggttgattcaggaagaaaaagaaaatacagagcagcgggcagaggagattgaaagtcgagttggcagtggaagtctagacaatcttggtcgttttagatcaatgagctccattcccccctaccctgcttcctcgcttgctagctcctcccctccgggcagtgggcgctccaccccacgaaggatccctcacagcccagctcgggaagtggacagactgggcgtcatgacccttcctagtgatttaaggaaacatcgtagaaagttgccaccttccagagaagaggtacgagatgacaagacaaccataaagtgtgaaacctccccgccttcctccccgagagcccttcggttagaccggctgcacaaaggggcgctgcacaccgtcagccacgaggacatcagggacataaggaactccacaggctcccaggatggtcccgtgagcaaccccagcagtagcaacagtagccaggactcgctccacaaagccccaaagaagaaaggcattaagtcctccattggccgcttgtttggcaagaaagaaaagggccgacctggacaaactggcaaagaagcattaggacaagctggtgtttccgagacggataactcatctcaggatgccttgggacttagcaaattggggggacaggctgaaaaaaatcgtaaacttcaaaaaaagcatgaattgctggaggaagcccggagacaaggtttaccttttgcccaatgggacgggccaacggttgtggtctggctagagctctgggttgggatgccagcctggtatgtggctgcctgccgagcaaacgtgaaaagcggggccatcatgtcggccctgtccgacacagagatccagcgtgagattggcatcagcaaccccctgcacaggctgaagctgaggctggccatccaggagatcatgtcgctgaccagcccgtctgccccgcccacatctagaacgacactcgcctatggggacatgaaccacgagtggatcggcaacgagtggctccccagcctgggcctcccccagtaccgcagctacttcatggagtgccttgtagacgccaggatgctggaccacttgaccaagaaagaccttcgagggcagctgaaaatggtcgacagttttcacagaaacagtttccagtgtggaattatgtgcctgagaaggttaaattatgaccggaaagaactggaaagaaaaagagaagaaagtcagagtgaaataaaagacgtgcttgtttggagcaatgatcgagtgattcgctggatcctgtcaattggccttaaagaatatgcaaacaatcttatagagagtggtgttcacggagcacttctggccttagatgaaaccttcgacttcagtgcactggcactgctgttacagatcccgacgcagaacacacaggctcgtgctgtcttggaaagagaatttaacaaccttttggtcatggggactgatagaaggtttgatgaagatgatgataaaagctttaggagagcaccttcatggagaaaaaagtttagaccaaaggacattcgtggcttagctgctgggtcagcagagactctccctgcaaacttccgggtgacttcttctatgtcttccccctctatgcagccaaagaagatgcagatggacggcaatgtatcaggaacacagaggttggattctgctacagtcaggacttactcctgctaaagtctcctgttgtttacccacactacttctacagatgattatgcagcatttgaatccaacaaagactacattttggaatccagtggaatctttaatcttgttaatacttgttatatggaccctaagatattttattacagagtttttaattagtgaaaaattcatgaataccatagagaaaatattttagaatttaatgtttcttatatttatgtaaacttatgactcttcatttatatagttacttactttttcatgtatatccaggctataaatatcctttcaaatcatgttcttatacctaattttagtctttcaaatgaatgtactgtaatgcttgtatgtataaatcctatgaatagagggcttttgtaaattatgcatttattgtaattatcattaattttttaatgataaaccatgacaaaggattttacgtttataaaattatgacagaagccatgtgcattatcctttacggacgcagcctagctctacagcaatcatcctgaaataagcatacctaatttcaagcaattgttgtattttcatgactgaccttaactgtactttttctagcaagagatgctttattctgcagcatgaacagatttaaaatggctggtgttaaatatcagctcctaataagatgtggactgaaaacactatcacaacactatgagaagcccctagcactggttaacgctttcctagcctagtctctggatttggggagcttgtcttcagtggctgagactgtgagctgggagcagttctctcagctggagagactcgggatggggtaacctggggaccagtctagcccctgcaccctcttccctgcctctgctccttgggagcgggtggagagacacccatgtggctccccttagggccagcaccaagcaccacgctctcatcctgcaagtcggcgcacacagtggatgaaggcaggagacccagaaagcagtgcagtgcagctctaataaaggccttatttttcttatgtaaatcatctttttacatttgtttgtaaacatgtttaaagaacgaacctagtgggacatttttagactttgatgctctagccattttggattgtgtaagttgcagatgtggcttttactttttaaatggcatattaacaagccagcaaagtgtgtcagaccatggcgtggtatttattgtgcagcagatccagagacagaggcagcctgtcttttcagttggtttctgcttttaatttacttgtacaattcattgttactgttctgtttttctattaatcttttgtcaacttcctgattatgtaacaaagtatgtacagtctacttttgaactatttttatcacagtattatttattgctttctttcaataaagtactgaagcattttccactgcca

SEQ ID NO: 293813 - DNA, 2952 bp, Homo sapiens
gcacagcaaatcgattttcaaagaagtttatggctataatttaaggcctgagtttttcacagtctgctgttaactaactttgcacttctctcacccctcagttgccaccttccagagaagaggtacgagatgacaagacaaccataaagtgtgaaacctccccgccttcctccccgagagcccttcggttagaccggctgcacaaaggggcgctgcacaccgtcagccacgaggacatcagggacataaggaactccacaggctcccaggatggtcccgtgagcaaccccagcagtagcaacagtagccaggactcgctccacaaagccccaaagaagaaaggcattaagtcctccattggccgcttgtttggcaagaaagaaaagggccgacctggacaaactggcaaagaagcattaggacaagctggtgtttccgagacggataactcatctcaggatgccttgggacttagcaaattggggggacaggctgaaaaaaatcgtaaacttcaaaaaaagcatgaattgctggaggaagcccggagacaaggtttaccttttgcccaatgggacgggccaacggttgtggtctggctagagctctgggttgggatgccagcctggtatgtggctgcctgccgagcaaacgtgaaaagcggggccatcatgtcggccctgtccgacacagagatccagcgtgagattggcatcagcaaccccctgcacaggctgaagctgaggctggccatccaggagatcatgtcgctgaccagcccgtctgccccgcccacatctagaacgacactcgcctatggggacatgaaccacgagtggatcggcaacgagtggctccccagcctgggcctcccccagtaccgcagctacttcatggagtgccttgtagacgccaggatgctggaccacttgaccaagaaagaccttcgagggcagctgaaaatggtcgacagttttcacagaaacagtttccagtgtggaattatgtgcctgagaaggttaaattatgaccggaaagaactggaaagaaaaagagaagaaagtcagagtgaaataaaagacgtgcttgtttggagcaatgatcgagtgattcgctggatcctgtcaattggccttaaagaatatgcaaacaatcttatagagagtggtgttcacggagcacttctggccttagatgaaaccttcgacttcagtgcactggcactgctgttacagatcccgacgcagaacacacaggctcgtgctgtcttggaaagagaatttaacaaccttttggtcatggggactgatagaaggtttgatgaagatgatgataaaagctttaggagagcaccttcatggagaaaaaagtttagaccaaaggacattcgtggcttagctgctgggtcagcagagactctccctgcaaacttccgggtgacttcttctatgtcttccccctctatgcagccaaagaagatgcagatggacggcaatgtatcaggaacacagaggttggattctgctacagtcaggacttactcctgctaaagtctcctgttgtttacccacactacttctacagatgattatgcagcatttgaatccaacaaagactacattttggaatccagtggaatctttaatcttgttaatacttgttatatggaccctaagatattttattacagagtttttaattagtgaaaaattcatgaataccatagagaaaatattttagaatttaatgtttcttatatttatgtaaacttatgactcttcatttatatagttacttactttttcatgtatatccaggctataaatatcctttcaaatcatgttcttatacctaattttagtctttcaaatgaatgtactgtaatgcttgtatgtataaatcctatgaatagagggcttttgtaaattatgcatttattgtaattatcattaattttttaatgataaaccatgacaaaggattttacgtttataaaattatgacagaagccatgtgcattatcctttacggacgcagcctagctctacagcaatcatcctgaaataagcatacctaatttcaagcaattgttgtattttcatgactgaccttaactgtactttttctagcaagagatgctttattctgcagcatgaacagatttaaaatggctggtgttaaatatcagctcctaataagatgtggactgaaaacactatcacaacactatgagaagcccctagcactggttaacgctttcctagcctagtctctggatttggggagcttgtcttcagtggctgagactgtgagctgggagcagttctctcagctggagagactcgggatggggtaacctggggaccagtctagcccctgcaccctcttccctgcctctgctccttgggagcgggtggagagacacccatgtggctccccttagggccagcaccaagcaccacgctctcatcctgcaagtcggcgcacacagtggatgaaggcaggagacccagaaagcagtgcagtgcagctctaataaaggccttatttttcttatgtaaatcatctttttacatttgtttgtaaacatgtttaaagaacgaacctagtgggacatttttagactttgatgctctagccattttggattgtgtaagttgcagatgtggcttttactttttaaatggcatattaacaagccagcaaagtgtgtcagaccatggcgtggtatttattgtgcagcagatccagagacagaggcagcctgtcttttcagttggtttctgcttttaatttacttgtacaattcattgttactgttctgtttttctattaatcttttgtcaacttcctgattatgtaacaaagtatgtacagtctacttttgaactatttttatcacagtattatttattgctttctttcaataaagtactgaagcattttccactgcca

SEQ ID NO: 293814 - DNA, 2610 bp, Homo sapiens
agtcatgctgctggtagcccagaaattgggatgcaaaatggccaaccttgttcttgaacacatgtggcacaatggagcggtggtggccagaccacgcctgcttcaccaggtctgcataggcctctgcgatccctgcgaacctatgacaggctgaaaaaaatcgtaaacttcaaaaaaagcatgaattgctggaggaagcccggagacaaggtttaccttttgcccaatgggacgggccaacggttgtggtctggctagagctctgggttgggatgccagcctggtatgtggctgcctgccgagcaaacgtgaaaagcggggccatcatgtcggccctgtccgacacagagatccagcgtgagattggcatcagcaaccccctgcacaggctgaagctgaggctggccatccaggagatcatgtcgctgaccagcccgtctgccccgcccacatctagaacgacactcgcctatggggacatgaaccacgagtggatcggcaacgagtggctccccagcctgggcctcccccagtaccgcagctacttcatggagtgccttgtagacgccaggatgctggaccacttgaccaagaaagaccttcgagggcagctgaaaatggtcgacagttttcacagaaacagtttccagtgtggaattatgtgcctgagaaggttaaattatgaccggaaagaactggaaagaaaaagagaagaaagtcagagtgaaataaaagacgtgcttgtttggagcaatgatcgagtgattcgctggatcctgtcaattggccttaaagaatatgcaaacaatcttatagagagtggtgttcacggagcacttctggccttagatgaaaccttcgacttcagtgcactggcactgctgttacagatcccgacgcagaacacacaggctcgtgctgtcttggaaagagaatttaacaaccttttggtcatggggactgatagaaggtttgatgaagatgatgataaaagctttaggagagcaccttcatggagaaaaaagtttagaccaaaggacattcgtggcttagctgctgggtcagcagagactctccctgcaaacttccgggtgacttcttctatgtcttccccctctatgcagccaaagaagatgcagatggacggcaatgtatcaggaacacagaggttggattctgctacagtcaggacttactcctgctaaagtctcctgttgtttacccacactacttctacagatgattatgcagcatttgaatccaacaaagactacattttggaatccagtggaatctttaatcttgttaatacttgttatatggaccctaagatattttattacagagtttttaattagtgaaaaattcatgaataccatagagaaaatattttagaatttaatgtttcttatatttatgtaaacttatgactcttcatttatatagttacttactttttcatgtatatccaggctataaatatcctttcaaatcatgttcttatacctaattttagtctttcaaatgaatgtactgtaatgcttgtatgtataaatcctatgaatagagggcttttgtaaattatgcatttattgtaattatcattaattttttaatgataaaccatgacaaaggattttacgtttataaaattatgacagaagccatgtgcattatcctttacggacgcagcctagctctacagcaatcatcctgaaataagcatacctaatttcaagcaattgttgtattttcatgactgaccttaactgtactttttctagcaagagatgctttattctgcagcatgaacagatttaaaatggctggtgttaaatatcagctcctaataagatgtggactgaaaacactatcacaacactatgagaagcccctagcactggttaacgctttcctagcctagtctctggatttggggagcttgtcttcagtggctgagactgtgagctgggagcagttctctcagctggagagactcgggatggggtaacctggggaccagtctagcccctgcaccctcttccctgcctctgctccttgggagcgggtggagagacacccatgtggctccccttagggccagcaccaagcaccacgctctcatcctgcaagtcggcgcacacagtggatgaaggcaggagacccagaaagcagtgcagtgcagctctaataaaggccttatttttcttatgtaaatcatctttttacatttgtttgtaaacatgtttaaagaacgaacctagtgggacatttttagactttgatgctctagccattttggattgtgtaagttgcagatgtggcttttactttttaaatggcatattaacaagccagcaaagtgtgtcagaccatggcgtggtatttattgtgcagcagatccagagacagaggcagcctgtcttttcagttggtttctgcttttaatttacttgtacaattcattgttactgttctgtttttctattaatcttttgtcaacttcctgattatgtaacaaagtatgtacagtctacttttgaactatttttatcacagtattatttattgctttctttcaataaagtactgaagcattttccactgcca

SEQ ID NO: 293815 - DNA, 2784 bp, Homo sapiens
ccttgccctggatgtggttggtgcactggggtcaccttagaccacaggaaatgtctggttaacacacgaagagatggaaacgctcgcagccacgccgcaaacggttagtcacgccccacagcctgcactcctcccagcgcgttttccacttaagaccgtctgggttctttgcctttttgttgaaaacaaaatgttgttttccattcagtcgttccagataagtatttcctttagttattagttgaaatgtgtaagtagaatttgtattttattttagattttttccaggaacttcaagttggtagactctgtcttttagaatagctttaatctagctctccttttggagagatctcagttgagcctccatgtgactgactgtgtggccctttctccttccatgaatatgcttggcacggagagagtctgctccttgcatgagaagttgaaattgttggttttgcatgagttttgcatgatgctttgatagtctgaactttttcactcagtgaagctgcatcttccctgcagagttgcgttgcctgcattaccgagctcaccaatactaatagttatgttcttttgcattcctaaccacgtaaccccaggaagatgaggagggaagctgggctcagacactcgcctatggggacatgaaccacgagtggatcggcaacgagtggctccccagcctgggcctcccccagtaccgcagctacttcatggagtgccttgtagacgccaggatgctggaccacttgaccaagaaagaccttcgagggcagctgaaaatggtcgacagttttcacagaaacagtttccagtgtggaattatgtgcctgagaaggttaaattatgaccggaaagaactggaaagaaaaagagaagaaagtcagagtgaaataaaagacgtgcttgtttggagcaatgatcgagtgattcgctggatcctgtcaattggccttaaagaatatgcaaacaatcttatagagagtggtgttcacggagcacttctggccttagatgaaaccttcgacttcagtgcactggcactgctgttacagatcccgacgcagaacacacaggctcgtgctgtcttggaaagagaatttaacaaccttttggtcatggggactgatagaaggtttgatgaagatgatgataaaagctttaggagagcaccttcatggagaaaaaagtttagaccaaaggacattcgtggcttagctgctgggtcagcagagactctccctgcaaacttccgggtgacttcttctatgtcttccccctctatgcagccaaagaagatgcagatggacggcaatgtatcaggaacacagaggttggattctgctacagtcaggacttactcctgctaaagtctcctgttgtttacccacactacttctacagatgattatgcagcatttgaatccaacaaagactacattttggaatccagtggaatctttaatcttgttaatacttgttatatggaccctaagatattttattacagagtttttaattagtgaaaaattcatgaataccatagagaaaatattttagaatttaatgtttcttatatttatgtaaacttatgactcttcatttatatagttacttactttttcatgtatatccaggctataaatatcctttcaaatcatgttcttatacctaattttagtctttcaaatgaatgtactgtaatgcttgtatgtataaatcctatgaatagagggcttttgtaaattatgcatttattgtaattatcattaattttttaatgataaaccatgacaaaggattttacgtttataaaattatgacagaagccatgtgcattatcctttacggacgcagcctagctctacagcaatcatcctgaaataagcatacctaatttcaagcaattgttgtattttcatgactgaccttaactgtactttttctagcaagagatgctttattctgcagcatgaacagatttaaaatggctggtgttaaatatcagctcctaataagatgtggactgaaaacactatcacaacactatgagaagcccctagcactggttaacgctttcctagcctagtctctggatttggggagcttgtcttcagtggctgagactgtgagctgggagcagttctctcagctggagagactcgggatggggtaacctggggaccagtctagcccctgcaccctcttccctgcctctgctccttgggagcgggtggagagacacccatgtggctccccttagggccagcaccaagcaccacgctctcatcctgcaagtcggcgcacacagtggatgaaggcaggagacccagaaagcagtgcagtgcagctctaataaaggccttatttttcttatgtaaatcatctttttacatttgtttgtaaacatgtttaaagaacgaacctagtgggacatttttagactttgatgctctagccattttggattgtgtaagttgcagatgtggcttttactttttaaatggcatattaacaagccagcaaagtgtgtcagaccatggcgtggtatttattgtgcagcagatccagagacagaggcagcctgtcttttcagttggtttctgcttttaatttacttgtacaattcattgttactgttctgtttttctattaatcttttgtcaacttcctgattatgtaacaaagtatgtacagtctacttttgaactatttttatcacagtattatttattgctttctttcaataaagtactgaagcattttccactgcca

SEQ ID NO: 293816 - DNA, 2273 bp, Homo sapiens
ctgtttcagtgctgggagtaaacactgtgcagtgggtgtctcttctagttcagatgttctctggactgacatcacctggtatgttttttttccagaaggctgctaaggcagcccaggagaagagacactcgcctatggggacatgaaccacgagtggatcggcaacgagtggctccccagcctgggcctcccccagtaccgcagctacttcatggagtgccttgtagacgccaggatgctggaccacttgaccaagaaagaccttcgagggcagctgaaaatggtcgacagttttcacagaaacagtttccagtgtggaattatgtgcctgagaaggttaaattatgaccggaaagaactggaaagaaaaagagaagaaagtcagagtgaaataaaagacgtgcttgtttggagcaatgatcgagtgattcgctggatcctgtcaattggccttaaagaatatgcaaacaatcttatagagagtggtgttcacggagcacttctggccttagatgaaaccttcgacttcagtgcactggcactgctgttacagatcccgacgcagaacacacaggctcgtgctgtcttggaaagagaatttaacaaccttttggtcatggggactgatagaaggtttgatgaagatgatgataaaagctttaggagagcaccttcatggagaaaaaagtttagaccaaaggacattcgtggcttagctgctgggtcagcagagactctccctgcaaacttccgggtgacttcttctatgtcttccccctctatgcagccaaagaagatgcagatggacggcaatgtatcaggaacacagaggttggattctgctacagtcaggacttactcctgctaaagtctcctgttgtttacccacactacttctacagatgattatgcagcatttgaatccaacaaagactacattttggaatccagtggaatctttaatcttgttaatacttgttatatggaccctaagatattttattacagagtttttaattagtgaaaaattcatgaataccatagagaaaatattttagaatttaatgtttcttatatttatgtaaacttatgactcttcatttatatagttacttactttttcatgtatatccaggctataaatatcctttcaaatcatgttcttatacctaattttagtctttcaaatgaatgtactgtaatgcttgtatgtataaatcctatgaatagagggcttttgtaaattatgcatttattgtaattatcattaattttttaatgataaaccatgacaaaggattttacgtttataaaattatgacagaagccatgtgcattatcctttacggacgcagcctagctctacagcaatcatcctgaaataagcatacctaatttcaagcaattgttgtattttcatgactgaccttaactgtactttttctagcaagagatgctttattctgcagcatgaacagatttaaaatggctggtgttaaatatcagctcctaataagatgtggactgaaaacactatcacaacactatgagaagcccctagcactggttaacgctttcctagcctagtctctggatttggggagcttgtcttcagtggctgagactgtgagctgggagcagttctctcagctggagagactcgggatggggtaacctggggaccagtctagcccctgcaccctcttccctgcctctgctccttgggagcgggtggagagacacccatgtggctccccttagggccagcaccaagcaccacgctctcatcctgcaagtcggcgcacacagtggatgaaggcaggagacccagaaagcagtgcagtgcagctctaataaaggccttatttttcttatgtaaatcatctttttacatttgtttgtaaacatgtttaaagaacgaacctagtgggacatttttagactttgatgctctagccattttggattgtgtaagttgcagatgtggcttttactttttaaatggcatattaacaagccagcaaagtgtgtcagaccatggcgtggtatttattgtgcagcagatccagagacagaggcagcctgtcttttcagttggtttctgcttttaatttacttgtacaattcattgttactgttctgtttttctattaatcttttgtcaacttcctgattatgtaacaaagtatgtacagtctacttttgaactatttttatcacagtattatttattgctttctttcaataaagtactgaagcattttccactgcca

SEQ ID NO: 293817 - DNA, 4693 bp, Homo sapiens
gaattccgggcccccggccgtccctcttaaggctcttcctccgctccgccagtgtccggccgcgggccggccttagtgactggggcggcgggccccggggccgcggcgtggggcgggcaggcggacgccggccgcgggctgctttcgtcggctcccaagctctcccggagcgagcagccgcccgcgagccgccgcggagcctcctcgcccgctcccgccggcgagcaagatgatgtgcgaggtgatgccgaccatcagcgaagcagaaggcccccctggaggaggtggaggccatggttccggctccccttcacagccagatgcagattcacattttgaacagttgatggtctccatgctagaagaaagggaccgccttcttgatacactgagagagactcaagaaacgctggccttaacccaggggaagttacacgaggttggtcatgaaagagattccttgcagagacagctcaacacggcacttccacaggagttcgcagcacttactaaagaactcaatgtatgcagggaacagctccttgaaagggaagaagaaattgctgaactgaaagcagaaaggaataacaccaggctgctgttagagcatttggaatgccttgtctccaggcatgagcggtctcttaggatgaccgtggtgaagagacaagcgcagtctccagcaggcgtgtccagcgaagtggaagtgctgaaagcactgaagtccttatttgaacaccacaaagctctggatgaaaaggtgagagagcgattacgagtagcacttgaaagatgtagtttgttagaagaggaattaggtgccacacacaaagagctaatgattcttaaagaacagaataatcagaaaaaaactctaacagatggagtgctggacataaaccatgaacaagaaaatacaccaagcacgagtggaaagagatcttctgatggttctttaagccacgaggaagaccttgctaaagtaattgagctccaagaaatcataagtaagcagtcaagggaacagagccaaatgaaagaacgcctggcttccctttccagtcatgtgacagaactggaagaggatctggacacggctagaaaagatctcatcaaatctgaagaaatgaacacaaaattgcaacgagatgtccgtgaagccatggcccaaaaggaagatatggaagagagaatcactactcttgaaaaacgctacctcgctgcacagcgtgaagccacatctgtgcatgacctcaatgataaacttgaaaatgaaattgcaaataaagattctatgcatcgacagactgaagataaaaaccgccagttacaggagcgcttggaattggcagagcaaaagctgcaacagacactgaggaaggcagagacgctcccggaggtggaggcggagctggcccagagggtggcagcgctttccaaggctgaagagagacacggcaacattgaagaaaggttacgacagatggaagcacagttggaggagaagaatcaagaactgcagcgggcaaggcaaagagaaaaaatgaacgaagaacataataaacgtttatcagacactgttgacaagctgctttcagaatctaatgagaggcttcaacttcatcttaaagagagaatggctgctttggaagataagaactctcttttaagagaagttgaaagtgcaaaaaagcagttagaagaaacacaacacgataaggatcagcttgtcctaaacattgaagcactgagggctgaactagaccacatgagactaagaggtgcttcacttcatcatggccgaccccacttgggcagtgtcccagatttcaggttccccatggcagacggccacacagactcctacagcaccagtgcagtgctgcggcgcccacagaaaggccggctggcagccctgcgagatgagccttccaaggtacaaactcttaatgagcaggattgggaacgtgcccagcaagctagtgtcttggcaaatgtagcacaagcattcgagagtgatgctgacgtgtctgatggtgaagatgacagggacactctcctcagctcagttgacctgctatcgcccagcgggcaggccgacgcgcacacactagccatgatgcttcaggagcagctggacgccatcaacaaagagatcaggttgattcaggaagaaaaagaaaatacagagcagcgggcagaggagattgaaagtcgagttggcagtggaagtctagacaatcttggtcgttttagatcaatgagctccattcccccctaccctgcttcctcgcttgctagctcctcccctccgggcagtgggcgctccaccccacgaaggatccctcacagcccagctcgggaagtggacagactgggcgtcatgacccttttgccaccttccagagaagaggtacgagatgacaagacaaccataaagtgtgaaacctccccgccttcctccccgagagcccttcggttagaccggctgcacaaaggggcgctgcacaccgtcagccacgaggacatcagggacataaggaactccacaggctcccaggatggtcccgtgagcaaccccagcagtagcaacagtagccaggactcgctccacaaagccccaaagaagaaaggcattaagtcctccattggccgcttgtttggcaagaaagaaaagggccgacctggacaaactggcaaagaagcattaggacaagctggtgtttccgagacggataactcatctcaggatgccttgggacttagcaaattggggggacaggctgaaaaaaatcgtaaacttcaaaaaaagcatgaattgctggaggaagcccggagacaaggtttaccttttgcccaatgggacgggccaacggttgtggtctggctagagctctgggttgggatgccagcctggtatgtggctgcctgccgagcaaacgtgaaaagcggggccatcatgtcggccctgtccgacacagagatccagcgtgagattggcatcagcaaccccctgcacaggctgaagctgaggctggccatccaggagatcatgtcgctgaccagcccgtctgccccgcccacatctagaacgacactcgcctatggggacatgaaccacgagtggatcggcaacgagtggctccccagcctgggcctcccccagtaccgcagctacttcatggagtgccttgtagacgccaggatgctggaccacttgaccaagaaagaccttcgagggcagctgaaaatggtcgacagttttcacagaaacagtttccagtgtggaattatgtgcctgagaaggttaaattatgaccggaaagaactggaaagaaaaagagaagaaagtcagagtgaaataaaagacgtgcttgtttggagcaatgatcgagtgattcgctggatcctgtcaattggccttaaagaatatgcaaacaatcttatagagagtggtgttcacggagcacttctggccttagatgaaaccttcgacttcagtgcactggcactgctgttacagatcccgacgcagaacacacaggctcgtgctgtcttggaaagagaatttaacaaccttttggtcatggggactgatagaaggtttgatgaagtaagtttttggcctaatgttctttaaatgtctgaaatgtgtgtaaatgtttaaatgtgtgtgaaatgtaagctgttattattattatacttgggacatcatgtagctaggcagtctctctggatgttagaagtcaggctttgctcttatacatttattcacaaatgagcctttaaaaactaatacctgggccgggcacggcggctcgcacctgtaatcccagcactttcggaggctgaggcgggcggatcaccagaggtcaggagtttaagaccagcccggccaacatggtgaaaccccatctctactaaaaaacacaaaaattagccgggcgttgtggtaggtgcctataatcgcagctacttgggaggctgaggctggagaatcgcttaaacctgggaggtggaggttgcagtgagctgagatcgcaccactgccctccagcctgggcgacagagagaaactccatctcaaaaagaaaccccctccccgcaaaaaaaaaacccacaaaagtaataccttcaagaaggtagttttgtttttatttttgctatttaatttttgacatccctcaaaaatggttttcacatcataaaacattggttgcagcttaggaacagagtctgtaagttgggttttggggaccagtagttatcctaccccagtccagagtgtacccccatactcctgtgcatgggtggggtggcatgtttcagaagtatattaaaaacacaaaatgttaatttccccttaaaaccatgactcatttgttccacacgattaggagtctcttaattggaccttaagaaaagttgagtttgacagagagaatagaagaccacctctaaagatgaagcacttgttgctatatcctggcataagataaaattgtttctagttaaaaattgtttgtagagctgcgtgtggtaggggcacacctgtagttccagctacttaggaggctgcggtgggaggatggcttgagcccaggagtttgaggttacagtgagctataatcacaccactgcattccagctcgggcaacagatctagactctgtctgtaaaaacataaataaaa

SEQ ID NO: 293818 - DNA, 3804 bp, Homo sapiens
gaattccgggcccccggccgtccctcttaaggctcttcctccgctccgccagtgtccggccgcgggccggccttagtgactggggcggcgggccccggggccgcggcgtggggcgggcaggcggacgccggccgcgggctgctttcgtcggctcccaagctctcccggagcgagcagccgcccgcgagccgccgcggagcctcctcgcccgctcccgccggcgagcaagatgatgtgcgaggtgatgccgaccatcagcgaagcagaaggcccccctggaggaggtggaggccatggttccggctccccttcacagccagatgcagattcacattttgaacagttgatggtctccatgctagaagaaagggaccgccttcttgatacactgagagagactcaagaaacgctggccttaacccaggggaagttacacgaggttggtcatgaaagagattccttgcagagacagctcaacacggcacttccacaggagttcgcagcacttactaaagaactcaatgtatgcagggaacagctccttgaaagggaagaagaaattgctgaactgaaagcagaaaggaataacaccaggctgctgttagagcatttggaatgccttgtctccaggcatgagcggtctcttaggatgaccgtggtgaagagacaagcgcagtctccagcaggcgtgtccagcgaagtggaagtgctgaaagcactgaagtccttatttgaacaccacaaagctctggatgaaaaggtgagagagcgattacgagtagcacttgaaagatgtagtttgttagaagaggaattaggtgccacacacaaagagctaatgattcttaaagaacagaataatcagaaaaaaactctaacagatggagtgctggacataaaccatgaacaagaaaatacaccaagcacgagtggaaagagatcttctgatggttctttaagccacgaggaagaccttgctaaagtaattgagctccaagaaatcataagtaagcagtcaagggaacagagccaaatgaaagaacgcctggcttccctttccagtcatgtgacagaactggaagaggatctggacacggctagaaaagatctcatcaaatctgaagaaatgaacacaaaattgcaacgagatgtccgtgaagccatggcccaaaaggaagatatggaagagagaatcactactcttgaaaaacgctacctcgctgcacagcgtgaagccacatctgtgcatgacctcaatgataaacttgaaaatgaaattgcaaataaagattctatgcatcgacagactgaagataaaaaccgccagttacaggagcgcttggaattggcagagcaaaagctgcaacagacactgaggaaggcagagacgctcccggaggtggaggcggagctggcccagagggtggcagcgctttccaaggctgaagagagacacggcaacattgaagaaaggttacgacagatggaagcacagttggaggagaagaatcaagaactgcagcgggcaaggcaaagagaaaaaatgaacgaagaacataataaacgtttatcagacactgttgacaagctgctttcagaatctaatgagaggcttcaacttcatcttaaagagagaatggctgctttggaagataagaactctcttttaagagaagttgaaagtgcaaaaaagcagttagaagaaacacaacacgataaggatcagcttgtcctaaacattgaagcactgagggctgaactagaccacatgagactaagaggtgcttcacttcatcatggccgaccccacttgggcagtgtcccagatttcaggttccccatggcagacggccacacagactcctacagcaccagtgcagtgctgcggcgcccacagaaaggccggctggcagccctgcgagatgagccttccaaggtacaaactcttaatgagcaggattgggaacgtgcccagcaagctagtgtcttggcaaatgtagcacaagcattcgagagtgatgctgacgtgtctgatggtgaagatgacagggacactctcctcagctcagttgacctgctatcgcccagcgggcaggccgacgcgcacacactagccatgatgcttcaggagcagctggacgccatcaacaaagagatcaggttgattcaggaagaaaaagaaaatacagagcagcgggcagaggagattgaaagtcgagttggcagtggaagtctagacaatcttggtcgttttagatcaatgagctccattcccccctaccctgcttcctcgcttgctagctcctcccctccgggcagtgggcgctccaccccacgaaggatccctcacagcccagctcgggaagtggacagactgggcgtcatgacccttttgccaccttccagagaagaggtacgagatgacaagacaaccataaagtgtgaaacctccccgccttcctccccgagagcccttcggttagaccggctgcacaaaggggcgctgcacaccgtcagccacgaggacatcagggacataaggaactccacaggctcccaggatggtcccgtgagcaaccccagcagtagcaacagtagccaggactcgctccacaaagccccaaagaagaaaggcattaagtcctccattggccgcttgtttggcaagaaagaaaagggccgacctggacaaactggcaaagaagcattaggacaagctggtgtttccgagacggataactcatctcaggatgccttgggacttagcaaattggggggacaggctgaaaaaaatcgtaaacttcaaaaaaagcatgaattgctggaggaagcccggagacaaggtttaccttttgcccaatgggacgggccaacggttgtggtctggctagagctctgggttgggatgccagcctggtatgtggctgcctgccgagcaaacgtgaaaagcggggccatcatgtcggccctgtccgacacagagatccagcgtgagattggcatcagcaaccccctgcacaggctgaagctgaggctggccatccaggagatcatgtcgctgaccagcccgtctgccccgcccacatctagaacgacactcgcctatggggacatgaaccacgagtggatcggcaacgagtggctccccagcctgggcctcccccagtaccgcagctacttcatggagtgccttgtagacgccaggatgctggaccacttgaccaagaaagaccttcgagggcagctgaaaatggtcgacagttttcacagaaacagtttccagtgtggaattatgtgcctgagaaggttaaattatgaccggaaagaactggaaagaaaaagagaagaaagtcagagtgaaataaaagacgtgcttgtttggagcaatgatcgagtgattcgctggatcctgtcaattggccttaaagaatatgcaaacaatcttatagagagtggtgttcacggagcacttctggccttagatgaaaccttcgacttcagtgcactggcactgctgttacagatcccgacgcagaacacacaggctcgtgctgtcttggaaagagaatttaacaaccttttggtcatggggactgatagaaggtttgatgaacatgatgataaaagctttaggagagcaccttcatgtagaatcttccttgatacctccgcgtgaatttcttctatgctttaccccttctatgcatcccattaaatactgtcattgtacgctctgctttaagtaccccacggctcggattctgcttcagctttgcactttactcctgcttacgtcctcctgtt

SEQ ID NO: 293819 - DNA, 3633 bp, Homo sapiens
gaattccgggcccccggccgtccctcttaaggctcttcctccgctccgccagtgtccggccgcgggccggccttagtgactggggcggcgggccccggggccgcggcgtggggcgggcaggcggacgccggccgcgggctgctttcgtcggctcccaagctctcccggagcgagcagccgcccgcgagccgccgcggagcctcctcgcccgctcccgccggcgagcaagatgatgtgcgaggtgatgccgaccatcagcgaagcagaaggcccccctggaggaggtggaggccatggttccggctccccttcacagccagatgcagattcacattttgaacagttgatggtctccatgctagaagaaagggaccgccttcttgatacactgagagagactcaagaaacgctggccttaacccaggggaagttacacgaggttggtcatgaaagagattccttgcagagacagctcaacacggcacttccacaggagttcgcagcacttactaaagaactcaatgtatgcagggaacagctccttgaaagggaagaagaaattgctgaactgaaagcagaaaggaataacaccaggctgctgttagagcatttggaatgccttgtctccaggcatgagcggtctcttaggatgaccgtggtgaagagacaagcgcagtctccagcaggcgtgtccagcgaagtggaagtgctgaaagcactgaagtccttatttgaacaccacaaagctctggatgaaaaggtgagagagcgattacgagtagcacttgaaagatgtagtttgttagaagaggaattaggtgccacacacaaagagctaatgattcttaaagaacagaataatcagaaaaaaactctaacagatggagtgctggacataaaccatgaacaagaaaatacaccaagcacgagtggaaagagatcttctgatggttctttaagccacgaggaagaccttgctaaagtaattgagctccaagaaatcataagtaagcagtcaagggaacagagccaaatgaaagaacgcctggcttccctttccagtcatgtgacagaactggaagaggatctggacacggctagaaaagatctcatcaaatctgaagaaatgaacacaaaattgcaacgagatgtccgtgaagccatggcccaaaaggaagatatggaagagagaatcactactcttgaaaaacgctacctcgctgcacagcgtgaagccacatctgtgcatgacctcaatgataaacttgaaaatgaaattgcaaataaagattctatgcatcgacagactgaagataaaaaccgccagttacaggagcgcttggaattggcagagcaaaagctgcaacagacactgaggaaggcagagacgctcccggaggtggaggcggagctggcccagagggtggcagcgctttccaaggctgaagagagacacggcaacattgaagaaaggttacgacagatggaagcacagttggaggagaagaatcaagaactgcagcgggcaaggcaaagagaaaaaatgaacgaagaacataataaacgtttatcagacactgttgacaagctgctttcagaatctaatgagaggcttcaacttcatcttaaagagagaatggctgctttggaagataagaactctcttttaagagaagttgaaagtgcaaaaaagcagttagaagaaacacaacacgataaggatcagcttgtcctaaacattgaagcactgagggctgaactagaccacatgagactaagaggtgcttcacttcatcatggccgaccccacttgggcagtgtcccagatttcaggttccccatggcagacggccacacagactcctacagcaccagtgcagtgctgcggcgcccacagaaaggccggctggcagccctgcgagatgagccttccaaggtacaaactcttaatgagcaggattgggaacgtgcccagcaagctagtgtcttggcaaatgtagcacaagcattcgagagtgatgctgacgtgtctgatggtgaagatgacagggacactctcctcagctcagttgacctgctatcgcccagcgggcaggccgacgcgcacacactagccatgatgcttcaggagcagctggacgccatcaacaaagagatcaggttgattcaggaagaaaaagaaaatacagagcagcgggcagaggagattgaaagtcgagttggcagtggaagtctagacaatcttggtcgttttagatcaatgagctccattcccccctaccctgcttcctcgcttgctagctcctcccctccgggcagtgggcgctccaccccacgaaggatccctcacagcccagctcgggaagtggacagactgggcgtcatgacccttttgccaccttccagagaagaggtacgagatgacaagacaaccataaagtgtgaaacctccccgccttcctccccgagagcccttcggttagaccggctgcacaaaggggcgctgcacaccgtcagccacgaggacatcagggacataaggaactccacaggctcccaggatggtcccgtgagcaaccccagcagtagcaacagtagccaggactcgctccacaaagccccaaagaagaaaggcattaagtcctccattggccgcttgtttggcaagaaagaaaagggccgacctggacaaactggcaaagaagcattaggacaagctggtgtttccgagacggataactcatctcaggatgccttgggacttagcaaattggggggacaggctgaaaaaaatcgtaaacttcaaaaaaagcatgaattgctggaggaagcccggagacaaggtttaccttttgcccaatgggacgggccaacggttgtggtctggctagagctctgggttgggatgccagcctggtatgtggctgcctgccgagcaaacgtgaaaagcggggccatcatgtcggccctgtccgacacagagatccagcgtgagattggcatcagcaaccccctgcacaggctgaagctgaggctggccatccaggagatcatgtcgctgaccagcccgtctgccccgcccacatctagaacgacactcgcctatggggacatgaaccacgagtggatcggcaacgagtggctccccagcctgggcctcccccagtaccgcagctacttcatggagtgccttgtagacgccaggatgctggaccacttgaccaagaaagaccttcgagggcagctgaaaatggtcgacagttttcacagaaacagtttccagtgtggaattatgtgcctgagaaggttaaattatgaccggaaagaactggaaagaaaaagagaagaaagtcagagtgaaataaaagacgtgcttgtttggagcaatgatcgagtgattcgctggatcctgtcaattggccttaaagaatatgcaaacaatcttatagagagtggtgttcacggagcacttctggccttagatgaaaccttcgacttcagtgcactggcactgctgttacagatcccgacgcagaacacacaggtgacgccaaacctgtctgtgtctgcactcattgttcagttggcaccctgattatagacagctagttattcgaatagaaagaaacttta

SEQ ID NO: 293820 - DNA, 3401 bp, Homo sapiens
gaattccgggcccccggccgtccctcttaaggctcttcctccgctccgccagtgtccggccgcgggccggccttagtgactggggcggcgggccccggggccgcggcgtggggcgggcaggcggacgccggccgcgggctgctttcgtcggctcccaagctctcccggagcgagcagccgcccgcgagccgccgcggagcctcctcgcccgctcccgccggcgagcaagatgatgtgcgaggtgatgccgaccatcagcgaagcagaaggcccccctggaggaggtggaggccatggttccggctccccttcacagccagatgcagattcacattttgaacagttgatggtctccatgctagaagaaagggaccgccttcttgatacactgagagagactcaagaaacgctggccttaacccaggggaagttacacgaggttggtcatgaaagagattccttgcagagacagctcaacacggcacttccacaggagttcgcagcacttactaaagaactcaatgtatgcagggaacagctccttgaaagggaagaagaaattgctgaactgaaagcagaaaggaataacaccaggctgctgttagagcatttggaatgccttgtctccaggcatgagcggtctcttaggatgaccgtggtgaagagacaagcgcagtctccagcaggcgtgtccagcgaagtggaagtgctgaaagcactgaagtccttatttgaacaccacaaagctctggatgaaaaggtgagagagcgattacgagtagcacttgaaagatgtagtttgttagaagaggaattaggtgccacacacaaagagctaatgattcttaaagaacagaataatcagaaaaaaactctaacagatggagtgctggacataaaccatgaacaagaaaatacaccaagcacgagtggaaagagatcttctgatggttctttaagccacgaggaagaccttgctaaagtaattgagctccaagaaatcataagtaagcagtcaagggaacagagccaaatgaaagaacgcctggcttccctttccagtcatgtgacagaactggaagaggatctggacacggctagaaaagatctcatcaaatctgaagaaatgaacacaaaattgcaacgagatgtccgtgaagccatggcccaaaaggaagatatggaagagagaatcactactcttgaaaaacgctacctcgctgcacagcgtgaagccacatctgtgcatgacctcaatgataaacttgaaaatgaaattgcaaataaagattctatgcatcgacagactgaagataaaaaccgccagttacaggagcgcttggaattggcagagcaaaagctgcaacagacactgaggaaggcagagacgctcccggaggtggaggcggagctggcccagagggtggcagcgctttccaaggctgaagagagacacggcaacattgaagaaaggttacgacagatggaagcacagttggaggagaagaatcaagaactgcagcgggcaaggcaaagagaaaaaatgaacgaagaacataataaacgtttatcagacactgttgacaagctgctttcagaatctaatgagaggcttcaacttcatcttaaagagagaatggctgctttggaagataagaactctcttttaagagaagttgaaagtgcaaaaaagcagttagaagaaacacaacacgataaggatcagcttgtcctaaacattgaagcactgagggctgaactagaccacatgagactaagaggtgcttcacttcatcatggccgaccccacttgggcagtgtcccagatttcaggttccccatggcagacggccacacagactcctacagcaccagtgcagtgctgcggcgcccacagaaaggccggctggcagccctgcgagatgagccttccaaggtacaaactcttaatgagcaggattgggaacgtgcccagcaagctagtgtcttggcaaatgtagcacaagcattcgagagtgatgctgacgtgtctgatggtgaagatgacagggacactctcctcagctcagttgacctgctatcgcccagcgggcaggccgacgcgcacacactagccatgatgcttcaggagcagctggacgccatcaacaaagagatcaggttgattcaggaagaaaaagaaaatacagagcagcgggcagaggagattgaaagtcgagttggcagtggaagtctagacaatcttggtcgttttagatcaatgagctccattcccccctaccctgcttcctcgcttgctagctcctcccctccgggcagtgggcgctccaccccacgaaggatccctcacagcccagctcgggaagtggacagactgggcgtcatgacccttttgccaccttccagagaagaggtacgagatgacaagacaaccataaagtgtgaaacctccccgccttcctccccgagagcccttcggttagaccggctgcacaaaggggcgctgcacaccgtcagccacgaggacatcagggacataaggaactccacaggctcccaggatggtcccgtgagcaaccccagcagtagcaacagtagccaggactcgctccacaaagccccaaagaagaaaggcattaagtcctccattggccgcttgtttggcaagaaagaaaagggccgacctggacaaactggcaaagaagcattaggacaagctggtgtttccgagacggataactcatctcaggatgccttgggacttagcaaattggggggacaggctgaaaaaaatcgtaaacttcaaaaaaagcatgaattgctggaggaagcccggagacaaggtttaccttttgcccaatgggacgggccaacggttgtggtctggctagagctctgggttgggatgccagcctggtatgtggctgcctgccgagcaaacgtgaaaagcggggccatcatgtcggccctgtccgacacagagatccagcgtgagattggcatcagcaaccccctgcacaggctgaagctgaggctggccatccaggagatcatgtcgctgaccagcccgtctgccccgcccacatctagaacggtacgttcagagacaacccctgcattctttggaaacagggaatgcctctctgaaggtatcactgccctgtttacattgcttctccagttccttaacagcatatgaagtatagttctaattcaaaattttagcatcacatacattagaacttttaattttggggaattggatggtcaaaagaaactttattaaatgcttttatgaaagattggctagaatggcttcatagtataaaaatatgagcttttttaaacatagaaaagcaattacaaatttaaatatggaaatatgaaatacgaaaatacca

SEQ ID NO: 293821 - DNA, 3829 bp, Homo sapiens
gaattccgggcccccggccgtccctcttaaggctcttcctccgctccgccagtgtccggccgcgggccggccttagtgactggggcggcgggccccggggccgcggcgtggggcgggcaggcggacgccggccgcgggctgctttcgtcggctcccaagctctcccggagcgagcagccgcccgcgagccgccgcggagcctcctcgcccgctcccgccggcgagcaagatgatgtgcgaggtgatgccgaccatcagcgaagcagaaggcccccctggaggaggtggaggccatggttccggctccccttcacagccagatgcagattcacattttgaacagttgatggtctccatgctagaagaaagggaccgccttcttgatacactgagagagactcaagaaacgctggccttaacccaggggaagttacacgaggttggtcatgaaagagattccttgcagagacagctcaacacggcacttccacaggagttcgcagcacttactaaagaactcaatgtatgcagggaacagctccttgaaagggaagaagaaattgctgaactgaaagcagaaaggaataacaccaggctgctgttagagcatttggaatgccttgtctccaggcatgagcggtctcttaggatgaccgtggtgaagagacaagcgcagtctccagcaggcgtgtccagcgaagtggaagtgctgaaagcactgaagtccttatttgaacaccacaaagctctggatgaaaaggtgagagagcgattacgagtagcacttgaaagatgtagtttgttagaagaggaattaggtgccacacacaaagagctaatgattcttaaagaacagaataatcagaaaaaaactctaacagatggagtgctggacataaaccatgaacaagaaaatacaccaagcacgagtggaaagagatcttctgatggttctttaagccacgaggaagaccttgctaaagtaattgagctccaagaaatcataagtaagcagtcaagggaacagagccaaatgaaagaacgcctggcttccctttccagtcatgtgacagaactggaagaggatctggacacggctagaaaagatctcatcaaatctgaagaaatgaacacaaaattgcaacgagatgtccgtgaagccatggcccaaaaggaagatatggaagagagaatcactactcttgaaaaacgctacctcgctgcacagcgtgaagccacatctgtgcatgacctcaatgataaacttgaaaatgaaattgcaaataaagattctatgcatcgacagactgaagataaaaaccgccagttacaggagcgcttggaattggcagagcaaaagctgcaacagacactgaggaaggcagagacgctcccggaggtggaggcggagctggcccagagggtggcagcgctttccaaggctgaagagagacacggcaacattgaagaaaggttacgacagatggaagcacagttggaggagaagaatcaagaactgcagcgggcaaggcaaagagaaaaaatgaacgaagaacataataaacgtttatcagacactgttgacaagctgctttcagaatctaatgagaggcttcaacttcatcttaaagagagaatggctgctttggaagataagaactctcttttaagagaagttgaaagtgcaaaaaagcagttagaagaaacacaacacgataaggatcagcttgtcctaaacattgaagcactgagggctgaactagaccacatgagactaagaggtgcttcacttcatcatggccgaccccacttgggcagtgtcccagatttcaggttccccatggcagacggccacacagactcctacagcaccagtgcagtgctgcggcgcccacagaaaggccggctggcagccctgcgagatgagccttccaaggtacaaactcttaatgagcaggattgggaacgtgcccagcaagctagtgtcttggcaaatgtagcacaagcattcgagagtgatgctgacgtgtctgatggtgaagatgacagggacactctcctcagctcagttgacctgctatcgcccagcgggcaggccgacgcgcacacactagccatgatgcttcaggagcagctggacgccatcaacaaagagatcaggttgattcaggaagaaaaagaaaatacagagcagcgggcagaggagattgaaagtcgagttggcagtggaagtctagacaatcttggtcgttttagatcaatgagctccattcccccctaccctgcttcctcgcttgctagctcctcccctccgggcagtgggcgctccaccccacgaaggatccctcacagcccagctcgggaagtggacagactgggcgtcatgacccttttgccaccttccagagaagaggtacgagatgacaagacaaccataaagtgtgaaacctccccgccttcctccccgagagcccttcggttagaccggctgcacaaaggggcgctgcacaccgtcagccacgaggacatcagggacataaggaactccacaggctcccaggatggtcccgtgagcaaccccagcagtagcaacagtagccaggactcgctccacaaagccccaaagaagaaaggcattaagtcctccattggccgcttgtttggcaagaaagaaaagggccgacctggacaaactggcaaagaagcattaggacaagctggtgtttccgagacggataactcatctcaggatgccttgggacttagcaaattggggggacaggctgaaaaaaatcgtaaacttcaaaaaaagcatgaattgctggaggaagcccggagacaaggtttaccttttgcccaatgggacgggccaacggttgtggtctggctagagctctgggttgggatgccagcctggtatgtggctgcctgccgagcaaacgtgaaaagcggggccatcatgtcggccctgtccgacacagagatccagcgtgagattggcatcagcaaccccctgcacaggctgaagctgaggctggccatccaggagatcatgtcgctgaccagcccgtctgccccgcccacatctagaacgaccacaggaaatgtctggttaacacacgaagagatggaaacgctcgcagccacgccgcaaacggttagtcacgccccacagcctgcactcctcccagcgcgttttccacttaagaccgtctgggttctttgcctttttgttgaaaacaaaatgttgttttccattcagtcgttccagataagtatttcctttagttattagttgaaatgtgtaagtagaatttgtattttattttagattttttccaggaacttcaagttggtagactctgtcttttagaatagctttaatctagctctccttttggagagatctcagttgagcctccatgtgactgactgtgtggccctttctccttccatgaatatgcttggcacggagagagtctgctccttgcatgagaagttgaaattgttggttttgcatgagttttgcatgatgctttgatagtctgaactttttcactcagtgaagctgcatcttccctgcagagttgcgttgcctgcattaccgagctcaccaatactaatagttatgttcttttgcattcctaaccacgtaaccccaggaagatgaggagggaagctgggctcaggttggagtctttctctaatatattcttcactacatgtacagcagcaaaaagcaattggagtatgaaaacttgtgtaatctactttttttgatgtttatagcatcttagtttattcggagtacaggattgttaatgatttg

SEQ ID NO: 293822 - DNA, 673 bp, Homo sapiens
gtgatgccgaccatcagcgaagcagaaggcccccctggaggaggtggaggccatggttccggctccccttcacagccagatgcagattcacattttgaacagttgatggtctccatgctagaagaaagggaccgccttcttgatacactgagagagactcaagaaacgctggccttaacccaggggaagttacacgaggttggtcatgaaagagattccttgcagagacagctcaacacggcacttccacaggtatgagtgcttttaacctgaaactatagatttttctccactaaatgtttttttattagtgtcatcttttgttaatgtttcagatgagtattttccgtaacgatttgtgaaatgatagtttctggtgtttgtaagtcaaatacaaagttcctagggattaaacttcttagggagaacaaatcgttgtactctaaagtcatgtgaaaatacctcattattttcattcctatctttgggaactgcctaggttcaggaagttctccagagtttttgaaaaagggctctgaagcaaccaatctatttggtgcctccattctgttgtcttaagccttttctggctaaacttgtacttcccatggattatctcatgtatttctaatttcctaatgtaatttaatagacaaataggattgatttcacg

SEQ ID NO: 293823 - DNA, 402 bp, Homo sapiens
gcaagtctgtaggctttgtctttattctgtttgatttcatttgttcacagtatgtgtcgggttatgtggaaaacagttgctaaagtaccggcttagagctgaagtggtcatgaaagttgtgtaatccaacagattgcataagtcagttttgattttagctatttcctggaagtatttttattttatagctcaccaaacaagggtatttaaggatttttttttccccctatcagagatcttctgatggttctttaagccacgaggaagaccttgctaaagtaattgagctccaagaaatcataagtaagcagtcaagggaacagagccaaatgaaagaacgcctggcttccctttccagtcatgtgacagaactggaagaggatctggacacggctagaaaag

SEQ ID NO: 293824 - DNA, 303 bp, Homo sapiens
gaagccacttttataattgtctttattcttttgcagacgtgcttgtttggagcaatgatcgagtgattcgctggatcctgtcaattggccttaaagaatatgcaaacaatcttatagagagtggtgttcacggagcacttctggccttagatgaaaccttcgacttcagtgcactggcactgctgttacagatcccgacgcagaacacacaggtgacgccaaacctgtctgtgtctgcactcattgttcagttggcaccctgattatagacagctagttattcgaatagaaagaaactttaaa

SEQ ID NO: 293825 - DNA, 373 bp, Homo sapiens
catggagctcccattttatggagttcataagactgggttgtacttgtggctgtttcagtgctgggagtaaacactgtgcagtgggtgtctcttctagttcagatgttctctggactgacatcacctggtatgttttttttccagaaggctgctaaggcagcccaggagaagaggtgggtctccctgggatggagcctgatccttctgggagttcatgttataggccacttcaggagtctgagcagagcatataatgaggaaacagaaacaagtagggttctgcttccatgcagttttctatttagacaattcctttgtttaatttccccatttaagaatacataatcagcaagcaagagaataataccagata

SEQ ID NO: 293826 - DNA, 487 bp, Homo sapiens
gggttccaggagatcaaggacttcagggatttctactttcccatagcagatcataatgtagaagttctggaatgcaaaatcagtgtgaagagaactacccccaggttataggaggctatccggttgagaaatttgtggctaccatgtatcattacttcagttttgcctattataagtgaagcagttcagttctttaatgtgacccactccagaaggagctgtatgactttgctaaggaaaatataatggatgatgataagggagaaatacatggtttttgtggaaatcattatatgtttgctttagattttcttctgttttcaccatcataacacttaagttaaatcatgatgtaaaattttagtacttaaaggtttttaattatctcgaaggccaagcattgcatttgtaaacagtcctggtcagtagttaaataatgtttcaattaaagtgctgtaaaataaacttcaaagtggttataagttaa

SEQ ID NO: 293827 - DNA, 992 bp, Homo sapiens
ggatataaactgaaacatctgaatcttatttcttaaatgaagaatattaatttaaggatcaataattattttgtataatgggtatggcataagaaataaaaagtcctggatcttttccatgaggtggttggctctcaggttaagtaacaatgtaattgtaaaaaaatcttatgagttcttcgtaagtacatcttaaagctgtcaagatggttctagcagaccttggaagaaaaataacatcagcattacgctcgttgagcaatgccaccattatcaatgaagaggtattgaatgctatgctaaaagaagtctgtaccgctttgttggaagcagatgttaatattaaactagtgaagcaactaagagaaaatgttaagtctgctattgatcttgaagagatggcatctggtcttaacaaaagaaaaatgattcagcatgctgtatttaaagaacttgtgaagcttgtagaccctggagttaaggcatggacacccactaaaggaaaacaaaatgtgattatgtttgttggattgcaagggagtggtaaaacaacaacatgttcaaagctagcatattattaccagaggaaaggttggaagacctgtttaatatgtgcagacacattcagagcaggggcttttgaccaactaaaacagaatgctaccaaagcaagaattccattttatggaagctatacagaaatgggatcctggtcatcattggcttctgacggagtacgagaaaacacagaaatgaaacatgtggacacatgactcataggaggaacacaagtggacagacaacaaaccagaaagaaatctatgggtcgacacaaaatgcatccacagattgcctaaggcacatcaacccggcacaccatagataatgggaagagatggccctcaatagggcaggactgcagtaagacccaccgcaaaggcgtcaaacgatacagcaacacgtacacacacacaacggaacaaaactgcacg

SEQ ID NO: 293828 - DNA, 666 bp, Homo sapiens
  misc_feature (663)..(663): n is a, c, g, or t
ccggggacgcaacgcccggtttttttattcatgaccttacggatcgtatgagtgagcaagaactagacagtacggatggtgccaaagtttttagtaaacaaccaggaagaatccaaagagtagcaagaggatcgggtgtatcaacaagagatgttcaagaacttttgacacaatataccaagtttgcacagatggtaaaaaagatgggaggtatcaaaggacttttcaaaggtggcgacatgtctaagaatgtgagccagtcacagatggcaaaattgaaccaacaaatggccaaaatgatggatcctagggttcttcatcacatgggtggtatggcaggacttcagtcaatgatgaggcagtttcaacagggtgctgctggcaacatgaaaggcatgatgggattcaataatatgtaaagaaaatgccttaatataaactgactcagttgaatacctaatttgctgagacctcagcgtttcccttctttttgcgaattggggggaaagtgtatctcttcctggctcatatacggcaccctctaccttatccattctgcgacggatttacacgcccctttcattttcccctccgttttttccctcgcctaaaaataaagggggaggaaacacggcgctcgcgggaaaaacataaaaataggcnctc

SEQ ID NO: 293829 - DNA, 559 bp, Homo sapiens
tagttttgttgaatggaaatgtacatactttaatatatccgaattatttacattgtatttcaggtcagtttacgttgcgagacatgtatgagcaatttcaaaatatcatgaaaatgggccccttcagtcagatcttggggatgatccctggttttgggacagattttatgagcaaaggaaatgaacaggagtcaatggcaaggctaaagaaattaatgacaataatggatagtatgaatgatcaaggtaagatggcagattattttcctcaggcaaaaatgttctgagtatcagtaagatgagagtttcactgtattcttgtggacaagatggggagaaatttagcctgaaagattatttttaggtagatttgtaatagcttgaaagctcttactcaaagggttatgattattggattgccttcatcgttgagagaaatgtctagtataatacttctccaaatgagttacaaggaaagaacactagttcttcatgatgttcatagagttaacttaaaaggagaactctgagtcaaatgtggtggaatgctagtttttaa

SEQ ID NO: 293830 - DNA, 233 bp, Homo sapiens
tagattattcttgagatatatggctgtctccgtccgagcttgccagtcatagtgactgaccgtgatggacatgcataaggaaggagtgcacgcactgcagtcgctgccacaaaaagtccgattattttcattggtacaggggaacatatagatgactttgaacctttcaaaacacagcccgccaggatgcttaccagtcgcgacgggtggacaacgacagccagagcacaagc

SEQ ID NO: 293831 - DNA, 2458 bp, Homo sapiens
gagtgctccgcctagtcacttttcttaaggtggctcgtcgaggcctgacttcttccccgaaatcacgtccctagacagcctcctattttaccactaactttactcctgcagttattcagcggtaggaaactgaaaccaaaaaccagtgtaagcaagtaaacatctaaactgtttcaggagccgcgtagaaggaacgcggcggtgtgccccggaagcggaagtagattctcctatagaaaggctggactacgcggagtggtgacgtttcctcattgggcggaaggttcgctggcactccgttggtcttccagctggtgggagttgacgacgtggtgctgggcgttgggaccctactttatctagttcgggaagttgggttgtggggtcatacctgtctgtctgctcccagctttcttgggtttcttccgacggcgtggggcctcgctaaggaattcccggcccctcagggccacggctttagcggtgtcttttgcgagttcttcgtaagtacatcttaaagctgtcaagatggttctagcagaccttggaagaaaaataacatcagcattacgctcgttgagcaatgccaccattatcaatgaagaggtattgaatgctatgctaaaagaagtctgtaccgctttgttggaagcagatgttaatattaaactagtgaagcaactaagagaaaatgttaagtctgctattgatcttgaagagatggcatctggtcttaacaaaagaaaaatgattcagcatgctgtatttaaagaacttgtgaagcttgtagaccctggagttaaggcatggacacccactaaaggaaaacaaaatgtgattatgtttgttggattgcaagggagtggtaaaacaacaacatgttcaaagctagcatattattaccagaggaaaggttggaagacctgtttaatatgtgcagacacattcagagcaggggcttttgaccaactaaaacagaatgctaccaaagcaagaattccattttatggaagctatacagaaatggatcctgtcatcattgcttctgaaggagtagagaaatttaaaaatgaaaattttgaaattattattgttgatacaagtggccgccacaaacaagaagactctttgtttgaagaaatgcttcaagttgctaatgctatacaacctgataacattgtttatgtgatggatgcctccattgggcaggcttgtgaagcccaggctaaggcttttaaagataaagtagatgtagcctcagtaatagtgacaaaacttgatggccatgcaaaaggaggtggtgcactcagtgcagtcgctgccacaaaaagtccgattattttcattggtacaggggaacatatagatgactttgaacctttcaaaacacagccttttattagcaaacttcttggtatgggcgacattgaaggactgatagataaagtcaacgagttgaagttggatgacaatgaagcacttatagagaagttgaaacatggtcagtttacgttgcgagacatgtatgagcaatttcaaaatatcatgaaaatgggccccttcagtcagatcttggggatgatccctggttttgggacagattttatgagcaaaggaaatgaacaggagtcaatggcaaggctaaagaaattaatgacaataatggatagtatgaatgatcaagaactagacagtacggatggtgccaaagtttttagtaaacaaccaggaagaatccaaagagtagcaagaggatcgggtgtatcaacaagagatgttcaagaacttttgacacaatataccaagtttgcacagatggtaaaaaagatgggaggtatcaaaggacttttcaaaggtggcgacatgtctaagaatgtgagccagtcacagatggcaaaattgaaccaacaaatggccaaaatgatggatcctagggttcttcatcacatgggtggtatggcaggacttcagtcaatgatgaggcagtttcaacagggtgctgctggcaacatgaaaggcatgatgggattcaataatatgtaaagaaaatgccttaatataaactgactcagttgaatacctaatttgctgagacctcagcgtttcccttctttttgcgaattggggggaaagtgtatttttcttgcttatcatgcactctttccttttcttctcgcccgcttttcccctccttttctttttccttccttctttcctccctttaatataagggagaaatacatggtttttgtggaaatcattatatgtttgctttagattttcttctgttttcaccatcataacacttaagttaaatcatgatgtaaaattttagtacttaaaggtttttaattatctcgaaggccaagcattgcatttgtaaacagtcctggtcagtagttaaataatgtttcaattaaagtgctgtaaaataaacttcaaagtggttataagttaa

SEQ ID NO: 293832 - DNA, 2719 bp, Homo sapiens
  misc_feature (2485)..(2485): n is a, c, g, or t
  misc_feature (2491)..(2491): n is a, c, g, or t
gagtgctccgcctagtcacttttcttaaggtggctcgtcgaggcctgacttcttccccgaaatcacgtccctagacagcctcctattttaccactaactttactcctgcagttattcagcggtaggaaactgaaaccaaaaaccagtgtaagcaagtaaacatctaaactgtttcaggagccgcgtagaaggaacgcggcggtgtgccccggaagcggaagtagattctcctatagaaaggctggactacgcggagtggtgacgtttcctcattgggcggaaggttcgctggcactccgttggtcttccagctggtgggagttgacgacgtggtgctgggcgttgggaccctactttatctagttcgggaagttgggttgtggggtcatacctgtctgtctgctcccagctttcttgggtttcttccgacggcgtggggcctcgctaaggaattcccggcccctcagggccacggctttagcggtgtcttttgcgagttcttcgtaagtacatcttaaagctgtcaagatggttctagcagaccttggaagaaaaataacatcagcattacgctcgttgagcaatgccaccattatcaatgaagaggtattgaatgctatgctaaaagaagtctgtaccgctttgttggaagcagatgttaatattaaactagtgaagcaactaagagaaaatgttaagtctgctattgatcttgaagagatggcatctggtcttaacaaaagaaaaatgattcagcatgctgtatttaaagaacttgtgaagcttgtagaccctggagttaaggcatggacacccactaaaggaaaacaaaatgtgattatgtttgttggattgcaagggagtggtaaaacaacaacatgttcaaagctagcatattattaccagaggaaaggttggaagacctgtttaatatgtgcagacacattcagagcaggggcttttgaccaactaaaacagaatgctaccaaagcaagaattccattttatggaagctatacagaaatggatcctgtcatcattgcttctgaaggagtagagaaatttaaaaatgaaaattttgaaattattattgttgatacaagtggccgccacaaacaagaagactctttgtttgaagaaatgcttcaagttgctaatgctatacaacctgataacattgtttatgtgatggatgcctccattgggcaggcttgtgaagcccaggctaaggcttttaaagataaagtagatgtagcctcagtaatagtgacaaaacttgatggccatgcaaaaggaggtggtgcactcagtgcagtcgctgccacaaaaagtccgattattttcattggtacaggggaacatatagatgactttgaacctttcaaaacacagccttttattagcaaacttcttggtatgggcgacattgaaggactgatagataaagtcaacgagttgaagttggatgacaatgaagcacttatagagaagttgaaacatggtcagtttacgttgcgagacatgtatgagcaatttcaaaatatcatgaaaatgggccccttcagtcagatcttggggatgatccctggttttgggacagattttatgagcaaaggaaatgaacaggagtcaatggcaaggctaaagaaattaatgacaataatggatagtatgaatgatcaagaactagacagtacggatggtgccaaagtttttagtaaacaaccaggaagaatccaaagagtagcaagaggatcgggtgtatcaacaagagatgttcaagaacttttgacacaatataccaagtttgcacagatggtaaaaaagatgggaggtatcaaaggacttttcaaagacggaaaagaaaggaagttgagaaaaaagagtgctgccagtattggaaaattcacagctgaatttcatgttattttcaagtacttccaggatttatgtgacctgtgatttatctgttttcatattcaaggtaatattaatatttaaaaaaaaactttacatctgtgtagtgtgggtaaatgaaaaaaaattaataaagcaatgattttctttttgtgaacacattatattaaatttagataatataaggaaaaaaaaaacacattacctttactccccagagaatccagtggatcctactgcaaataacagttgctataactaagttttcttctgatatatcataactgtttttccatgttgtcaaatattcttcaaaacataattcttggccaggcatgagccaccacgcctggcctccatgtttaatttttaaaactcaaaagcaaacatagcgaatgttaacatttgttaaatctggttggtagtttgactatttattatgtctgtttttctgtatgtaagatattttgtaatataaaaagaaaaatgagatagttatcactttaaaaacatctgctaagctctttgaagttatatattgcccatttgcacataactgctttgatgntgaatnataattgtgtgtgagagtaactgaccttgtctacagaactagacagtacggatggtgccaaagtttttagtaaacaaccaggaagaatccaaagagtagcaagaggatcgggtgtatcaacaagagatgttcaagaacttttgtcacaatataacaagtttgcacagatggtaagaatctggcaggcagagagtgtatcctctagagtcagctatgacaatggttagc

SEQ ID NO: 293833 - DNA, 2748 bp, Homo sapiens
  misc_feature (2514)..(2514): n is a, c, g, or t
  misc_feature (2520)..(2520): n is a, c, g, or t
gagtgctccgcctagtcacttttcttaaggtggctcgtcgaggcctgacttcttccccgaaatcacgtccctagacagcctcctattttaccactaactttactcctgcagttattcagcggtaggaaactgaaaccaaaaaccagtgtaagcaagtaaacatctaaactgtttcaggagccgcgtagaaggaacgcggcggtgtgccccggaagcggaagtagattctcctatagaaaggctggactacgcggagtggtgacgtttcctcattgggcggaaggttcgctggcactccgttggtcttccagctggtgggagttgacgacgtggtgctgggcgttgggaccctactttatctagttcgggaagttgggttgtggggtcatacctgtctgtctgctcccagctttcttgggtttcttccgacggcgtggggcctcgctaaggaattcccggcccctcagggccacggctttagcggtgtcttttgcgagttcttcgtaagtacatcttaaagctgtcaagatggttctagcagaccttggaagaaaaataacatcagcattacgctcgttgagcaatgccaccattatcaatgaagaggtattgaatgctatgctaaaagaagtctgtaccgctttgttggaagcagatgttaatattaaactagtgaagcaactaagagaaaatgttaagtctgctattgatcttgaagagatggcatctggtcttaacaaaagaaaaatgattcagcatgctgtatttaaagaacttgtgaagcttgtagaccctggagttaaggcatggacacccactaaaggaaaacaaaatgtgattatgtttgttggattgcaagggagtggtaaaacaacaacatgttcaaagctagcatattattaccagaggaaaggttggaagacctgtttaatatgtgcagacacattcagagcaggggcttttgaccaactaaaacagaatgctaccaaagcaagaattccattttatggaagctatacagaaatggatcctgtcatcattgcttctgaaggagtagagaaatttaaaaatgaaaattttgaaattattattgttgatacaagtggccgccacaaacaagaagactctttgtttgaagaaatgcttcaagttgctaatgctatacaacctgataacattgtttatgtgatggatgcctccattgggcaggcttgtgaagcccaggctaaggcttttaaagataaagtagatgtagcctcagtaatagtgacaaaacttgatggccatgcaaaaggaggtggtgcactcagtgcagtcgctgccacaaaaagtccgattattttcattggtacaggggaacatatagatgactttgaacctttcaaaacacagccttttattagcaaacttcttggtatgggcgacattgaaggactgatagataaagtcaacgagttgaagttggatgacaatgaagcacttatagagaagttgaaacatggtcagtttacgttgcgagacatgtatgagcaatttcaaaatatcatgaaaatgggccccttcagtcagatcttggggatgatccctggttttgggacagattttatgagcaaaggaaatgaacaggagtcaatggcaaggctaaagaaattaatgacaataatggatagtatgaatgatcaagaactagacagtacggatggtgccaaagtttttagtaaacaaccaggaagaatccaaagagtagcaagaggatcgggtgtatcaacaagagatgttcaagaacttttgacacaatataccaagtttgcacagatggtaaaaaagatgggaggtatcaaaggacttttcaaagagaaaaataagcttgttattagttaacagacggaaaagaaaggaagttgagaaaaaagagtgctgccagtattggaaaattcacagctgaatttcatgttattttcaagtacttccaggatttatgtgacctgtgatttatctgttttcatattcaaggtaatattaatatttaaaaaaaaactttacatctgtgtagtgtgggtaaatgaaaaaaaattaataaagcaatgattttctttttgtgaacacattatattaaatttagataatataaggaaaaaaaaaacacattacctttactccccagagaatccagtggatcctactgcaaataacagttgctataactaagttttcttctgatatatcataactgtttttccatgttgtcaaatattcttcaaaacataattcttggccaggcatgagccaccacgcctggcctccatgtttaatttttaaaactcaaaagcaaacatagcgaatgttaacatttgttaaatctggttggtagtttgactatttattatgtctgtttttctgtatgtaagatattttgtaatataaaaagaaaaatgagatagttatcactttaaaaacatctgctaagctctttgaagttatatattgcccatttgcacataactgctttgatgntgaatnataattgtgtgtgagagtaactgaccttgtctacagaactagacagtacggatggtgccaaagtttttagtaaacaaccaggaagaatccaaagagtagcaagaggatcgggtgtatcaacaagagatgttcaagaacttttgtcacaatataacaagtttgcacagatggtaagaatctggcaggcagagagtgtatcctctagagtcagctatgacaatggttagc

SEQ ID NO: 293834 - DNA, 1228 bp, Homo sapiens
  misc_feature (1207)..(1207): n is a, c, g, or t
gagtgctccgcctagtcacttttcttaaggtggctcgtcgaggcctgacttcttccccgaaatcacgtccctagacagcctcctattttaccactaactttactcctgcagttattcagcggtaggaaactgaaaccaaaaaccagtgtaagcaagtaaacatctaaactgtttcaggagccgcgtagaaggaacgcggcggtgtgccccggaagcggaagtagattctcctatagaaaggctggactacgcggagtggtgacgtttcctcattgggcggaaggttcgctggcactccgttggtcttccagctggtgggagttgacgacgtggtgctgggcgttgggaccctactttatctagttcgggaagttgggttgtggggtcatacctgtctgtctgctcccagctttcttgggtttcttccgacggcgtggggcctcgctaaggaattcccggcccctcagggccacggctttagcggtgtcttttgcgagttcttcgtaagtacatcttaaagctgtcaagatggttctagcagaccttggaagaaaaataacatcagcattacgctcgttgagcaatgccaccattatcaatgaagaggtattgaatgctatgctaaaagaagtctgtaccgctttgttggaagcagatgttaatattaaactagtgaagcaactaagagaaaatgttaagtctgctattgatcttgaagagatggcatctggtcttaacaaaagaaaaatgattcagcatgctgtatttaaagaacttgtgaagcttgtagaccctggagttaaggcatggacacccactaaaggaaaacaaaatgtgattatgtttgttggattgcaagggagtggtaaaacaacaacatgttcaaagctagcatattattaccagaggaaaggttggaagacctgtttaatatgtgcagacacattcagagcaggggcttttgaccaactaaaacagaatgctaccaaagcaagaattccattttatggaagctatacagaaatggatcctgtcatcattgcttctgaaggagtagagaaatttaaaaatgaaaattttgaaattattattgttgatacaagtggccgccacaaacaagaagactctttgtttgaagaaatgcttcaagttgctaatgctatacaaacctggataacaattgggttaaagttgaagggattgcccnccaaattggggcaaggctttt

SEQ ID NO: 293835 - DNA, 2366 bp, Homo sapiens
gagtgctccgcctagtcacttttcttaaggtggctcgtcgaggcctgacttcttccccgaaatcacgtccctagacagcctcctattttaccactaactttactcctgcagttattcagcggtaggaaactgaaaccaaaaaccagtgtaagcaagtaaacatctaaactgtttcaggagccgcgtagaaggaacgcggcggtgtgccccggaagcggaagtagattctcctatagaaaggctggactacgcggagtggtgacgtttcctcattgggcggaaggttcgctggcactccgttggtcttccagctggtgggagttgacgacgtggtgctgggcgttgggaccctactttatctagttcgggaagttgggttgtggggtcatacctgtctgtctgctcccagctttcttgggtttcttccgacggcgtggggcctcgctaaggaattcccggcccctcagggccacggctttagcggtgtcttttgcgagttcttcgtaagtacatcttaaagctgtcaagatggttctagcagaccttggaagaaaaataacatcagcattacgctcgttgagcaatgccaccattatcaatgaagaggtctgctattgatcttgaagagatggcatctggtcttaacaaaagaaaaatgattcagcatgctgtatttaaagaacttgtgaagcttgtagaccctggagttaaggcatggacacccactaaaggaaaacaaaatgtgattatgtttgttggattgcaagggagtggtaaaacaacaacatgttcaaagctagcatattattaccagaggaaaggttggaagacctgtttaatatgtgcagacacattcagagcaggggcttttgaccaactaaaacagaatgctaccaaagcaagaattccattttatggaagctatacagaaatggatcctgtcatcattgcttctgaaggagtagagaaatttaaaaatgaaaattttgaaattattattgttgatacaagtggccgccacaaacaagaagactctttgtttgaagaaatgcttcaagttgctaatgctatacaacctgataacattgtttatgtgatggatgcctccattgggcaggcttgtgaagcccaggctaaggcttttaaagataaagtagatgtagcctcagtaatagtgacaaaacttgatggccatgcaaaaggaggtggtgcactcagtgcagtcgctgccacaaaaagtccgattattttcattggtacaggggaacatatagatgactttgaacctttcaaaacacagccttttattagcaaacttcttggtatgggcgacattgaaggactgatagataaagtcaacgagttgaagttggatgacaatgaagcacttatagagaagttgaaacatggtcagtttacgttgcgagacatgtatgagcaatttcaaaatatcatgaaaatgggccccttcagtcagatcttggggatgatccctggttttgggacagattttatgagcaaaggaaatgaacaggagtcaatggcaaggctaaagaaattaatgacaataatggatagtatgaatgatcaagaactagacagtacggatggtgccaaagtttttagtaaacaaccaggaagaatccaaagagtagcaagaggatcgggtgtatcaacaagagatgttcaagaacttttgacacaatataccaagtttgcacagatggtaaaaaagatgggaggtatcaaaggacttttcaaaggtggcgacatgtctaagaatgtgagccagtcacagatggcaaaattgaaccaacaaatggccaaaatgatggatcctagggttcttcatcacatgggtggtatggcaggacttcagtcaatgatgaggcagtttcaacagggtgctgctggcaacatgaaaggcatgatgggattcaataatatgtaaagaaaatgccttaatataaactgactcagttgaatacctaatttgctgagacctcagcgtttcccttctttttgcgaattggggggaaagtgtatttttcttgcttatcatgcactctttccttttcttctcgcccgcttttcccctccttttctttttccttccttctttcctccctttaatataagggagaaatacatggtttttgtggaaatcattatatgtttgctttagattttcttctgttttcaccatcataacacttaagttaaatcatgatgtaaaattttagtacttaaaggtttttaattatctcgaaggccaagcattgcatttgtaaacagtcctggtcagtagttaaataatgtttcaattaaagtgctgtaaaataaacttcaaagtggttataagttaa

SEQ ID NO: 293836 - DNA, 1135 bp, Homo sapiens
gtttcaccatattggccaggctggtgtcgaactcctgacctcatgagctgcctgcctcggcctcacaaagtgttgtgattacaggcatgagccaccacgcctggcctccatgtttaatttttaaaactcaaaagcaaacatagcgaatgttaacatttgttaaatctgggtggtagtttgactatgtattatgtctgtttttctgtatgtaagatattttgtaatataaaaagaaaaatgagatagttatcactttaaaaacatctgctaagctctttgaagttatatattgcccatttgcacataactgctttgatggtgaatgataattgtgtgtgagagtaactgaccttgtctacagaactagacagtacggatggtgccaaagtttttagtaaacaaccaggaagaatccaaagagtagcaagaggatcgggtgtatcaacaagagatgttcaagaacttttgacacaatataccaagtttgcacagatggtaaaaaagatgggaggtatcaaaggacttttcaaaggtggcgacatgtctaagaatgtgagccagtcacagatggcaaaattgaaccaacaaatggccaaaatgatggatcctagggttcttcatcacatgggtggtatggcaggacttcagtcaatgatgaggcagtttcaacagggtgctgctggcaacatgaaaggcatgatgggattcaataatatgtaaagaaaatgccttaatataaactgactcagttgaatacctaatttgctgagacctcagcgtttcccttctttttgcgaattggggggaaagtgtatttttcttgcttatcatgcactctttccttttcttctcgcccgcttttcccctccttttctttttccttccttctttcctccctttaatataagggagaaatacatggtttttgtggaaatcattatatgtttgctttagattttcttctgttttcaccatcataacacttaagttaaatcatgatgtaaaattttagtacttaaaggtttttaattatctcgaaggccaagcattgcatttgtaaacagtcctggtcagtagttaaataatgtttcaattaaagtgctgtaaaataaacttcaaagtggttataagttaa

SEQ ID NO: 293837 - DNA, 1208 bp, Homo sapiens
tacggtgtctcacacctgtaatcccagcactctgggaggctgaggtgagtgggtcacgaggtcaggtgtttgagaccagcctggccaagatggtgaaaccctgtctctactaaaaatacaaaaattagctgggtgtggtggcgggcacctgtaatcccagctacttgggaggctgaggcaggagaattacttgaacctgggaggtggaggttgcagtgagccgagatcacgccactgcactctagcctgggtgacagagcaagactccatctcaaaataaataaaaaataaaacactgggtacaattttgctaatagtggcttattcacagatataaataaagtattagcataaatcgtagccttaaaaaagccttttatatgtccttttatatagaattttacatggtcttcaaaaaatagtatgtaattgagaaaaagattagaagggaatatgtagaaatagaaagaattatgttagagtgataggattatgtaattttttcttagtattttctcagttcatcaaactttctattataccctgattatactgattatattacctcctacgctgactcaaaatctttttttttttcccctcaggtggcgacatgtctaagaatgtgagccagtcacagatggcaaaattgaaccaacaaatggccaaaatgatggatcctagggttcttcatcacatgggtggtatggcaggacttcagtcaatgatgaggcagtttcaacagggtgctgctggcaacatgaaaggcatgatgggattcaataatatgtaaagaaaatgccttaatataaactgactcagttgaatacctaatttgctgagacctcagcgtttcccttctttttgcgaattggggggaaagtgtatttttcttgcttatcatgcactctttccttttcttctcgcccgcttttcccctccttttctttttccttccttctttcctccctttaatataagggagaaatacatggtttttgtggaaatcattatatgtttgctttagattttcttctgttttcaccatcataacacttaagttaaatcatgatgtaaaattttagtacttaaaggtttttaattatctcgaaggccaagcattgcatttgtaaacagtcctggtcagtagttaaataatgtttcaattaaagtgctgtaaaataaacttcaaagtggttataagttaa

SEQ ID NO: 293838 - DNA, 1396 bp, Homo sapiens
  misc_feature (1162)..(1162): n is a, c, g, or t
  misc_feature (1168)..(1168): n is a, c, g, or t
gtttcaccatattggccaggctggtgtcgaactcctgacctcatgagctgcctgcctcggcctcacaaagtgttgtgattacaggcatgagccaccacgcctggcctccatgtttaatttttaaaactcaaaagcaaacatagcgaatgttaacatttgttaaatctgggtggtagtttgactatgtattatgtctgtttttctgtatgtaagatattttgtaatataaaaagaaaaatgagatagttatcactttaaaaacatctgctaagctctttgaagttatatattgcccatttgcacataactgctttgatggtgaatgataattgtgtgtgagagtaactgaccttgtctacagaactagacagtacggatggtgccaaagtttttagtaaacaaccaggaagaatccaaagagtagcaagaggatcgggtgtatcaacaagagatgttcaagaacttttgacacaatataccaagtttgcacagatggtaaaaaagatgggaggtatcaaaggacttttcaaagacggaaaagaaaggaagttgagaaaaaagagtgctgccagtattggaaaattcacagctgaatttcatgttattttcaagtacttccaggatttatgtgacctgtgatttatctgttttcatattcaaggtaatattaatatttaaaaaaaaactttacatctgtgtagtgtgggtaaatgaaaaaaaattaataaagcaatgattttctttttgtgaacacattatattaaatttagataatataaggaaaaaaaaaacacattacctttactccccagagaatccagtggatcctactgcaaataacagttgctataactaagttttcttctgatatatcataactgtttttccatgttgtcaaatattcttcaaaacataattcttggccaggcatgagccaccacgcctggcctccatgtttaatttttaaaactcaaaagcaaacatagcgaatgttaacatttgttaaatctggttggtagtttgactatttattatgtctgtttttctgtatgtaagatattttgtaatataaaaagaaaaatgagatagttatcactttaaaaacatctgctaagctctttgaagttatatattgcccatttgcacataactgctttgatgntgaatnataattgtgtgtgagagtaactgaccttgtctacagaactagacagtacggatggtgccaaagtttttagtaaacaaccaggaagaatccaaagagtagcaagaggatcgggtgtatcaacaagagatgttcaagaacttttgtcacaatataacaagtttgcacagatggtaagaatctggcaggcagagagtgtatcctctagagtcagctatgacaatggttagc

SEQ ID NO: 293839 - DNA, 1152 bp, Homo sapiens
  misc_feature (918)..(918): n is a, c, g, or t
  misc_feature (924)..(924): n is a, c, g, or t
agccagttttttgcccaagggaattgaccgggagtcattgccaaggctaagaaaattattgccattatggttagtttgaatgatcaggaactagacagtacggatggtgccaaagtttttagtaaacaaccaggaagaatccaaagagtagcaagaggatcgggtgtatcaacaagagatgttcaagaacttttgacacaatataccaagtttgcacagatggtaaaaaagatgggaggtatcaaaggacttttcaaagagaaaaataagcttgttattagttaacagacggaaaagaaaggaagttgagaaaaaagagtgctgccagtattggaaaattcacagctgaatttcatgttattttcaagtacttccaggatttatgtgacctgtgatttatctgttttcatattcaaggtaatattaatatttaaaaaaaaactttacatctgtgtagtgtgggtaaatgaaaaaaaattaataaagcaatgattttctttttgtgaacacattatattaaatttagataatataaggaaaaaaaaaacacattacctttactccccagagaatccagtggatcctactgcaaataacagttgctataactaagttttcttctgatatatcataactgtttttccatgttgtcaaatattcttcaaaacataattcttggccaggcatgagccaccacgcctggcctccatgtttaatttttaaaactcaaaagcaaacatagcgaatgttaacatttgttaaatctggttggtagtttgactatttattatgtctgtttttctgtatgtaagatattttgtaatataaaaagaaaaatgagatagttatcactttaaaaacatctgctaagctctttgaagttatatattgcccatttgcacataactgctttgatgntgaatnataattgtgtgtgagagtaactgaccttgtctacagaactagacagtacggatggtgccaaagtttttagtaaacaaccaggaagaatccaaagagtagcaagaggatcgggtgtatcaacaagagatgttcaagaacttttgtcacaatataacaagtttgcacagatggtaagaatctggcaggcagagagtgtatcctctagagtcagctatgacaatggttagc

SEQ ID NO: 293840 - DNA, 847 bp, Homo sapiens
gagtgctccgcctagtcacttttcttaaggtggctcgtcgaggcctgacttcttccccgaaatcacgtccctagacagcctcctattttaccactaactttactcctgcagttattcagcggtaggaaactgaaaccaaaaaccagtgtaagcaagtaaacatctaaactgtttcaggagccgcgtagaaggaacgcggcggtgtgccccggaagcggaagtagattctcctatagaaaggctggactacgcggagtggtgacgtttcctcattgggcggaaggttcgctggcactccgttggtcttccagctggtgggagttgacgacgtggtgctgggcgttgggaccctactttatctagttcgggaagttgggttgtggggtcatacctgtctgtctgctcccagctttcttgggtttcttccgacggcgtggggcctcgctaaggaattcccggcccctcagggccacggctttagcggtgtcttttgcgagttcttcgtaagtacatcttaaagctgtcaagatggttctagcagaccttggaagaaaaataacatcagcattacgctcgttgagcaatgccaccattatcaatgaagaggtatgtaaaatattgtatgaaatatatatgattgtatattgtcactagcattgggaagatggcttattcataatccctgtatttatatgtattttgatgtagacttaatacttgtagataaaagcctaaaagtggatacagtaagtagtgttttattgagaaattaactacaacttcaaatttacttcaactttctataaagaattttccaaaaaaaaatcgaaaaaaacctgaccttaac

SEQ ID NO: 293841 - DNA, 3071 bp, Homo sapiens
ctcccctctgatcagcttctccccatccttggaccaggacgactacctgtggggcttggaggcgggtgagggcatcagcgatctcttcgactcctacgaccttggggacctgttgattaattgagtggccctgcctgcccccagcagcctgcccccgactctacctcctcacagacaggtgtccagtctgccagaatgctaattgcacttaggcctcatggttctagtaaacggcagctgtgggcccttttgcctcttcccctgttcttggcctcacatctccagctgagctgccggtcttggcttcctggtcgcctctgtcccagagatggtcccagggagccatcctagggcaggtagcactgaggctcctgtggaaacaggagccacctgctcaggagacccctttcctgaggaagtccttacctctccccttgagatgtaaaaatggtccagcagagacaagctcccgtggaaaacagacaggagcatgggggcagctgtcatggctgtggcgggcacttttcctcagagtttctgccttgcgctggtccaggagccattttgcaccaaggacttggtaggcagaggcagccccactgtaaagaagggtcagattaaaacaaaaaactgccaaaagcatcccctctgccccccatgtggcactggcatcattctctgcttccctgggaggaattttttcaccatgttattgaaggggatggttcattaaggactccacccctcagagctcactcagaccccaaggacagaggtgactggggcttggtgacttgttcactccttttttcccaggtatactgaaggggtgacagagagaggtcttcatggcagaccaggccttcacagctaatggggagaggaactcatgttacctctgcaggcctggggtcctgagggggtcttttggcttcagcctgttcccccagaggcttgatcatcccacattgtcccttcagctcagctgctcttctcccccacccaccctgggatgtgggtgctctgggctgaaccaaggctatgacttctggagagaggctcaggggttggtctgagaggcctgccatccacccctcagggagctaggttttctcagaggctcagctggacagcactttttagaaaagtttgtagcattaagctggtttaaaatatgaagttggttttgttggatggctcctgagctgactgactgatgtctgaagtttgagacgagggattatttcagggtggggcccaatgtgatctaatgcccagctggggacaattgtgcctcatcatttgctcaaattcctgggcccccaagttagccccctcccaggagtggtcagcgggtcacagctgcccccactctataagcagggctaattgtgtaccctttgcagaaatgcttttggtctcctacccaaatactcacaagggtcttatcagacgcccgtcttaaagtccagcatgctcagggaccctgtgtaggatctcgtttgtggtgagtgggctgctctgaggtctccactgggctgccatttagccatgtgccatctctgaagtcagaggtgtttgactcccattccttgggctctggagctttccccaagaattacatcagagaaaaggaagaaggggcctgcaggacccattgggaatgagtttaatactgaagtctggaatgtaagctcatgccctagaggcctctccatatggctggtcaggggagctgccttcaggcttgtgccccgtgtgctcagcagctgcctctgtccccctctactgtccctttcacaccttgcctggccaaggggctagacctcccaggctaagcctcagattcagtgcaggacacaagctcatgcccccgtcttgccagtgacacttgaagcctcccgacttccacagagtgcttcaggacacattttgagtggtattttcttttctttttttcttcttttttttttttttggaaatggagtctcgctctgttgcccaggctgggagtgcaggggcctgatctcggctcactggcaacctcgtgcctcccaggttcaagcgattcttctggcctaagcctccagagtagctgggactatagacttgcaccaccacgcccggctaatttggtattttgggtcgagacgggggtttggccatgttagtcaggctggtcttgaactcctgacctcaagtgatccaccacctcggcctcccaaagtgttgagatgacaggcacgagccaccaggcccagcctgagtggtattttctttagggaccaggtagactttaaaacgagggtaagagaaaagccagtgtctttctgaggtaaataatttctgccaggaaacttcccagccccaccagcagcccccctaaaaaaatcactcgtgtccccagggacttctaaagcttggggctccaggaaatcatccagtagagttggagattcagagatttcttgaagccagggacatgctcctaactcctttcccattaaaggtgttagaatagaccagagggtgtcccttttccacagtaatgggatcggctggtgtgccttcagggaggaagagggaggtggtcaagcttgaaaaactggctttaggatggttctgactttgttctccctccccaagtgttctcaacctccattctgcagtgttcagagttttagggaaagggtttgggtgccccagcatccaggtgttgtgtggcttagcgcatgtgaagtgaaaaccttctggggttgtttggaagcagctttctggttcttgtgattgtatcctgaggtcccagaaccctattctcccacgaggatcctcagtgaccatggtggccacacgcctggccagcctgctggctcctgggtgagctgaagaaccttgcctgtggcacttttcgagggtgagctggaaccgagagaacatggtccccgtgctgggactcatgcgggtcatttcctgccggcctggtttcgcctggtcgtgtctttatgagcaccatgtaagcctccttgtattgagataattgggcattaaacattaaactgcagctctgggca

SEQ ID NO: 293842 - DNA, 3021 bp, Homo sapiens
ttttagtgagacctctgcagacaggcccatcactgtccatgttccagggcaggtctgggtttccaagggaggggcccaggctacatccttggtttccccactgtggtgggggctgggactctgaggggctgtccagtctgccagaatgctaattgcacttaggcctcatggttctagtaaacggcagctgtgggcccttttgcctcttcccctgttcttggcctcacatctccagctgagctgccggtcttggcttcctggtcgcctctgtcccagagatggtcccagggagccatcctagggcaggtagcactgaggctcctgtggaaacaggagccacctgctcaggagacccctttcctgaggaagtccttacctctccccttgagatgtaaaaatggtccagcagagacaagctcccgtggaaaacagacaggagcatgggggcagctgtcatggctgtggcgggcacttttcctcagagtttctgccttgcgctggtccaggagccattttgcaccaaggacttggtaggcagaggcagccccactgtaaagaagggtcagattaaaacaaaaaactgccaaaagcatcccctctgccccccatgtggcactggcatcattctctgcttccctgggaggaattttttcaccatgttattgaaggggatggttcattaaggactccacccctcagagctcactcagaccccaaggacagaggtgactggggcttggtgacttgttcactccttttttcccaggtatactgaaggggtgacagagagaggtcttcatggcagaccaggccttcacagctaatggggagaggaactcatgttacctctgcaggcctggggtcctgagggggtcttttggcttcagcctgttcccccagaggcttgatcatcccacattgtcccttcagctcagctgctcttctcccccacccaccctgggatgtgggtgctctgggctgaaccaaggctatgacttctggagagaggctcaggggttggtctgagaggcctgccatccacccctcagggagctaggttttctcagaggctcagctggacagcactttttagaaaagtttgtagcattaagctggtttaaaatatgaagttggttttgttggatggctcctgagctgactgactgatgtctgaagtttgagacgagggattatttcagggtggggcccaatgtgatctaatgcccagctggggacaattgtgcctcatcatttgctcaaattcctgggcccccaagttagccccctcccaggagtggtcagcgggtcacagctgcccccactctataagcagggctaattgtgtaccctttgcagaaatgcttttggtctcctacccaaatactcacaagggtcttatcagacgcccgtcttaaagtccagcatgctcagggaccctgtgtaggatctcgtttgtggtgagtgggctgctctgaggtctccactgggctgccatttagccatgtgccatctctgaagtcagaggtgtttgactcccattccttgggctctggagctttccccaagaattacatcagagaaaaggaagaaggggcctgcaggacccattgggaatgagtttaatactgaagtctggaatgtaagctcatgccctagaggcctctccatatggctggtcaggggagctgccttcaggcttgtgccccgtgtgctcagcagctgcctctgtccccctctactgtccctttcacaccttgcctggccaaggggctagacctcccaggctaagcctcagattcagtgcaggacacaagctcatgcccccgtcttgccagtgacacttgaagcctcccgacttccacagagtgcttcaggacacattttgagtggtattttcttttctttttttcttcttttttttttttttggaaatggagtctcgctctgttgcccaggctgggagtgcaggggcctgatctcggctcactggcaacctcgtgcctcccaggttcaagcgattcttctggcctaagcctccagagtagctgggactatagacttgcaccaccacgcccggctaatttggtattttgggtcgagacgggggtttggccatgttagtcaggctggtcttgaactcctgacctcaagtgatccaccacctcggcctcccaaagtgttgagatgacaggcacgagccaccaggcccagcctgagtggtattttctttagggaccaggtagactttaaaacgagggtaagagaaaagccagtgtctttctgaggtaaataatttctgccaggaaacttcccagccccaccagcagcccccctaaaaaaatcactcgtgtccccagggacttctaaagcttggggctccaggaaatcatccagtagagttggagattcagagatttcttgaagccagggacatgctcctaactcctttcccattaaaggtgttagaatagaccagagggtgtcccttttccacagtaatgggatcggctggtgtgccttcagggaggaagagggaggtggtcaagcttgaaaaactggctttaggatggttctgactttgttctccctccccaagtgttctcaacctccattctgcagtgttcagagttttagggaaagggtttgggtgccccagcatccaggtgttgtgtggcttagcgcatgtgaagtgaaaaccttctggggttgtttggaagcagctttctggttcttgtgattgtatcctgaggtcccagaaccctattctcccacgaggatcctcagtgaccatggtggccacacgcctggccagcctgctggctcctgggtgagctgaagaaccttgcctgtggcacttttcgagggtgagctggaaccgagagaacatggtccccgtgctgggactcatgcgggtcatttcctgccggcctggtttcgcctggtcgtgtctttatgagcaccatgtaagcctccttgtattgagataattgggcattaaacattaaactgcagctctgggca

SEQ ID NO: 293843 - DNA, 3138 bp, Homo sapiens
ctcccctctgatcagcttctccccatccttggaccaggacgactacctgtggggcttggaggcgggtgagggcatcagcgatctcttcgactcctacgaccttggggacctgttgattaattgagtggccctgcctgcccccagcagcctgcccccgactctacctcctcacagacaggtgtccagtctgccagaatgctaattgcacttaggcctcatggttctagtaaacggcagctgtgggcccttttgcctcttcccctgttcttggcctcacatctccagctgagctgccggtcttggcttcctggtcgcctctgtcccagagatggtcccagggagccatcctagggcaggtagcactgaggctcctgtggaaacaggagccacctgctcaggagacccctttcctgaggaagtccttacctctccccttgagatgtaaaaatggtccagcagagacaagctcccgtggaaaacagacaggagcatgggggcagctgtcatggctgtggcgggcacttttcctcagagtttctgccttgcgctggtccaggagccattttgcaccaaggacttggtaggcagaggcagccccactgtaaagaagggtcagattaaaacaaaaaactgccaaaagcatcccctctgccccccatgtggcactggcatcattctctgcttccctgggaggaattttttcaccatgttattgaaggggatggttcattaaggactccacccctcagagctcactcagaccccaaggacagaggtgactggggcttggtgacttgttcactccttttttcccaggtatactgaaggggtgacagagagaggtcttcatggcagaccaggccttcacagctaatggggagaggaactcatgttacctctgcaggcctggggtcctgagggggtcttttggcttcagcctgttcccccagaggcttgatcatcccacattgtcccttcagctcagctgctcttctcccccacccaccctgggatgtgggtgctctgggctgaaccaaggctatgacttctggagagaggctcaggggttggtctgagaggcctgccatccacccctcagggagctaggttttctcagaggctcagctggacagcactttttagaaaagtttgtagcattaagctggtttaaaatatgaagttggttttgttggatggctcctgagctgactgactgatgtctgaagtttgagacgagggattatttcagggtggggcccaatgtgatctaatgcccagctggggacaattgtgcctcatcatttgctcaaattcctgggcccccaagttagccccctcccaggagtggtcagcgggtcacagctgcccccactctataagcagggctaattgtgtaccctttgcagaaatgcttttggtctcctacccaaatactcacaagggtcttatcagacgcccgtcttaaagtccagcatgctcagggaccctgtgtaggatctcgtttgtggtgagtgggctgctctgaggtctccactgggctgccatttagccatgtgccatctctgaagtcagaggtgtttgactcccattccttgggctctggagctttccccaagaattacatcagagaaaaggaagaaggggcctgcaggacccattgggaatgagtttaatactgaagtctggaatgtaagctcatgccctagaggcctctccatatggctggtcaggggagctgccttcaggcttgtgccccgtgtgctcagcagctgcctctgtccccctctactgtccctttcacaccttgcctggccaaggggctagacctcccaggctaagcctcagattcagtgcaggacacaagctcatgcccccgtcttgccagtgacacttgaagcctcccgacttccacagagtgcttcaggacacattttgagtggtattttcttttctttttttcttcttttttttttttttggaaatggagtctcgctctgttgcccaggctgggagtgcaggggcctgatctcggctcactggcaacctcgtgcctcccaggttcaagcgattcttctggcctaagcctccagagtagctgggactatagacttgcaccaccacgcccggctaatttggtattttgggtcgagacgggggtttggccatgttagtcaggctggtcttgaactcctgacctcaagtgatccaccacctcggcctcccaaagtgttgagatgacaggcacgagccaccaggcccagcctgagtggtattttctttagggaccaggtagactttaaaacgagggtaagagaaaagccagtgtctttctgaggtaaataatttctgccaggaaacttcccagccccaccagcagcccccctaaaaaaatcactcgtgtccccagggacttctaaagcttggggctccaggaaatcatccagtagagttggagattcagagatttcttgaagccagggacatgctcctaactcctttcccattaaaggtgttagaatagaccagagggtgtcccttttccacagtaatgggatcggctggtgtgccttcagggaggaagagggaggtggtcaagcttgaaaaactggctttaggatggttctgactttgttctccctccccaagtgttctcaacctccattctgcagtgttcagagttttagggaaagggtttgggtgccccagcatccaggtgttgtgtggcttagcgcatgtgaagtgaaaaccttctggggttgtttggaagcagctttctggttcttgtgattgtatcctgaggtcccagaaccctattctcccacgaggatcctcagtgaccatggtggccacacgcctggccagcctgctggctcctgggtgagctgaagaaccttgcctgtggcacttttcgagggtgagctggaaccgagagaacatggtccccgtgctgggactcatgcgggtcatttcctgccggcctggtttcgcctggtcgtgtctttatgagcaccatgtaagcctccttgtattgagataattgggcattaaacattaaactgcagctctgggcaaaaaaaacgaagaagtaacacatgcatcacaacacgagcacagagaaataaacgacagagggggcgg

SEQ ID NO: 293844 - DNA, 2024 bp, Homo sapiens
ctcccctctgatcagcttctccccatccttggaccaggacgactacctgtggggcttggaggcgggtgagggcatcagcgatctcttcgactcctacgaccttggggacctgttgattaattgagtggccctgcctgcccccagcagcctgcccccgactctacctcctcacagacaggtgtccagtctgccagaatgctaattgcacttaggcctcatggttctagtaaacggcagctgtgggcccttttgcctcttcccctgttcttggcctcacatctccagctgagctgccggtcttggcttcctggtcgcctctgtcccagagatggtcccagggagccatcctagggcaggtagcactgaggctcctgtggaaacaggagccacctgctcaggagacccctttcctgaggaagtccttacctctccccttgagatgtaaaaatggtccagcagagacaagctcccgtggaaaacagacaggagcatgggggcagctgtcatggctgtggcgggcacttttcctcagagtttctgccttgcgctggtccaggagccattttgcaccaaggacttggtaggcagaggcagccccactgtaaagaagggtcagattaaaacaaaaaactgccaaaagcatcccctctgccccccatgtggcactggcatcattctctgcttccctgggaggaattttttcaccatgttattgaaggggatggttcattaaggactccacccctcagagctcactcagaccccaaggacagaggtgactggggcttggtgacttgttcactccttttttcccaggtatactgaaggggtgacagagagaggtcttcatggcagaccaggccttcacagctaatggggagaggaactcatgttacctctgcaggcctggggtcctgagggggtcttttggcttcagcctgttcccccagaggcttgatcatcccacattgtcccttcagctcagctgctcttctcccccacccaccctgggatgtgggtgctctgggctgaaccaaggctatgacttctggagagaggctcaggggttggtctgagaggcctgccatccacccctcagggagctaggttttctcagaggctcagctggacagcactttttagaaaagtttgtagcattaagctggtttaaaatatgaagttggttttgttggatggctcctgagctgactgactgatgtctgaagtttgagacgagggattatttcagggtggggcccaatgtgatctaatgcccagctggggacaattgtgcctcatcatttgctcaaattcctgggcccccaagttagccccctcccaggagtggtcagcgggtcacagctgcccccactctataagcagggctaattgtgtaccctttgcagaaatgcttttggtctcctacccaaatactcacaagggtcttatcagacgcccgtcttaaagtccagcatgctcagggaccctgtgtaggatctcgtttgtggtgagtgggctgctctgaggtctccactgggctgccatttagccatgtgccatctctgaagtcagaggtgtttgactcccattccttgggctctggagctttccccaagaattacatcagagaaaaggaagaaggggcctgcaggacccattgggaatgagtttaatactgaagtctggaatgtaagctcatgccctagaggcctctccatatggctggtcaggggagctgccttcaggcttgtgccccgtgtgctcagcagctgcctctgtccccctctactgtccctttcacaccttgcctggccaaggggctagacctcccaggctaagcctcagattcagtgcaggacacaagctcatgcccccgtcttgccagtgacacttgaagcctcccgacttccacagagtgcttcaggacacattttgagtggtattttcttttctttttttcttcttttttttttttttggaaatggagcctgggcaacaagaacgaaactctgtctcccaaagaa

SEQ ID NO: 293845 - DNA, 946 bp, Homo sapiens
ccaagcccacgcggttccgggtcccaagatttggctccaagagctattcgcagagaaacagcctcgcacaaaaagccaccgcccccgaaacccgcgggaaatctgtttcctgtgaaaggcctggcctccgggcattggcggtttccctgatcctctctcccaaattttccggcaggggattgatcgaggcgacatttaggactggggtgggcgagggagtggcggttctcgtcccaagttacaggtgaggacgttcaggccaaggcgtagccaagatcgcgccgccctgtagcttgaggaggcgccgggattcgaaccaaggctgtgcccaatcctaagccctgcgaggtcttgtggaaccgacatgacccactctttggtttgtccagagacagtgagcagggtgagttcagtgctgaatcgcaacactcggcagtttggaaaaaaacatcttttcgaccaggatgaggagacatgttggaactcagaccagggcccctcccagtgggtgacgctggagtttccccagctcatccgtgtctcccagctgcagatccagtttcagggtggcttctccagtcgccggggctgcctggaaggttcacagggcactcaggctctccacaagattgtagatttctaccctgaggacaacaactcgcttcagactttccccataccagctgctgaagtggaccggctgaaggtgacgtttgaggatgccactgacttttttggccgtgtggtcatctaccacctgcgggtgcttggggagaaggggacaaacagggacccttgcagagacctgcattacagagcaaagctgggagaaccgaggactcaccccaggaacctcaacttcccctaagtttgtaaaaatgcacttttgtagcttttcagaattaatataaaaatatttcctaccaagcaaaaaaaaaaaattgtg

SEQ ID NO: 293846 - DNA, 681 bp, Homo sapiens
ccaagcccacgcggttccgggtcccaagatttggctccaagagctattcgcagagaaacagcctcgcacaaaaagccaccgcccccgaaacccgcgggaaatctgtttcctgtgaaaggcctggcctccgggcattggcggtttccctgatcctctctcccaaattttccggcaggggattgatcgaggcgacatttaggactggggtgggcgagggagtggcggttctcgtcccaagttacaggtgaggacgttcaggccaaggcgtagccaagatcgcgccgccctgtagcttgaggaggcgccgggattcgaaccaaggctgtgcccaatcctaagccctgcgaggtcttgtggaaccgacatgacccactctttggtttgtccagagacagtgagcagactttccccataccagctgctgaagtggaccggctgaaggtgacgtttgaggatgccactgacttttttggccgtgtggtcatctaccacctgcgggtgcttggggagaaggggacaaacagggacccttgcagagacctgcattacagagcaaagctgggagaaccgaggactcaccccaggaacctcaacttcccctaagtttgtaaaaatgcacttttgtagcttttcagaattaatataaaaatatttcctaccaagcaaaaaaaaaaaattgtg

SEQ ID NO: 293847 - DNA, 1313 bp, Homo sapiens
ccaagcccacgcggttccgggtcccaagatttggctccaagagctattcgcagagaaacagcctcgcacaaaaagccaccgcccccgaaacccgcgggaaatctgtttcctgtgaaaggcctggcctccgggcattggcggtttccctgatcctctctcccaaattttccggcaggggattgatcgaggcgacatttaggactggggtgggcgagggagtggcggttctcgtcccaagttacaggtgaggacgttcaggccaaggcgtagccaagatcgcgccgccctgtagcttgaggaggcgccgggattcgaaccaaggctgtgcccaatcctaagccctgcgaggtcttgtggaaccgacatgacccactctttggtttgtccagagacagtgagcagggtgagttcagtgctgaatcgcaacactcggcagtttggaaaaaaacatcttttcgaccaggatgaggagacatgttggaactcagaccagggcccctcccagtgggtgacgctggagtttccccagctcatccgtgtctcccagctgcagatccagtttcagggtggcttctccagtcgccggggctgcctggaaggttcacagggcactcaggctctccacaagattgtagatttctaccctgaggacaacaactcgcttcagactttccccataccagctgctgaagtggaccggctgaaggtgacgtttgaggatgccactgacttttttggccgtgtggtcatctaccacctgcgggtgcttggggagaaggtgtgagacctctaggggctgtctcctccaggaagccctccgggaagcacagcaaagtccctcattctgcacagaaggtttattggttcctcttgggaagggtcccctcccaccacctgtccagaagctgcctttgaagtcagttctgggtttccccagctctggctgaccattttgttccctgagtgtctgagtccccggcaggcggccttcactcagggtcagcgggcaccaggttgctctggaagagcttgaggatgtggttctcgatcacctgttgcactgagatggggcagggaaaaggtgggctgtgagcttgaatcgggagtggggtggaggcacaggccaacctgcgctctccccttaggggacaaacagggacccttgcagagacctgcattacagagcaaagctgggagaaccgaggactcaccccaggaacctcaacttcccctaagtttgtaaaaatgcacttttgtagcttttcagaattaatataaaaatatttcctaccaagcaaaaaaaaaaaattgtg

SEQ ID NO: 293848 - DNA, 1605 bp, Homo sapiens
ccaagcccacgcggttccgggtcccaagatttggctccaagagctattcgcagagaaacagcctcgcacaaaaagccaccgcccccgaaacccgcgggaaatctgtttcctgtgaaaggcctggcctccgggcattggcggtttccctgatcctctctcccaaattttccggcaggggattgatcgaggcgacatttaggactggggtgggcgagggagtggcggttctcgtcccaagttacaggtgaggacgttcaggccaaggcgtagccaagatcgcgccgccctgtagcttgaggaggcgccgggattcgaaccaaggctgtgcccaatcctaagccctgcgaggtcttgtggaaccgacatgacccactctttggtttgtccagagacagtgagcagggtgagttcagtgctgaatcgcaacactcggcagtttggaaaaaaacatcttttcgaccaggatgaggagacatgttggaactcagaccagggcccctcccagtgggtgacgctggagtttccccagctcatccgtgtctcccagctgcagatccagtttcagggtggcttctccagtcgccggggctgcctggaaggttcacagggcactcaggctctccacaagattgtagatttctaccctgaggacaacaactcgcttcaggatatcctgcccctgcttctggggtgggtggtctgtgcctctggaagctttggactcacccaaacccgaatgggaaccctgatgtgtgatcttgaacacgtgacctctaggactccactttttctgtaaaatggtgctgatgaccacctgttctgtgtgagaggcttagagggacctgcagcttccccaggttgcccacatcggtggagtgtgagctgggtctggaaggggtgggggcctgcgggtgggaaaccagaaatcaccagtttcccttgactgcccacgctcacacactttccccataccagctgctgaagtggaccggctgaaggtgacgtttgaggatgccactgacttttttggccgtgtggtcatctaccacctgcgggtgcttggggagaaggtgtgagacctctaggggctgtctcctccaggaagccctccgggaagcacagcaaagtccctcattctgcacagaaggtttattggttcctcttgggaagggtcccctcccaccacctgtccagaagctgcctttgaagtcagttctgggtttccccagctctggctgaccattttgttccctgagtgtctgagtccccggcaggcggccttcactcagggtcagcgggcaccaggttgctctggaagagcttgaggatgtggttctcgatcacctgttgcactgagatggggcagggaaaaggtgggctgtgagcttgaatcgggagtggggtggaggcacaggccaacctgcgctctccccttaggggacaaacagggacccttgcagagacctgcattacagagcaaagctgggagaaccgaggactcaccccaggaacctcaacttcccctaagtttgtaaaaatgcacttttgtagcttttcagaattaatataaaaatatttcctaccaagcaaaaaaaaaaaattgtg

SEQ ID NO: 293849 - DNA, 1207 bp, Homo sapiens
ccaagcccacgcggttccgggtcccaagatttggctccaagagctattcgcagagaaacagcctcgcacaaaaagccaccgcccccgaaacccgcgggaaatctgtttcctgtgaaaggcctggcctccgggcattggcggtttccctgatcctctctcccaaattttccggcaggggattgatcgaggcgacatttaggactggggtgggcgagggagtggcggttctcgtcccaagttacaggtgaggacgttcaggccaaggcgtagccaagatcgcgccgccctgtagcttgaggaggcgccgggattcgaaccaaggctgtgcccaatcctaagccctgcgaggtcttgtggaaccgacatgacccactctttggtttgtccagagacagtgagcagggtgagttcagtgctgaatcgcaacactcggcagtttggaaaaaaacatcttttcgaccaggatgaggagacatgttggaactcagaccaggttcacagggcactcaggctctccacaagattgtagatttctaccctgaggacaacaactcgcttcagactttccccataccagctgctgaagtggaccggctgaaggtgacgtttgaggatgccactgacttttttggccgtgtggtcatctaccacctgcgggtgcttggggagaaggtgtgagacctctaggggctgtctcctccaggaagccctccgggaagcacagcaaagtccctcattctgcacagaaggtttattggttcctcttgggaagggtcccctcccaccacctgtccagaagctgcctttgaagtcagttctgggtttccccagctctggctgaccattttgttccctgagtgtctgagtccccggcaggcggccttcactcagggtcagcgggcaccaggttgctctggaagagcttgaggatgtggttctcgatcacctgttgcactgagatggggcagggaaaaggtgggctgtgagcttgaatcgggagtggggtggaggcacaggccaacctgcgctctccccttaggggacaaacagggacccttgcagagacctgcattacagagcaaagctgggagaaccgaggactcaccccaggaacctcaacttcccctaagtttgtaaaaatgcacttttgtagcttttcagaattaatataaaaatatttcctaccaagcaaaaaaaaaaaattgtg

SEQ ID NO: 293850 - DNA, 906 bp, Homo sapiens
gatttggctccaagagctattcgcagagaaacagcctcgcacaaaaagccaccgcccccgaaacccgcgggaaatctgtttcctgtgaaaggcctggcctccgggcattggcggtttccctgatcctctctcccaaattttccggcaggggattgatcgaggcgacatttaggactggggtgggcgagggagtggcggttctcgtcccaagttacaggtgaggacgttcaggccaaggcgtagccaagatcgcgccgccctgtagcttgaggaggcgccgggattcgaaccaaggctgtgcccaatcctaagccctgcgaggtcttgtggaaccgacatgacccactctttggtttgtccagagacagtgagcagtaagagtctgtggggacaggcagtggcgaggccctaagcctggggtcgagccctcagtggacagatctgggggtcaggccctccgcggagctgagagctggtctcagcccctctcttcgccttgatcctggtgcctccagggtgagttcagtgctgaatcgcaacactcggcagtttggaaaaaaacatcttttcgaccaggatgaggagacatgttggaactcagaccaggtgaggcgcctccctcgaccctccatctctagggtgattcagattcagatctcatgccttgagaacgtcagggggccctcatgggtggccaggaaaggaacatgtgccgaatttccttcttcccctccattccaagaactatgtgaatgagacaggcatagcagggctctgtgcctgcagtgagcttgcgcctcagtttccctgtctgcttccagggcccctcccagtgggtgacgctggagtttccccagctcatccgtgtctcccagctgcagatccagtttcagggtggcttctcca

SEQ ID NO: 293851 - DNA, 792 bp, Homo sapiens
cacgcccgcccccgcgctcgctggctcccacccggggagggtcgttgtgcgcctgcgccagggtgggggttgccgtcgcgcctaggcctttccctcaggttttcctcttccccactgcggctccccagtcggcgcttgcgcggagaactcagcgctgagattgtctaaagccccaggaaaaatggtggaaaattcaccgtcgccattgccagaaagagcgatttatggctttgttcttttcttaagctcccaatttggcttcatactttacctcgtgtgggcctttattcctgaatcttggctaaactctttaggtttaacctattggcctcaaaaatattgggcagttgcattacctgtctacctccttattgctatagtaattggctacgtgctcttgtttgggattaacatgatgagtacctctccactcgactccatccatacaatcacagataactatgcaaaaaatcaacagcagaagaaataccaagaggaggccattccagccttaagagatatttctattagtgaagtaaaccaaatgttctttcttgcagccaaagaactttacaccaaaaactgaactgtgtgtaaccatagtaacaccaagcacgtatttatttataagtttttgccattataattttgaccataaattaatttgaccatctctcttattaatagagaagtaaaaaatgtaacttgaccttctcttagattatgttcaatgaatattgtaaatgttcaagtattgttaatgaatagaataaatacaatattgcattccca

SEQ ID NO: 293852 - DNA, 953 bp, Homo sapiens
  misc_feature (859)..(859): n is a, c, g, or t
  misc_feature (882)..(882): n is a, c, g, or t
  misc_feature (921)..(921): n is a, c, g, or t
cacgcccgcccccgcgctcgctggctcccacccggggagggtcgttgtgcgcctgcgccagggtgggggttgccgtcgcgcctaggcctttccctcaggttttcctcttccccactgcggctccccagtcggcgcttgcgcggagaactcagcgctgagattgtctaaagccccaggaaaaatggtggaaaattcaccgtcgccattgccagaaagagcgatttatggctttgttcttttcttaagctcccaatttggcttcatactttacctcgtgtgggcctttattcctgaatcttggctaaactctttaggtttaacctattggcctcaaaaatattgggcagttgcattacctgtctacctccttattgctatagtaattggctacgtgctcttgtttgggattaacatgatgagtacctctccactcgactccatccatacaatcacagataactatgcaaaaaatcaacagcagaagaaataccaagaggaggccattccagccttaagagatatttctattagtgaagtaaaccaaatgttctttcttgcagccaaagaactttacaccaaaaactgaactgtgtgtaaccatagtaacaccaagcacgtatttatttataagtttttgccattataattttgaccataaattaatttgaccatctctcttattaatagagaagtaaaaaatgtaacttgaccttctcttagattatgttcaatgaatattgtaaatgttcaagtattgttaatgaatagaataaatacaatattgcattcccaaaaaaaaaaaaaaaaaaaaatttgtgggggcggccggaaaaatttaaaaccttggtgggggggcccnaggataggaagggcaaggtccangaaccggcggaagggggttcccaaaaacgcgggccggtngaaacaaggggggggctgggtcccggcaagcg

SEQ ID NO: 293853 - DNA, 958 bp, Homo sapiens
cacgcccgcccccgcgctcgctggctcccacccggggagggtcgttgtgcgcctgcgccagggtgggggttgccgtcgcgcctaggcctttccctcaggttttcctcttccccactgcggctccccagtcggcgcttgcgcggagaactcagcgctgagattgtctaaagccccaggaaaaatggtggaaaattcaccgtcgccattgccagaaagagcgatttatggctttgttcttttcttaagctcccaatttggcttcaaaaatctgaagggatctcgtgtttgctgagtgttccgtgtgccagcactagcctaggaggttttagtctctacaaatatttatacagcaccagacgcgatggcaaagtggataaagcctggtccctgcccttaaggaggtcgtggtcttgtggaggagacagatggtactttacctcgtgtgggcctttattcctgaatcttggctaaactctttaggtttaacctattggcctcaaaaatattgggcagttgcattacctgtctacctccttattgctatagtaattggctacgtgctcttgtttgggattaacatgatgagtacctctccactcgactccatccatacaatcacagataactatgcaaaaaatcaacagcagaagaaataccaagaggaggccattccagccttaagagatatttctattagtgaagtaaaccaaatgttctttcttgcagccaaagaactttacaccaaaaactgaactgtgtgtaaccatagtaacaccaagcacgtatttatttataagtttttgccattataattttgaccataaattaatttgaccatctctcttattaatagagaagtaaaaaatgtaacttgaccttctcttagattatgttcaatgaatattgtaaatgttcaagtattgttaatgaatagaataaatacaatattgcattccca

SEQ ID NO: 293854 - DNA, 783 bp, Homo sapiens
ggccgaggtgtcgggaggggcctgggtgggcgtatgaaggacccgaggtcgagggcccccccataccccgcctcgaatgagaaatagaagtctccacgaatgggcagggcccggggcctgggcgccgcgacctagtaggcccgcatgctgattgtctaaagccccaggaaaaatggtggaaaattcaccgtcgccattgccagaaagagcgatttatggctttgttcttttcttaagctcccaatttggcttcatactttacctcgtgtgggcctttattcctgaatcttggctaaactctttaggtttaacctattggcctcaaaaatattgggcagttgcattacctgtctacctccttattgctatagtaattggctacgtgctcttgtttgggattaacatgatgagtacctctccactcgactccatccatacaatcacagataactatgcaaaaaatcaacagcagaagaaataccaagaggaggccattccagccttaagagatatttctattagtgaagtaaaccaaatgttctttcttgcagccaaagaactttacaccaaaaactgaactgtgtgtaaccatagtaacaccaagcacgtatttatttataagtttttgccattataattttgaccataaattaatttgaccatctctcttattaatagagaagtaaaaaatgtaacttgaccttctcttagattatgttcaatgaatattgtaaatgttcaagtattgttaatgaatagaataaatacaatattgcattccca

SEQ ID NO: 293855 - DNA, 864 bp, Homo sapiens
  misc_feature (770)..(770): n is a, c, g, or t
  misc_feature (793)..(793): n is a, c, g, or t
  misc_feature (832)..(832): n is a, c, g, or t
cacgcccgcccccgcgctcgctggctcccacccggggagggtcgttgtgcgcctgcgccagggtgggggttgccgtcgcgcctaggcctttccctcaggttttcctcttccccactgcggctccccagtcggcgcttgcgcggagaactcagcgctgagattgtctaaagccccaggaaaaatggtggaaaattcaccgtcgccattgccagaaagagcgatttatggctttgttcttttcttaagctcccaatttggcttcatactttacctcgtgtgggcctttattcctgaatcttggctaaactctttaggtttaacctattggcctcaaaaatattgggcagttgcattacctgtctacctccttattgctatagtaattggctacgtgctcttgtttgggattaacatgatgagtacctctccactcgactccatccatacaatcacagataactatgcaaaaaatcaacagcagaagaaataccaagaggaggccattccagccttaagagatatttctattagtgaagtaaaccaaatgttctttcttgcagccaaagaactttacaccaaaaactgaactgtgtgtaaccatagtaacaccaagcacgtatttatttataagtttttgccattataattttgaccataaattaatttgaccatctctcttattaatagagaagtaaaaaatgtaaaaaaaaaaaaaaaaaaaaatttgtgggggcggccggaaaaatttaaaaccttggtgggggggcccnaggataggaagggcaaggtccangaaccggcggaagggggttcccaaaaacgcgggccggtngaaacaaggggggggctgggtcccggcaagcg

SEQ ID NO: 293856 - DNA, 1092 bp, Homo sapiens
ggccgaggtgtcgggaggggcctgggtgggcgtatgaaggacccgaggtcgagggcccccccataccccgcctcgaatgagaaatagaagtctccacgaatgggcagggcccggggcctgggcgccgcgacctagtaggcccgcatgctggtgggcgccgcgcgagccttgttccctgccctcccctcccacagggaggccacgcttgcagagctggagcgcgcgtctatcgccccagaacccccctccctgccctatcctccgccaccccttctgttgcggggcgcgcgccagcctgggtgtctgtatgcgctcgaggcgggggcgcgggttgcggacggaggcgcgggaggcggttctgcgcggcgggggccgtacccgcggcggagcgaggaggcgagaatggatcaatggtgccacggagcacatcgctgacgctgattgtgttccttttccacaattgtctaaagccccaggaaaaatggtggaaaattcaccgtcgccattgccagaaagagcgatttatggctttgttcttttcttaagctcccaatttggcttcatactttacctcgtgtgggcctttattcctgaatcttggctaaactctttaggtttaacctattggcctcaaaaatattgggcagttgcattacctgtctacctccttattgctatagtaattggctacgtgctcttgtttgggattaacatgatgagtacctctccactcgactccatccatacaatcacagataactatgcaaaaaatcaacagcagaagaaataccaagaggaggccattccagccttaagagatatttctattagtgaagtaaaccaaatgttctttcttgcagccaaagaactttacaccaaaaactgaactgtgtgtaaccatagtaacaccaagcacgtatttatttataagtttttgccattataattttgaccataaattaatttgaccatctctcttattaatagagaagtaaaaaatgtaacttgaccttctcttagattatgttcaatgaatattgtaaatgttcaagtattgttaatgaatagaataaatacaatattgcattccca

SEQ ID NO: 293857 - DNA, 706 bp, Homo sapiens
gagagagagatagagagagactgtgacacactgagagtgcgcaagcgacgcttgcgcggagaactcagcgctgattgtctaaagccccaggaaaaatggtggaaaattcaccgtcgccattgccagaaagagcgatttatggctttgttcttttcttaagctcccaatttggcttcatactttacctcgtgtgggcctttattcctgaatcttggctaaactctttaggtttaacctattggcctcaaaaatattgggcagttgcattacctgtctacctccttattgctatagtaattggctacgtgctcttgtttgggattaacatgatgagtacctctccactcgactccatccatacaatcacagataactatgcaaaaaatcaacagcagaagaaataccaagaggaggccattccagccttaagagatatttctattagtgaagtaaaccaaatgttctttcttgcagccaaagaactttacaccaaaaactgaactgtgtgtaaccatagtaacaccaagcacgtatttatttataagtttttgccattataattttgaccataaattaatttgaccatctctcttattaatagagaagtaaaaaatgtaacttgaccttctcttagattatgttcaatgaatattgtaaatgttcaagtattgttaatgaatagaataaatacaatattgcattccca

SEQ ID NO: 293858 - DNA, 1258 bp, Homo sapiens
ggccgaggtgtcgggaggggcctgggtgggcgtatgaaggacccgaggtcgagggcccccccataccccgcctcgaatgagaaatagaagtctccacgaatgggcagggcccggggcctgggcgccgcgacctagtaggcccgcatgctggtgggcgccgcgcgagccttgttccctgccctcccctcccacagggaggccacgcttgcagagctggagcgcgcgtctatcgccccagaacccccctccctgccctatcctccgccaccccttctgttgcggggcgcgcgccagcctgggtgtctgtatgcgctcgaggcgggggcgcgggttgcggacggaggcgcgggaggcggttctgcgcggcgggggccgtacccgcggcggagcgaggaggcgagaatggatcaatggtgccacggagcacatcgctgacgctgattgtgttccttttccacaattgtctaaagccccaggaaaaatggtggaaaattcaccgtcgccattgccagaaagagcgatttatggctttgttcttttcttaagctcccaatttggcttcaaaaatctgaagggatctcgtgtttgctgagtgttccgtgtgccagcactagcctaggaggttttagtctctacaaatatttatacagcaccagacgcgatggcaaagtggataaagcctggtccctgcccttaaggaggtcgtggtcttgtggaggagacagatggtactttacctcgtgtgggcctttattcctgaatcttggctaaactctttaggtttaacctattggcctcaaaaatattgggcagttgcattacctgtctacctccttattgctatagtaattggctacgtgctcttgtttgggattaacatgatgagtacctctccactcgactccatccatacaatcacagataactatgcaaaaaatcaacagcagaagaaataccaagaggaggccattccagccttaagagatatttctattagtgaagtaaaccaaatgttctttcttgcagccaaagaactttacaccaaaaactgaactgtgtgtaaccatagtaacaccaagcacgtatttatttataagtttttgccattataattttgaccataaattaatttgaccatctctcttattaatagagaagtaaaaaatgtaacttgaccttctcttagattatgttcaatgaatattgtaaatgttcaagtattgttaatgaatagaataaatacaatattgcattccca

SEQ ID NO: 293859 - DNA, 741 bp, Homo sapiens
cacgcccgcccccgcgctcgctggctcccacccggggagggtcgttgtgcgcctgcgccagggtgggggttgccgtcgcgcctaggcctttccctcaggttttcctcttccccactgcggctccccagtcggcgcttgcgcggagaactcagcgctgagattgtctaaagccccaggaaaaatggtggaaaattcaccgtcgccattgccagaaagagcgatttatggctttgttcttttcttaagctcccaatttggcttcatactttacctcgtgtgggcctttattcctgaatcttggctaaactctttaggtttaacctattggcctcaaaactacgtgctcttgtttgggattaacatgatgagtacctctccactcgactccatccatacaatcacagataactatgcaaaaaatcaacagcagaagaaataccaagaggaggccattccagccttaagagatatttctattagtgaagtaaaccaaatgttctttcttgcagccaaagaactttacaccaaaaactgaactgtgtgtaaccatagtaacaccaagcacgtatttatttataagtttttgccattataattttgaccataaattaatttgaccatctctcttattaatagagaagtaaaaaatgtaacttgaccttctcttagattatgttcaatgaatattgtaaatgttcaagtattgttaatgaatagaataaatacaatattgcattccca

SEQ ID NO: 293860 - DNA, 390 bp, Homo sapiens
acacatattactttataaaatttaaatttaaaaaacatgttggctttgtgaccgactcttgagaattacaacttttttaaagtgtctattatgtactttaatattctctttggcagatattgggcagttgcattacctgtctacctccttattgctatagtaattggctacgtgctcttgtttgggattaacatgatgagtacctctccactcgactccatccatacaatcacaggtaactttatataaaaggaaagtgctggggcaatgaaagagtggagtattagcacttttacccagaaaagcaacaaagaacaggctgcaaaacccatgttggtggtgcgcgtctgtaatcccagctacttgggaggctgaggcaggagaatcact

SEQ ID NO: 293861 - DNA, 445 bp, Homo sapiens
ttatttatagaatatgttgaggaattgaaaacaaagatctagacttaaaatccaattagctccctcccgtaaaaaaatccctcccgtaaaaaaaggctatatcttaatttagagtaattgagaaatgatgcaggtcttaaagagtacaacttaaaaaaaaatcagttccgataaggtatatttctatagcatcttaacagtaacatgtttgtaaacatatttccccagagttctcattaggtagcaagaaaagcgatcacctaccaaccactgcacacttgtatgtcatcagagaagccaaagcttttacttcatctacactcacatcagtgctataacggatacctggtggtgttttttaaaaaatgtgttggggtgggtgagaaagaaggggttatatttagaacaaatttcaataagtttcaaaaaagaaagctacaaattg

SEQ ID NO: 293862 - DNA, 490 bp, Homo sapiens
gtcgactctagaggatcccatatatccggcctatcgcaagtactcaaacagatgccctgaaactgccaccttcccaacctccaaggcttttgaagaacaaagctttattatgcaaacccatcacacagactaaagccacctcttgcaaaccacatacccaaaacaaagaatgccagacaggtatgttccttggtctttctttctttattaattttttaagggaaagaaatgtaggatctacttacattgagtacctgctatttcctaggtgatgtgtttggttgtttgtatacattgcccaatttagttctcacagcatccccgtgagttaggtattttccgcatctgaggcttaacaagttgggtcaaagagaaggaagttaatcagtgataccatactgtgagcaagtcatttaattctcttattaatgacaatgtaatattatagaataagcataaggtttggaattacatggacaggcttctaagg

SEQ ID NO: 293863 - DNA, 6247 bp, Homo sapiens
gcagtgtgggcgggggccggggggccgagaggtaccgccgccaccgcgcggggagccgcagcggttccgagcggggcccaacatggcggagagagaggtggagtccggcccccgaaagaggtttgaacaaaaaagtggtgcagtttttgatgaaattgtagagaactgagtatagtcatggccaacagcaaaaaactcaagagggggaactgaaaattagtgctgtgttttcagtcagtggcagccctcttgctccacagttgactactggctttcagccctcactggcgtcatctggcatgaataaaatgcttccttcagttccagccacagctgttcgagtttcctgttctggttgtaaaaaaatcctccagaaggggcaaactgcttatcagaggaaagggtctactcagctattctgctccacactgtgcctcactggatatacagttccacctgcccgcccaccgcctcctctcaccaagaaaacttgttcaagttgctcaaaagacattttaaatccaaaggatgtgatcagtgcccagtttgaaaacaccaccactagtaaagatttttgcagtcagtcatgtttgtcaacatatgaactgaaaaaaaaacctattgttaccataaatacaaatagtatttcaaccaaatgcagcatgtgtcagaagaatgctgttattcgacatgaagttaattaccagaatgtggtccataaactttgcagtgatgcctgcttctctaagtttcgttctgctaacaacctcaccatgaactgttgtgagaactgtgggggttactgttacagtgggtcgggacaatgccacatgcttcagatagagggacagtctaagaagttttgtagttcatcgtgtatcacggcatacaagcagaaatcagccaaaattacaccgtgtgcgctttgcaaatcattgagatcctcagcagaaatgattgaaaataccaatagcttggggaagacagagcttttctgttctgttaattgcttatctgcttacagagttaaaatggttacttctgcaggtgtacaagttcagtgtaacagttgtaaaacctcagcaattcctcagtatcacctagccatgtcagatggaagtatacgcaacttctgcagctacagctgtgtggtagctttccagaatttattcaacaaaccaactggaatgaattcttcagtagtgcccttgtctcagggccaagtaattgtaagcatccccacaggttccacagtgtcagccggaggaggtagcacatctgctgtttctcccacctccatcagtagctctgctgcagctggtctccagcgtctcgctgcccagtcccagcatgttgggtttgcacgaagtgttgtgaaactcaaatgtcaacactgtaaccgtctttttgccacaaaaccagaacttcttgactataagggcaaaatgtttcagttctgtggcaagaattgttctgatgaatataagaaaataaataatgtaatggcaatgtgtgaatattgtaaaattgagaaaattgtaaaggagactgttcggttctcaggtgctgacaagtcattctgtagtgaaggttgcaaattgctttataaacatgacttggcaaaacgctggggaaatcactgtaaaatgtgcagttattgtttacagacatctcccaaattggtacagaataatttaggagggaaagtggaagagttctgttgtgaagaatgcatgtccaaatatacagttttgttctatcagatggccaaatgtgatgcttgtaagcgacagggtaaactcagtgagtccttgaaatggcgaggggaaatgaaacatttctgtaacctgctttgtatcttgatgttctgtaatcagcaaagtgtatgtgacccgccttcacaaaataatgcagcaaatatttccatggttcaagctgcttcagcaggacccccatctctgagaaaagattcgactccagttatagccaatgtagtatcattggcaagtgcccctgctgctcagcctacagtgaattctaacagtgtcttacaaggtgcagttccaacagtaacagcgaaaatcatcggtgatgcaagtactcaaacagatgccctgaaactgccaccttcccaacctccaaggcttttgaagaacaaagctttattatgcaaacccatcacacagactaaagccacctcttgcaaaccacatacccaaaacaaagaatgccagacagaagacactccaagtcagccccagattattgtggtgccagttcccgtaccagtgtttgttcccatacctcttcacctttatactcaatatgctccagtcccatttggaattccagttccaatgcctgtccctatgcttattccatcttcaatggatagtgaagataaagtcacagagagtattgaagacattaaagaaaagcttcccacacatccatttgaagctgatctccttgagatggcagaaatgattgcagaagatgaagagaagaagactctatctcagggagagtcccaaacttctgaacacgaactctttctagacaccaagatatttgaaaaagaccaaggaagtacatacagtggtgatcttgaatcagaggcagtatctactccacatagctgggaggaagagctgaatcactatgccttaaagtcaaatgctgtgcaagaggctgattcagaattgaagcagttctcaaaaggggaaactgaacaggacctggaagcagattttccatcagactcctttgacccacttaataaaggacagggaatccaggcacgttcccgaacaagacgacgacacagagatggcttcccccaacccagacgaagaggacggaagaagtctatagtggctgtggagcccaggagtcttattcaaggagcctttcaaggctgctcagtgtccgggatgacactgaaatacatgtatggggtaaatgcttggaagaactgggttcagtggaaaaatgccaaggaagagcagggggatctaaaatgtggaggggttgaacaggcctcatctagcccacgttctgaccccttaggaagtactcaagaccatgcactctctcaagaatcctcagagccaggctgtagagtccgctctatcaagctgaaggaagacattctgtcctgcacttttgctgagttgagtttgggcttatgccagtttatccaagaggtgcggagaccaaatggtgaaaaatatgatccagacagtatcttatacttgtgccttggaattcaacagtacctgtttgaaaatggtagaatagataacatttttactgagccctattccagatttatgattgaacttaccaaactcttgaaaatatgggaacctacaatacttcctaatggttacatgttctctcgcattgaggaagagcatttgtgggagtgcaaacagctgggcgcttactcaccaatcgtccttttaaacaccctccttttcttcaataccaaatacttccaactaaagaatgttactgagcacttgaagctttcctttgcccatgtgatgagacggaccaggactctgaagtacagtaccaagatgacatatctgaggttcttcccacctttacagaagcaggagtcagaaccagataaactgactgttggcaagaggaaacgaaatgaagatgatgaggttccagtgggggtggagatggcagagaatactgacaatccactaagatgcccagtccgactttatgagttttacctgtcaaaatgttctgaaagtgtgaagcaaaggaatgatgtgttttaccttcaacctgagcgctcctgtgtcccgaatagccccatgtggtactccacattcccgatagaccctggaaccctggacaccatgttaacacgtattctcatggtgagggaggtacatgaagaacttgccaaagccaaatctgaagactctgatgttgaattatcagattaaaacggaagtgaggttcttattttcatacatattggtatgcaccaaactgtgaatgcatccagctgttggaaaatgatgtataagtctaagtcctcttgacttgaccataagatcatggaaaacagatgacttgtgaaccccacagtgtggatgtgcaaatgaaaattgaaggaaagaatatgaactgagaaatgttctttggcagtgatatagttcttagacatcttcagaatgactaatttctccgagtggtgcataatcttattttgtttgggagtaacaaatcgtggaatatttttaaggaaaactgttgtataaaactttaccatagtaaccttagaccttagagaggtagctttggagtgaaactttggctgcaataggctactttggcaagccctccgtaaaagtcagaggagagatcagtacagagctaagagtgacatcaaatgaggactgtgggacccagatttgaagacccaataaaaatactcaactttttaaaaaagatagtgaagtggtcttgattgattttgattttcactgccaagccaatcatgtgaaggacagaagcttttgccatgggcccctcacatcagggaaaatgaccttcactgctgttaacagtaatgtgtccctttcattttctggatcaagccttctcagcggtgggtctggatgtgggtaaactaaggtaaaggggatgatattccacaaactaattatgcacacagaaaatctgtggagcctatcagaccccaagtgtcttgaaatgtttgtagaaacccactaaaatgccccttctctgggtgtgggcccttattgcagctgtctcacagcctgagctgtggtacagagaaatgggggttctccttttattttcattttttttccccaatggcagcttttctcccgttgttttaccttcctatttcccaaacagttcctcttattttgtcttttgcaccagtttctggaggcccttgtcatttcaaaaaggatagtctcttttcttactctggcaaacctgtgagtgattccacaaagatacagtattacttagctatctgaattatgatagaaaaggtcctagttaggttcctatataaagcatttggaagatgaccttgttgcccttgaaacttgaaaatagggattctggggtgaggatacaaagacattgtcttgcatatccataagcaggtcttagagcattattccaaactctagctgtttcagtagttctatgaggattgcaagtcataggtgtgtgtggcatatcagtccatctccctcatctccattctcagtttcttccccacaaaatttggaatcaaagcttttatgacgtttgccaattgcagaacttcttcagctaaggttaatttgacgctatgataaaactgagagatgtcaaaaagcctcttagaaattttaatcttgaaagacttttcagggtatctcattttttaggtgggggtggcaggtgtatttcttttttaacaaataaaaggcatttaagtaaaactaaaatgaaaaaagtaggccttctgacattgtgtacttggtggttctgtccctctgcctgtaacaaatctcatttttgttaccaagaactgtatgaaagaagtaaatccaccccgattctgtatgattaattccatctgtgtttgtcatttctgactggaaaacttcttactccataccttgttcgatatggaggacaaataattggattgtctgataagtctgccaataaactatccagaaatagcaagtgtaatagtccccactatacgaattttatggtttgtataaacactaacattttccccttctgtagttgtatgaaaaaacaaatattgttagcatagtagataaattgttatgaaataccagaaaaaaaaatctgtatcttttactgagaacacccaatacccagataaatgactgtatcaggatttcatttgcatgttagtccacagagttgcccagaaccctaaatttattcataagagaaaatattgattaattattggtcattcctcataagtgtagctgttgatgtgtgcgtctgattattgcttttttaattttatgaaaattgtgtaaaattacattttttttccaggggagaaaaaaacatcaaacaaaaacatctaaatcatcctttttgttctttttcagtttttaaccacttttaggttttccccttacagaaaccacagaaatattcccttagaataaaatagtatatttgtatttgaaaaaga

SEQ ID NO: 293864 - DNA, 7002 bp, Homo sapiens
gcagtgtgggcgggggccggggggccgagaggtaccgccgccaccgcgcggggagccgcagcggttccgagcggggcccaacatggcggagagagaggtggagtccggcccccgaaagaggtttgaacaaaaaagtggtgcagtttttgatgaaattgtagagaactgtggtggtatcatggatacagaaatgtctgaagatatagaccacaacttaactcctacccttgacagcatgtcttatggaatgccgaatcaaacaggatctgaaaattcattgctggatgaagatgattattttttgaactctggggatcttgcaggaattccagtcgttggtagtgacaatgaggatgaacaggattttagttcaaaggacaatcttgtttcttcaattcatactgatgatagcttggaagtagagagaagagtcacacagcatgaatcagacaatgaaaatgaaatacaaattcaaaataagttaaaaaaagactttcctaaacaatttgatcaggtttctgtctttaaatcaatacggaaagattttagtctagtaagagaaaacagcaaagagacattttctggaaaggagaaaaatagagacctaacttatgaacgtgaaaaacggttggataaaccccataaagatttggattcaaggttgaaaagcagtttttttgataaagcagctaatcaagttgaagaaacattacatacccatttaccacaaaccccagaaacaaactttagggattccagctacccatttgccaataaagaatccattggttcggaactggggaattcctttgcatcaaatattagaattaaagaagaacctttggatgatgagtatgacaaagcaatggcaccacagcagggactactagacaaaataaaagatgaacctgacaatgctcaagagtatagtcatggccaacagcaaaaaactcaagagggggaactgaaaattagtgctgtgttttcagtcagtggcagccctcttgctccacagttgactactggctttcagccctcactggcgtcatctggcatgaataaaatgcttccttcagttccagccacagctgttcgagtttcctgttctggttgtaaaaaaatcctccagaaggggcaaactgcttatcagaggaaagggtctactcagctattctgctccacactgtgcctcactggatatacagttccacctgcccgcccaccgcctcctctcaccaagaaaacttgttcaagttgctcaaaagacattttaaatccaaaggatgtgatcagtgcccagtttgaaaacaccaccactagtaaagatttttgcagtcagtcatgtttgtcaacatatgaactgaaaaaaaaacctattgttaccataaatacaaatagtatttcaaccaaatgcagcatgtgtcagaagaatgctgttattcgacatgaagttaattaccagaatgtggtccataaactttgcagtgatgcctgcttctctaagtttcgttctgctaacaacctcaccatgaactgttgtgagaactgtgggggttactgttacagtgggtcgggacaatgccacatgcttcagatagagggacagtctaagaagttttgtagttcatcgtgtatcacggcatacaagcagaaatcagccaaaattacaccgtgtgcgctttgcaaatcattgagatcctcagcagaaatgattgaaaataccaatagcttggggaagacagagcttttctgttctgttaattgcttatctgcttacagagttaaaatggttacttctgcaggtgtacaagttcagtgtaacagttgtaaaacctcagcaattcctcagtatcacctagccatgtcagatggaagtatacgcaacttctgcagctacagctgtgtggtagctttccagaatttattcaacaaaccaactggaatgaattcttcagtagtgcccttgtctcagggccaagtaattgtaagcatccccacaggttccacagtgtcagccggaggaggtagcacatctgctgtttctcccacctccatcagtagctctgctgcagctggtctccagcgtctcgctgcccagtcccagcatgttgggtttgcacgaagtgttgtgaaactcaaatgtcaacactgtaaccgtctttttgccacaaaaccagaacttcttgactataagggcaaaatgtttcagttctgtggcaagaattgttctgatgaatataagaaaataaataatgtaatggcaatgtgtgaatattgtaaaattgagaaaattgtaaaggagactgttcggttctcaggtgctgacaagtcattctgtagtgaaggttgcaaattgctttataaacatgacttggcaaaacgctggggaaatcactgtaaaatgtgcagttattgtttacagacatctcccaaattggtacagaataatttaggagggaaagtggaagagttctgttgtgaagaatgcatgtccaaatatacagttttgttctatcagatggccaaatgtgatgcttgtaagcgacagggtaaactcagtgagtccttgaaatggcgaggggaaatgaaacatttctgtaacctgctttgtatcttgatgttctgtaatcagcaaagtgtatgtgacccgccttcacaaaataatgcagcaaatatttccatggttcaagctgcttcagcaggacccccatctctgagaaaagattcgactccagttatagccaatgtagtatcattggcaagtgcccctgctgctcagcctacagtgaattctaacagtgtcttacaaggtgcagttccaacagtaacagcgaaaatcatcggtgatgcaagtactcaaacagatgccctgaaactgccaccttcccaacctccaaggcttttgaagaacaaagctttattatgcaaacccatcacacagactaaagccacctcttgcaaaccacatacccaaaacaaagaatgccagacagaagacactccaagtcagccccagattattgtggtgccagttcccgtaccagtgtttgttcccatacctcttcacctttatactcaatatgctccagtcccatttggaattccagttccaatgcctgtccctatgcttattccatcttcaatggatagtgaagataaagtcacagagagtattgaagacattaaagaaaagcttcccacacatccatttgaagctgatctccttgagatggcagaaatgattgcagaagatgaagagaagaagactctatctcagggagagtcccaaacttctgaacacgaactctttctagacaccaagatatttgaaaaagaccaaggaagtacatacagtggtgatcttgaatcagaggcagtatctactccacatagctgggaggaagagctgaatcactatgccttaaagtcaaatgctgtgcaagaggctgattcagaattgaagcagttctcaaaaggggaaactgaacaggacctggaagcagattttccatcagactcctttgacccacttaataaaggacagggaatccaggcacgttcccgaacaagacgacgacacagagatggcttcccccaacccagacgaagaggacggaagaagtctatagtggctgtggagcccaggagtcttattcaaggagcctttcaaggctgctcagtgtccgggatgacactgaaatacatgtatggggtaaatgcttggaagaactgggttcagtggaaaaatgccaaggaagagcagggggatctaaaatgtggaggggttgaacaggcctcatctagcccacgttctgaccccttaggaagtactcaagaccatgcactctctcaagaatcctcagagccaggctgtagagtccgctctatcaagctgaaggaagacattctgtcctgcacttttgctgagttgagtttgggcttatgccagtttatccaagaggtgcggagaccaaatggtgaaaaatatgatccagacagtatcttatacttgtgccttggaattcaacagtacctgtttgaaaatggtagaatagataacatttttactgagccctattccagatttatgattgaacttaccaaactcttgaaaatatgggaacctacaatacttcctaatggttacatgttctctcgcattgaggaagagcatttgtgggagtgcaaacagctgggcgcttactcaccaatcgtccttttaaacaccctccttttcttcaataccaaatacttccaactaaagaatgttactgagcacttgaagctttcctttgcccatgtgatgagacggaccaggactctgaagtacagtaccaagatgacatatctgaggttcttcccacctttacagaagcaggagtcagaaccagataaactgactgttggcaagaggaaacgaaatgaagatgatgaggttccagtgggggtggagatggcagagaatactgacaatccactaagatgcccagtccgactttatgagttttacctgtcaaaatgttctgaaagtgtgaagcaaaggaatgatgtgttttaccttcaacctgagcgctcctgtgtcccgaatagccccatgtggtactccacattcccgatagaccctggaaccctggacaccatgttaacacgtattctcatggtgagggaggtacatgaagaacttgccaaagccaaatctgaagactctgatgttgaattatcagattaaaacggaagtgaggttcttattttcatacatattggtatgcaccaaactgtgaatgcatccagctgttggaaaatgatgtataagtctaagtcctcttgacttgaccataagatcatggaaaacagatgacttgtgaaccccacagtgtggatgtgcaaatgaaaattgaaggaaagaatatgaactgagaaatgttctttggcagtgatatagttcttagacatcttcagaatgactaatttctccgagtggtgcataatcttattttgtttgggagtaacaaatcgtggaatatttttaaggaaaactgttgtataaaactttaccatagtaaccttagaccttagagaggtagctttggagtgaaactttggctgcaataggctactttggcaagccctccgtaaaagtcagaggagagatcagtacagagctaagagtgacatcaaatgaggactgtgggacccagatttgaagacccaataaaaatactcaactttttaaaaaagatagtgaagtggtcttgattgattttgattttcactgccaagccaatcatgtgaaggacagaagcttttgccatgggcccctcacatcagggaaaatgaccttcactgctgttaacagtaatgtgtccctttcattttctggatcaagccttctcagcggtgggtctggatgtgggtaaactaaggtaaaggggatgatattccacaaactaattatgcacacagaaaatctgtggagcctatcagaccccaagtgtcttgaaatgtttgtagaaacccactaaaatgccccttctctgggtgtgggcccttattgcagctgtctcacagcctgagctgtggtacagagaaatgggggttctccttttattttcattttttttccccaatggcagcttttctcccgttgttttaccttcctatttcccaaacagttcctcttattttgtcttttgcaccagtttctggaggcccttgtcatttcaaaaaggatagtctcttttcttactctggcaaacctgtgagtgattccacaaagatacagtattacttagctatctgaattatgatagaaaaggtcctagttaggttcctatataaagcatttggaagatgaccttgttgcccttgaaacttgaaaatagggattctggggtgaggatacaaagacattgtcttgcatatccataagcaggtcttagagcattattccaaactctagctgtttcagtagttctatgaggattgcaagtcataggtgtgtgtggcatatcagtccatctccctcatctccattctcagtttcttccccacaaaatttggaatcaaagcttttatgacgtttgccaattgcagaacttcttcagctaaggttaatttgacgctatgataaaactgagagatgtcaaaaagcctcttagaaattttaatcttgaaagacttttcagggtatctcattttttaggtgggggtggcaggtgtatttcttttttaacaaataaaaggcatttaagtaaaactaaaatgaaaaaagtaggccttctgacattgtgtacttggtggttctgtccctctgcctgtaacaaatctcatttttgttaccaagaactgtatgaaagaagtaaatccaccccgattctgtatgattaattccatctgtgtttgtcatttctgactggaaaacttcttactccataccttgttcgatatggaggacaaataattggattgtctgataagtctgccaataaactatccagaaatagcaagtgtaatagtccccactatacgaattttatggtttgtataaacactaacattttccccttctgtagttgtatgaaaaaacaaatattgttagcatagtagataaattgttatgaaataccagaaaaaaaaatctgtatcttttactgagaacacccaatacccagataaatgactgtatcaggatttcatttgcatgttagtccacagagttgcccagaaccctaaatttattcataagagaaaatattgattaattattggtcattcctcataagtgtagctgttgatgtgtgcgtctgattattgcttttttaattttatgaaaattgtgtaaaattacattttttttccaggggagaaaaaaacatcaaacaaaaacatctaaatcatcctttttgttctttttcagtttttaaccacttttaggttttccccttacagaaaccacagaaatattcccttagaataaaatagtatatttgtatttgaaaaaga

SEQ ID NO: 293865 - DNA, 7083 bp, Homo sapiens
gcagtgtgggcgggggccggggggccgagaggtaccgccgccaccgcgcggggagccgcagcggttccgagcggggcccaacatggcggagagagaggtggagtccggcccccgaaagaggtttgaacaaaaaagtggtgcagtttttgatgaaattgtagagaactgtggtggtatcatggatacagaaatgtctgaagatatagaccacaacttaactcctacccttgacagcatgtcttatggaatgccgaatcaaacaggatctgaaaattcattgctggatgaagatgattattttttgaactctggggatcttgcaggaattccagtcgttggtagtgacaatgaggatgaacaggattttagttcaaaggacaatcttgtttcttcaattcatactgatgatagcttggaagtagagagaagagtcacacagcatgaatcagacaatgaaaatgaaatacaaattcaaaataagttaaaaaaagactttcctaaacaatttgatcaggtttctgtctttaaatcaatacggaaagattttagtctagtaagagaaaacagcaaagagacattttctggaaaggagaaaaatagagacctaacttatgaacgtgaaaaacggttggataaaccccataaagatttggattcaaggttgaaaagcagtttttttgataaagcagctaatcaagttgaagaaacattacatacccatttaccacaaaccccagaaacaaactttagggattccagctacccatttgccaataaagaatccattggttcggaactggggaattcctttgcatcaaatattagaattaaagaagaacctttggatgatgagtatgacaaagcaatggcaccacagcagggactactagacaaaataaaagatgaacctgacaatgctcaagagtatagtcatggccaacagcaaaaaactcaagagggggaactgaaaattagtgctgtgttttcagtcagtggcagccctcttgctccacagttgactactggctttcagccctcactggcgtcatctggcatgaataaaatgcttccttcagttccagccacagctgttcgagtttcctgttctggttgtaaaaaaatcctccagaaggggcaaactgcttatcagaggaaagggtctactcagctattctgctccacactgtgcctcactggatatacagttccacctgcccgcccaccgcctcctctcaccaagaaaacttgttcaagttgctcaaaagacattttaaatccaaaggatgtgatcagtgcccagtttgaaaacaccaccactagtaaagatttttgcagtcagtcatgtttgtcaacatatgaactgaaaaaaaaacctattgttaccataaatacaaatagtatttcaaccaaatgcagcatgtgtcagaagaatgctgttattcgacatgaagttaattaccagaatgtggtccataaactttgcagtgatgcctgcttctctaagtttcgttctgctaacaacctcaccatgaactgttgtgagaactgtgggggttactgttacagtgggtcgggacaatgccacatgcttcagatagagggacagtctaagaagttttgtagttcatcgtgtatcacggcatacaagcagaaatcagccaaaattacaccgtgtgcgctttgcaaatcattgagatcctcagcagaaatgattgaaaataccaatagcttggggaagacagagcttttctgttctgttaattgcttatctgcttacagagttaaaatggttacttctgcaggtgtacaagttcagtgtaacagttgtaaaacctcagcaattcctcagtatcacctagccatgtcagatggaagtatacgcaacttctgcagctacagctgtgtggtagctttccagaatttattcaacaaaccaactggaatgaattcttcagtagtgcccttgtctcagggccaagtaattgtaagcatccccacaggttccacagtgtcagccggaggaggtagcacatctgctgtttctcccacctccatcagtagctctgctgcagctggtctccagcgtctcgctgcccagtcccagcatgttgggtttgcacgaagtgttgtgaaactcaaatgtcaacactgtaaccgtctttttgccacaaaaccagaacttcttgactataagggcaaaatgtttcagttctgtggcaagaattgttctgatgaatataagaaaataaataatgtaatggcaatgtgtgaatattgtaaaattgagaaaattgtaaaggagactgttcggttctcaggtgctgacaagtcattctgtagtgaaggttgcaaattgctttataaacatgacttggcaaaacgctggggaaatcactgtaaaatgtgcagttattgtttacagacatctcccaaattggtacagaataatttaggagggaaagtggaagagttctgttgtgaagaatgcatgtccaaatatacagttttgttctatcagatggccaaatgtgatgcttgtaagcgacagggtaaactcagtgagtccttgaaatggcgaggggaaatgaaacatttctgtaacctgctttgtatcttgatgttctgtaatcagcaaagtgtatgtgacccgccttcacaaaataatgcagcaaatatttccatggttcaagctgcttcagcaggacccccatctctgagaaaagattcgactccagttatagccaatgtagtatcattggcaagtgcccctgctgctcagcctacagtgaattctaacagtgtcttacaaggtgcagttccaacagtaacagcgaaaatcatcggtgatgcaagtactcaaacagatgccctgaaactgccaccttcccaacctccaaggcttttgaagaacaaagctttattatgcaaacccatcacacagactaaagccacctcttgcaaaccacatacccaaaacaaagaatgccagacagaagacactccaagtcagccccagattattgtggtgccagttcccgtaccagtgtttgttcccatacctcttcacctttatactcaatatgctccagtcccatttggaattccagttccaatgcctgtccctatgcttattccatcttcaatggatagtgaagataaagtcacagagagtattgaagacattaaagaaaagcttcccacacatccatttgaagctgatctccttgagatggcagaaatgattgcagaagatgaagagaagaagactctatctcagggagagtcccaaacttctgaacacgaactctttctagacaccaagatatttgaaaaagaccaaggaagtacatacagtggtgatcttgaatcagaggcagtatctactccacatagctgggaggaagagctgaatcactatgccttaaagtcaaatgctgtgcaagaggctgattcagaattgaagcagttctcaaaaggggaaactgaacaggacctggaagcagattttccatcagactcctttgacccacttaataaaggacagggaatccaggcacgttcccgaacaagacgacgacacagagatggcttcccccaacccagacgaagacttaataaaggacagggaatccaggcacgttcccgaacaagacgacgacacagagatggcttcccccaacccagacgaagaggacggaagaagtctatagtggctgtggagcccaggagtcttattcaaggagcctttcaaggctgctcagtgtccgggatgacactgaaatacatgtatggggtaaatgcttggaagaactgggttcagtggaaaaatgccaaggaagagcagggggatctaaaatgtggaggggttgaacaggcctcatctagcccacgttctgaccccttaggaagtactcaagaccatgcactctctcaagaatcctcagagccaggctgtagagtccgctctatcaagctgaaggaagacattctgtcctgcacttttgctgagttgagtttgggcttatgccagtttatccaagaggtgcggagaccaaatggtgaaaaatatgatccagacagtatcttatacttgtgccttggaattcaacagtacctgtttgaaaatggtagaatagataacatttttactgagccctattccagatttatgattgaacttaccaaactcttgaaaatatgggaacctacaatacttcctaatggttacatgttctctcgcattgaggaagagcatttgtgggagtgcaaacagctgggcgcttactcaccaatcgtccttttaaacaccctccttttcttcaataccaaatacttccaactaaagaatgttactgagcacttgaagctttcctttgcccatgtgatgagacggaccaggactctgaagtacagtaccaagatgacatatctgaggttcttcccacctttacagaagcaggagtcagaaccagataaactgactgttggcaagaggaaacgaaatgaagatgatgaggttccagtgggggtggagatggcagagaatactgacaatccactaagatgcccagtccgactttatgagttttacctgtcaaaatgttctgaaagtgtgaagcaaaggaatgatgtgttttaccttcaacctgagcgctcctgtgtcccgaatagccccatgtggtactccacattcccgatagaccctggaaccctggacaccatgttaacacgtattctcatggtgagggaggtacatgaagaacttgccaaagccaaatctgaagactctgatgttgaattatcagattaaaacggaagtgaggttcttattttcatacatattggtatgcaccaaactgtgaatgcatccagctgttggaaaatgatgtataagtctaagtcctcttgacttgaccataagatcatggaaaacagatgacttgtgaaccccacagtgtggatgtgcaaatgaaaattgaaggaaagaatatgaactgagaaatgttctttggcagtgatatagttcttagacatcttcagaatgactaatttctccgagtggtgcataatcttattttgtttgggagtaacaaatcgtggaatatttttaaggaaaactgttgtataaaactttaccatagtaaccttagaccttagagaggtagctttggagtgaaactttggctgcaataggctactttggcaagccctccgtaaaagtcagaggagagatcagtacagagctaagagtgacatcaaatgaggactgtgggacccagatttgaagacccaataaaaatactcaactttttaaaaaagatagtgaagtggtcttgattgattttgattttcactgccaagccaatcatgtgaaggacagaagcttttgccatgggcccctcacatcagggaaaatgaccttcactgctgttaacagtaatgtgtccctttcattttctggatcaagccttctcagcggtgggtctggatgtgggtaaactaaggtaaaggggatgatattccacaaactaattatgcacacagaaaatctgtggagcctatcagaccccaagtgtcttgaaatgtttgtagaaacccactaaaatgccccttctctgggtgtgggcccttattgcagctgtctcacagcctgagctgtggtacagagaaatgggggttctccttttattttcattttttttccccaatggcagcttttctcccgttgttttaccttcctatttcccaaacagttcctcttattttgtcttttgcaccagtttctggaggcccttgtcatttcaaaaaggatagtctcttttcttactctggcaaacctgtgagtgattccacaaagatacagtattacttagctatctgaattatgatagaaaaggtcctagttaggttcctatataaagcatttggaagatgaccttgttgcccttgaaacttgaaaatagggattctggggtgaggatacaaagacattgtcttgcatatccataagcaggtcttagagcattattccaaactctagctgtttcagtagttctatgaggattgcaagtcataggtgtgtgtggcatatcagtccatctccctcatctccattctcagtttcttccccacaaaatttggaatcaaagcttttatgacgtttgccaattgcagaacttcttcagctaaggttaatttgacgctatgataaaactgagagatgtcaaaaagcctcttagaaattttaatcttgaaagacttttcagggtatctcattttttaggtgggggtggcaggtgtatttcttttttaacaaataaaaggcatttaagtaaaactaaaatgaaaaaagtaggccttctgacattgtgtacttggtggttctgtccctctgcctgtaacaaatctcatttttgttaccaagaactgtatgaaagaagtaaatccaccccgattctgtatgattaattccatctgtgtttgtcatttctgactggaaaacttcttactccataccttgttcgatatggaggacaaataattggattgtctgataagtctgccaataaactatccagaaatagcaagtgtaatagtccccactatacgaattttatggtttgtataaacactaacattttccccttctgtagttgtatgaaaaaacaaatattgttagcatagtagataaattgttatgaaataccagaaaaaaaaatctgtatcttttactgagaacacccaatacccagataaatgactgtatcaggatttcatttgcatgttagtccacagagttgcccagaaccctaaatttattcataagagaaaatattgattaattattggtcattcctcataagtgtagctgttgatgtgtgcgtctgattattgcttttttaattttatgaaaattgtgtaaaattacattttttttccaggggagaaaaaaacatcaaacaaaaacatctaaatcatcctttttgttctttttcagtttttaaccacttttaggttttccccttacagaaaccacagaaatattcccttagaataaaatagtatatttgtatttgaaaaaga

SEQ ID NO: 293866 - DNA, 7064 bp, Homo sapiens
gcagtgtgggcgggggccggggggccgagaggtaccgccgccaccgcgcggggagccgcagcggttccgagcggggcccaacatggcggagagagaggtggagtccggcccccgaaagagggaacatcgtgatcaattagccactgccaaagatccctgctggccaaaacattctgattaccgtttgaacaaaaaagtggtgcagtttttgatgaaattgtagagaactgtggtggtatcatggatacagaaatgtctgaagatatagaccacaacttaactcctacccttgacagcatgtcttatggaatgccgaatcaaacaggatctgaaaattcattgctggatgaagatgattattttttgaactctggggatcttgcaggaattccagtcgttggtagtgacaatgaggatgaacaggattttagttcaaaggacaatcttgtttcttcaattcatactgatgatagcttggaagtagagagaagagtcacacagcatgaatcagacaatgaaaatgaaatacaaattcaaaataagttaaaaaaagactttcctaaacaatttgatcaggtttctgtctttaaatcaatacggaaagattttagtctagtaagagaaaacagcaaagagacattttctggaaaggagaaaaatagagacctaacttatgaacgtgaaaaacggttggataaaccccataaagatttggattcaaggttgaaaagcagtttttttgataaagcagctaatcaagttgaagaaacattacatacccatttaccacaaaccccagaaacaaactttagggattccagctacccatttgccaataaagaatccattggttcggaactggggaattcctttgcatcaaatattagaattaaagaagaacctttggatgatgagtatgacaaagcaatggcaccacagcagggactactagacaaaataaaagatgaacctgacaatgctcaagagtatagtcatggccaacagcaaaaaactcaagagggggaactgaaaattagtgctgtgttttcagtcagtggcagccctcttgctccacagttgactactggctttcagccctcactggcgtcatctggcatgaataaaatgcttccttcagttccagccacagctgttcgagtttcctgttctggttgtaaaaaaatcctccagaaggggcaaactgcttatcagaggaaagggtctactcagctattctgctccacactgtgcctcactggatatacagttccacctgcccgcccaccgcctcctctcaccaagaaaacttgttcaagttgctcaaaagacattttaaatccaaaggatgtgatcagtgcccagtttgaaaacaccaccactagtaaagatttttgcagtcagtcatgtttgtcaacatatgaactgaaaaaaaaacctattgttaccataaatacaaatagtatttcaaccaaatgcagcatgtgtcagaagaatgctgttattcgacatgaagttaattaccagaatgtggtccataaactttgcagtgatgcctgcttctctaagtttcgttctgctaacaacctcaccatgaactgttgtgagaactgtgggggttactgttacagtgggtcgggacaatgccacatgcttcagatagagggacagtctaagaagttttgtagttcatcgtgtatcacggcatacaagcagaaatcagccaaaattacaccgtgtgcgctttgcaaatcattgagatcctcagcagaaatgattgaaaataccaatagcttggggaagacagagcttttctgttctgttaattgcttatctgcttacagagttaaaatggttacttctgcaggtgtacaagttcagtgtaacagttgtaaaacctcagcaattcctcagtatcacctagccatgtcagatggaagtatacgcaacttctgcagctacagctgtgtggtagctttccagaatttattcaacaaaccaactggaatgaattcttcagtagtgcccttgtctcagggccaagtaattgtaagcatccccacaggttccacagtgtcagccggaggaggtagcacatctgctgtttctcccacctccatcagtagctctgctgcagctggtctccagcgtctcgctgcccagtcccagcatgttgggtttgcacgaagtgttgtgaaactcaaatgtcaacactgtaaccgtctttttgccacaaaaccagaacttcttgactataagggcaaaatgtttcagttctgtggcaagaattgttctgatgaatataagaaaataaataatgtaatggcaatgtgtgaatattgtaaaattgagaaaattgtaaaggagactgttcggttctcaggtgctgacaagtcattctgtagtgaaggttgcaaattgctttataaacatgacttggcaaaacgctggggaaatcactgtaaaatgtgcagttattgtttacagacatctcccaaattggtacagaataatttaggagggaaagtggaagagttctgttgtgaagaatgcatgtccaaatatacagttttgttctatcagatggccaaatgtgatgcttgtaagcgacagggtaaactcagtgagtccttgaaatggcgaggggaaatgaaacatttctgtaacctgctttgtatcttgatgttctgtaatcagcaaagtgtatgtgacccgccttcacaaaataatgcagcaaatatttccatggttcaagctgcttcagcaggacccccatctctgagaaaagattcgactccagttatagccaatgtagtatcattggcaagtgcccctgctgctcagcctacagtgaattctaacagtgtcttacaaggtgcagttccaacagtaacagcgaaaatcatcggtgatgcaagtactcaaacagatgccctgaaactgccaccttcccaacctccaaggcttttgaagaacaaagctttattatgcaaacccatcacacagactaaagccacctcttgcaaaccacatacccaaaacaaagaatgccagacagaagacactccaagtcagccccagattattgtggtgccagttcccgtaccagtgtttgttcccatacctcttcacctttatactcaatatgctccagtcccatttggaattccagttccaatgcctgtccctatgcttattccatcttcaatggatagtgaagataaagtcacagagagtattgaagacattaaagaaaagcttcccacacatccatttgaagctgatctccttgagatggcagaaatgattgcagaagatgaagagaagaagactctatctcagggagagtcccaaacttctgaacacgaactctttctagacaccaagatatttgaaaaagaccaaggaagtacatacagtggtgatcttgaatcagaggcagtatctactccacatagctgggaggaagagctgaatcactatgccttaaagtcaaatgctgtgcaagaggctgattcagaattgaagcagttctcaaaaggggaaactgaacaggacctggaagcagattttccatcagactcctttgacccacttaataaaggacagggaatccaggcacgttcccgaacaagacgacgacacagagatggcttcccccaacccagacgaagaggacggaagaagtctatagtggctgtggagcccaggagtcttattcaaggagcctttcaaggctgctcagtgtccgggatgacactgaaatacatgtatggggtaaatgcttggaagaactgggttcagtggaaaaatgccaaggaagagcagggggatctaaaatgtggaggggttgaacaggcctcatctagcccacgttctgaccccttaggaagtactcaagaccatgcactctctcaagaatcctcagagccaggctgtagagtccgctctatcaagctgaaggaagacattctgtcctgcacttttgctgagttgagtttgggcttatgccagtttatccaagaggtgcggagaccaaatggtgaaaaatatgatccagacagtatcttatacttgtgccttggaattcaacagtacctgtttgaaaatggtagaatagataacatttttactgagccctattccagatttatgattgaacttaccaaactcttgaaaatatgggaacctacaatacttcctaatggttacatgttctctcgcattgaggaagagcatttgtgggagtgcaaacagctgggcgcttactcaccaatcgtccttttaaacaccctccttttcttcaataccaaatacttccaactaaagaatgttactgagcacttgaagctttcctttgcccatgtgatgagacggaccaggactctgaagtacagtaccaagatgacatatctgaggttcttcccacctttacagaagcaggagtcagaaccagataaactgactgttggcaagaggaaacgaaatgaagatgatgaggttccagtgggggtggagatggcagagaatactgacaatccactaagatgcccagtccgactttatgagttttacctgtcaaaatgttctgaaagtgtgaagcaaaggaatgatgtgttttaccttcaacctgagcgctcctgtgtcccgaatagccccatgtggtactccacattcccgatagaccctggaaccctggacaccatgttaacacgtattctcatggtgagggaggtacatgaagaacttgccaaagccaaatctgaagactctgatgttgaattatcagattaaaacggaagtgaggttcttattttcatacatattggtatgcaccaaactgtgaatgcatccagctgttggaaaatgatgtataagtctaagtcctcttgacttgaccataagatcatggaaaacagatgacttgtgaaccccacagtgtggatgtgcaaatgaaaattgaaggaaagaatatgaactgagaaatgttctttggcagtgatatagttcttagacatcttcagaatgactaatttctccgagtggtgcataatcttattttgtttgggagtaacaaatcgtggaatatttttaaggaaaactgttgtataaaactttaccatagtaaccttagaccttagagaggtagctttggagtgaaactttggctgcaataggctactttggcaagccctccgtaaaagtcagaggagagatcagtacagagctaagagtgacatcaaatgaggactgtgggacccagatttgaagacccaataaaaatactcaactttttaaaaaagatagtgaagtggtcttgattgattttgattttcactgccaagccaatcatgtgaaggacagaagcttttgccatgggcccctcacatcagggaaaatgaccttcactgctgttaacagtaatgtgtccctttcattttctggatcaagccttctcagcggtgggtctggatgtgggtaaactaaggtaaaggggatgatattccacaaactaattatgcacacagaaaatctgtggagcctatcagaccccaagtgtcttgaaatgtttgtagaaacccactaaaatgccccttctctgggtgtgggcccttattgcagctgtctcacagcctgagctgtggtacagagaaatgggggttctccttttattttcattttttttccccaatggcagcttttctcccgttgttttaccttcctatttcccaaacagttcctcttattttgtcttttgcaccagtttctggaggcccttgtcatttcaaaaaggatagtctcttttcttactctggcaaacctgtgagtgattccacaaagatacagtattacttagctatctgaattatgatagaaaaggtcctagttaggttcctatataaagcatttggaagatgaccttgttgcccttgaaacttgaaaatagggattctggggtgaggatacaaagacattgtcttgcatatccataagcaggtcttagagcattattccaaactctagctgtttcagtagttctatgaggattgcaagtcataggtgtgtgtggcatatcagtccatctccctcatctccattctcagtttcttccccacaaaatttggaatcaaagcttttatgacgtttgccaattgcagaacttcttcagctaaggttaatttgacgctatgataaaactgagagatgtcaaaaagcctcttagaaattttaatcttgaaagacttttcagggtatctcattttttaggtgggggtggcaggtgtatttcttttttaacaaataaaaggcatttaagtaaaactaaaatgaaaaaagtaggccttctgacattgtgtacttggtggttctgtccctctgcctgtaacaaatctcatttttgttaccaagaactgtatgaaagaagtaaatccaccccgattctgtatgattaattccatctgtgtttgtcatttctgactggaaaacttcttactccataccttgttcgatatggaggacaaataattggattgtctgataagtctgccaataaactatccagaaatagcaagtgtaatagtccccactatacgaattttatggtttgtataaacactaacattttccccttctgtagttgtatgaaaaaacaaatattgttagcatagtagataaattgttatgaaataccagaaaaaaaaatctgtatcttttactgagaacacccaatacccagataaatgactgtatcaggatttcatttgcatgttagtccacagagttgcccagaaccctaaatttattcataagagaaaatattgattaattattggtcattcctcataagtgtagctgttgatgtgtgcgtctgattattgcttttttaattttatgaaaattgtgtaaaattacattttttttccaggggagaaaaaaacatcaaacaaaaacatctaaatcatcctttttgttctttttcagtttttaaccacttttaggttttccccttacagaaaccacagaaatattcccttagaataaaatagtatatttgtatttgaaaaaga

SEQ ID NO: 293867 - DNA, 7074 bp, Homo sapiens
gcagtgtgggcgggggccggggggccgagaggtaccgccgccaccgcgcggggagccgcagcggttccgagcggggcccaacatggcggagagagaggtggagtccggcccccgaaagaggtttgaacaaaaaagtggtgcagtttttgatgaaattgtagagaactgtggtggtatcatggatacagaaatgtctgaagatatagaccacaacttaactcctacccttgacagcatgtcttatggaatgccgaatcaaacaggatctgaaaattcattgctggatgaagatgattattttttgaactctggggatcttgcaggaattccagtcgttggtagtgacaatgaggatgaacaggattttagttcaaaggacaatcttgtttcttcaattcatactgatgatagcttggaagtagagagaagagtcacacagcatgaatcagacaatgaaaatgaaatacaaattcaaaataagttaaaaaaagactttcctaaacaatttgatcaggtttctgtctttaaatcaatacggaaagattttagtctagtaagagaaaacagcaaagagacattttctggaaaggagaaaaatagagacctaacttatgaacgtgaaaaacggttggataaaccccataaagatttggattcaaggttgaaaagcagtttttttgataaagcagctaatcaagttgaagaaacattacatacccatttaccacaaaccccagaaacaaactttagggattccagctacccatttgccaataaagaatccattggttcggaactggggaattcctttgcatcaaatattagaattaaagaagaacctttggatgatgagtatgacaaagcaatggcaccacagcagggactactagacaaaataaaagatgaacctgacaatgctcaagagtatagtcatggccaacagcaaaaaactcaagagggggaactgaaaattagtgctgtgttttcagtcagtggcagccctcttgctccacagttgactactggctttcagccctcactggcgtcatctggcatgaataaaatgcttccttcagttccagccacagctgttcgagtttcctgttctggttgtaaaaaaatcctccagaaggggcaaactgcttatcagaggaaagggtctactcagctattctgctccacactgtgcctcactggatatacagttccacctgcccgcccaccgcctcctctcaccaagaaaacttgttcaagttgctcaaaagacattttaaatccaaaggatgtgatcagtgcccagtttgaaaacaccaccactagtaaagatttttgcagtcagtcatgtttgtcaacatatgaactgaaaaaaaaacctattgttaccataaatacaaatagtatttcaaccaaatgcagcatgtgtcagaagaatgctgttattcgacatgaagttaattaccagaatgtggtccataaactttgcagtgatgcctgcttctctaagtttcgttctgctaacaacctcaccatgaactgttgtgagaactgtgggggttactgttacagtgggtcgggacaatgccacatgcttcagatagagggacagtctaagaagttttgtagttcatcgtgtatcacggcatacaagcagaaatcagccaaaattacaccgtgtgcgctttgcaaatcattgagatcctcagcagaaatgattgaaaataccaatagcttggggaagacagagcttttctgttctgttaattgcttatctgcttacagagttaaaatggttacttctgcaggtgtacaagttcagtgtaacagttgtaaaacctcagcaattcctcagtatcacctagccatgtcagatggaagtatacgcaacttctgcagctacagctgtgtggtagctttccagaatttattcaacaaaccaactggaatgaattcttcagtagtgcccttgtctcagggccaagtaattgtaagcatccccacaggttccacagtgtcagccggaggaggtagcacatctgctgtttctcccacctccatcagtagctctgctgcagctggtctccagcgtctcgctgcccagtcccagcatgttgggtttgcacgaagtgttgtgaaactcaaatgtcaacactgtaaccgtctttttgccacaaaaccagaacttcttgactataagggcaaaatgtttcagttctgtggcaagaattgttctgatgaatataagaaaataaataatgtaatggcaatgtgtgaatattgtaaaattgagaaaattgtaaaggagactgttcggttctcaggtgctgacaagtcattctgtagtgaaggttgcaaattgctttataaacatgacttggcaaaacgctggggaaatcactgtaaaatgtgcagttattgtttacagacatctcccaaattggtacagaataatttaggagggaaagtggaagagttctgttgtgaagaatgcatgtccaaatatacagttttgttctatcagatggccaaatgtgatgcttgtaagcgacagggtaaactcagtgagtccttgaaatggcgaggggaaatgaaacatttctgtaacctgctttgtatcttgatgttctgtaatcagcaaagtgtatgtgacccgccttcacaaaataatgcagcaaatatttccatggttcaagctgcttcagcaggacccccatctctgagaaaagattcgactccagttatagccaatgtagtatcattggcaagtgcccctgctgctcagcctacagtgaattctaacagtgtcttacaaggtgcagttccaacagtaacagcgaaaatcatcggtgatgcaagtactcaaacagatgccctgaaactgccaccttcccaacctccaaggcttttgaagaacaaagctttattatgcaaacccatcacacagactaaagccacctcttgcaaaccacatacccaaaacaaagaatgccagacagaagacactccaagtcagccccagattattgtggtgccagttcccgtaccagtgtttgttcccatacctcttcacctttatactcaatatgctccagtcccatttggaattccagttccagtactgagtccttaaaggaaacagttatgagaaaattgtgagaaatacaagcaaaaacaacaaaaacaaaatatgcctgtccctatgcttattccatcttcaatggatagtgaagataaagtcacagagagtattgaagacattaaagaaaagcttcccacacatccatttgaagctgatctccttgagatggcagaaatgattgcagaagatgaagagaagaagactctatctcagggagagtcccaaacttctgaacacgaactctttctagacaccaagatatttgaaaaagaccaaggaagtacatacagtggtgatcttgaatcagaggcagtatctactccacatagctgggaggaagagctgaatcactatgccttaaagtcaaatgctgtgcaagaggctgattcagaattgaagcagttctcaaaaggggaaactgaacaggacctggaagcagattttccatcagactcctttgacccacttaataaaggacagggaatccaggcacgttcccgaacaagacgacgacacagagatggcttcccccaacccagacgaagaggacggaagaagtctatagtggctgtggagcccaggagtcttattcaaggagcctttcaaggctgctcagtgtccgggatgacactgaaatacatgtatggggtaaatgcttggaagaactgggttcagtggaaaaatgccaaggaagagcagggggatctaaaatgtggaggggttgaacaggcctcatctagcccacgttctgaccccttaggaagtactcaagaccatgcactctctcaagaatcctcagagccaggctgtagagtccgctctatcaagctgaaggaagacattctgtcctgcacttttgctgagttgagtttgggcttatgccagtttatccaagaggtgcggagaccaaatggtgaaaaatatgatccagacagtatcttatacttgtgccttggaattcaacagtacctgtttgaaaatggtagaatagataacatttttactgagccctattccagatttatgattgaacttaccaaactcttgaaaatatgggaacctacaatacttcctaatggttacatgttctctcgcattgaggaagagcatttgtgggagtgcaaacagctgggcgcttactcaccaatcgtccttttaaacaccctccttttcttcaataccaaatacttccaactaaagaatgttactgagcacttgaagctttcctttgcccatgtgatgagacggaccaggactctgaagtacagtaccaagatgacatatctgaggttcttcccacctttacagaagcaggagtcagaaccagataaactgactgttggcaagaggaaacgaaatgaagatgatgaggttccagtgggggtggagatggcagagaatactgacaatccactaagatgcccagtccgactttatgagttttacctgtcaaaatgttctgaaagtgtgaagcaaaggaatgatgtgttttaccttcaacctgagcgctcctgtgtcccgaatagccccatgtggtactccacattcccgatagaccctggaaccctggacaccatgttaacacgtattctcatggtgagggaggtacatgaagaacttgccaaagccaaatctgaagactctgatgttgaattatcagattaaaacggaagtgaggttcttattttcatacatattggtatgcaccaaactgtgaatgcatccagctgttggaaaatgatgtataagtctaagtcctcttgacttgaccataagatcatggaaaacagatgacttgtgaaccccacagtgtggatgtgcaaatgaaaattgaaggaaagaatatgaactgagaaatgttctttggcagtgatatagttcttagacatcttcagaatgactaatttctccgagtggtgcataatcttattttgtttgggagtaacaaatcgtggaatatttttaaggaaaactgttgtataaaactttaccatagtaaccttagaccttagagaggtagctttggagtgaaactttggctgcaataggctactttggcaagccctccgtaaaagtcagaggagagatcagtacagagctaagagtgacatcaaatgaggactgtgggacccagatttgaagacccaataaaaatactcaactttttaaaaaagatagtgaagtggtcttgattgattttgattttcactgccaagccaatcatgtgaaggacagaagcttttgccatgggcccctcacatcagggaaaatgaccttcactgctgttaacagtaatgtgtccctttcattttctggatcaagccttctcagcggtgggtctggatgtgggtaaactaaggtaaaggggatgatattccacaaactaattatgcacacagaaaatctgtggagcctatcagaccccaagtgtcttgaaatgtttgtagaaacccactaaaatgccccttctctgggtgtgggcccttattgcagctgtctcacagcctgagctgtggtacagagaaatgggggttctccttttattttcattttttttccccaatggcagcttttctcccgttgttttaccttcctatttcccaaacagttcctcttattttgtcttttgcaccagtttctggaggcccttgtcatttcaaaaaggatagtctcttttcttactctggcaaacctgtgagtgattccacaaagatacagtattacttagctatctgaattatgatagaaaaggtcctagttaggttcctatataaagcatttggaagatgaccttgttgcccttgaaacttgaaaatagggattctggggtgaggatacaaagacattgtcttgcatatccataagcaggtcttagagcattattccaaactctagctgtttcagtagttctatgaggattgcaagtcataggtgtgtgtggcatatcagtccatctccctcatctccattctcagtttcttccccacaaaatttggaatcaaagcttttatgacgtttgccaattgcagaacttcttcagctaaggttaatttgacgctatgataaaactgagagatgtcaaaaagcctcttagaaattttaatcttgaaagacttttcagggtatctcattttttaggtgggggtggcaggtgtatttcttttttaacaaataaaaggcatttaagtaaaactaaaatgaaaaaagtaggccttctgacattgtgtacttggtggttctgtccctctgcctgtaacaaatctcatttttgttaccaagaactgtatgaaagaagtaaatccaccccgattctgtatgattaattccatctgtgtttgtcatttctgactggaaaacttcttactccataccttgttcgatatggaggacaaataattggattgtctgataagtctgccaataaactatccagaaatagcaagtgtaatagtccccactatacgaattttatggtttgtataaacactaacattttccccttctgtagttgtatgaaaaaacaaatattgttagcatagtagataaattgttatgaaataccagaaaaaaaaatctgtatcttttactgagaacacccaatacccagataaatgactgtatcaggatttcatttgcatgttagtccacagagttgcccagaaccctaaatttattcataagagaaaatattgattaattattggtcattcctcataagtgtagctgttgatgtgtgcgtctgattattgcttttttaattttatgaaaattgtgtaaaattacattttttttccaggggagaaaaaaacatcaaacaaaaacatctaaatcatcctttttgttctttttcagtttttaaccacttttaggttttccccttacagaaaccacagaaatattcccttagaataaaatagtatatttgtatttgaaaaaga

SEQ ID NO: 293868 - DNA, 5939 bp, Homo sapiens
  misc_feature (91)..(91): n is a, c, g, or t
ggtgtgagtgcatggaaatattgcttaattttgtcttcaatcattggagtgaaaaaccttgtaacttgtggcctggcaataggtttatgcntgtacaggcataaactgattgcctctgttttatttagttattttagctcacagaaaggaaaaagaaatgaattataccatggcttatgttatttttttcttatttttagagacattttaaatccaaaggatgtgatcagtgcccagtttgaaaacaccaccactagtaaagatttttgcagtcagtcatgtttgtcaacatatgaactgaaaaaaaaacctattgttaccataaatacaaatagtatttcaaccaaatgcagcatgtgtcagaagaatgctgttattcgacatgaagttaattaccagaatgtggtccataaactttgcagtgatgcctgcttctctaagtttcgttctgctaacaacctcaccatgaactgttgtgagaactgtgggggttactgttacagtgggtcgggacaatgccacatgcttcagatagagggacagtctaagaagttttgtagttcatcgtgtatcacggcatacaagcagaaatcagccaaaattacaccgtgtgcgctttgcaaatcattgagatcctcagcagaaatgattgaaaataccaatagcttggggaagacagagcttttctgttctgttaattgcttatctgcttacagagttaaaatggttacttctgcaggtgtacaagttcagtgtaacagttgtaaaacctcagcaattcctcagtatcacctagccatgtcagatggaagtatacgcaacttctgcagctacagctgtgtggtagctttccagaatttattcaacaaaccaactggaatgaattcttcagtagtgcccttgtctcagggccaagtaattgtaagcatccccacaggttccacagtgtcagccggaggaggtagcacatctgctgtttctcccacctccatcagtagctctgctgcagctggtctccagcgtctcgctgcccagtcccagcatgttgggtttgcacgaagtgttgtgaaactcaaatgtcaacactgtaaccgtctttttgccacaaaaccagaacttcttgactataagggcaaaatgtttcagttctgtggcaagaattgttctgatgaatataagaaaataaataatgtaatggcaatgtgtgaatattgtaaaattgagaaaattgtaaaggagactgttcggttctcaggtgctgacaagtcattctgtagtgaaggttgcaaattgctttataaacatgacttggcaaaacgctggggaaatcactgtaaaatgtgcagttattgtttacagacatctcccaaattggtacagaataatttaggagggaaagtggaagagttctgttgtgaagaatgcatgtccaaatatacagttttgttctatcagatggccaaatgtgatgcttgtaagcgacagggtaaactcagtgagtccttgaaatggcgaggggaaatgaaacatttctgtaacctgctttgtatcttgatgttctgtaatcagcaaagtgtatgtgacccgccttcacaaaataatgcagcaaatatttccatggttcaagctgcttcagcaggacccccatctctgagaaaagattcgactccagttatagccaatgtagtatcattggcaagtgcccctgctgctcagcctacagtgaattctaacagtgtcttacaaggtgcagttccaacagtaacagcgaaaatcatcggtgatgcaagtactcaaacagatgccctgaaactgccaccttcccaacctccaaggcttttgaagaacaaagctttattatgcaaacccatcacacagactaaagccacctcttgcaaaccacatacccaaaacaaagaatgccagacagaagacactccaagtcagccccagattattgtggtgccagttcccgtaccagtgtttgttcccatacctcttcacctttatactcaatatgctccagtcccatttggaattccagttccaatgcctgtccctatgcttattccatcttcaatggatagtgaagataaagtcacagagagtattgaagacattaaagaaaagcttcccacacatccatttgaagctgatctccttgagatggcagaaatgattgcagaagatgaagagaagaagactctatctcagggagagtcccaaacttctgaacacgaactctttctagacaccaagatatttgaaaaagaccaaggaagtacatacagtggtgatcttgaatcagaggcagtatctactccacatagctgggaggaagagctgaatcactatgccttaaagtcaaatgctgtgcaagaggctgattcagaattgaagcagttctcaaaaggggaaactgaacaggacctggaagcagattttccatcagactcctttgacccacttaataaaggacagggaatccaggcacgttcccgaacaagacgacgacacagagatggcttcccccaacccagacgaagaggacggaagaagtctatagtggctgtggagcccaggagtcttattcaaggagcctttcaaggctgctcagtgtccgggatgacactgaaatacatgtatggggtaaatgcttggaagaactgggttcagtggaaaaatgccaaggaagagcagggggatctaaaatgtggaggggttgaacaggcctcatctagcccacgttctgaccccttaggaagtactcaagaccatgcactctctcaagaatcctcagagccaggctgtagagtccgctctatcaagctgaaggaagacattctgtcctgcacttttgctgagttgagtttgggcttatgccagtttatccaagaggtgcggagaccaaatggtgaaaaatatgatccagacagtatcttatacttgtgccttggaattcaacagtacctgtttgaaaatggtagaatagataacatttttactgagccctattccagatttatgattgaacttaccaaactcttgaaaatatgggaacctacaatacttcctaatggttacatgttctctcgcattgaggaagagcatttgtgggagtgcaaacagctgggcgcttactcaccaatcgtccttttaaacaccctccttttcttcaataccaaatacttccaactaaagaatgttactgagcacttgaagctttcctttgcccatgtgatgagacggaccaggactctgaagtacagtaccaagatgacatatctgaggttcttcccacctttacagaagcaggagtcagaaccagataaactgactgttggcaagaggaaacgaaatgaagatgatgaggttccagtgggggtggagatggcagagaatactgacaatccactaagatgcccagtccgactttatgagttttacctgtcaaaatgttctgaaagtgtgaagcaaaggaatgatgtgttttaccttcaacctgagcgctcctgtgtcccgaatagccccatgtggtactccacattcccgatagaccctggaaccctggacaccatgttaacacgtattctcatggtgagggaggtacatgaagaacttgccaaagccaaatctgaagactctgatgttgaattatcagattaaaacggaagtgaggttcttattttcatacatattggtatgcaccaaactgtgaatgcatccagctgttggaaaatgatgtataagtctaagtcctcttgacttgaccataagatcatggaaaacagatgacttgtgaaccccacagtgtggatgtgcaaatgaaaattgaaggaaagaatatgaactgagaaatgttctttggcagtgatatagttcttagacatcttcagaatgactaatttctccgagtggtgcataatcttattttgtttgggagtaacaaatcgtggaatatttttaaggaaaactgttgtataaaactttaccatagtaaccttagaccttagagaggtagctttggagtgaaactttggctgcaataggctactttggcaagccctccgtaaaagtcagaggagagatcagtacagagctaagagtgacatcaaatgaggactgtgggacccagatttgaagacccaataaaaatactcaactttttaaaaaagatagtgaagtggtcttgattgattttgattttcactgccaagccaatcatgtgaaggacagaagcttttgccatgggcccctcacatcagggaaaatgaccttcactgctgttaacagtaatgtgtccctttcattttctggatcaagccttctcagcggtgggtctggatgtgggtaaactaaggtaaaggggatgatattccacaaactaattatgcacacagaaaatctgtggagcctatcagaccccaagtgtcttgaaatgtttgtagaaacccactaaaatgccccttctctgggtgtgggcccttattgcagctgtctcacagcctgagctgtggtacagagaaatgggggttctccttttattttcattttttttccccaatggcagcttttctcccgttgttttaccttcctatttcccaaacagttcctcttattttgtcttttgcaccagtttctggaggcccttgtcatttcaaaaaggatagtctcttttcttactctggcaaacctgtgagtgattccacaaagatacagtattacttagctatctgaattatgatagaaaaggtcctagttaggttcctatataaagcatttggaagatgaccttgttgcccttgaaacttgaaaatagggattctggggtgaggatacaaagacattgtcttgcatatccataagcaggtcttagagcattattccaaactctagctgtttcagtagttctatgaggattgcaagtcataggtgtgtgtggcatatcagtccatctccctcatctccattctcagtttcttccccacaaaatttggaatcaaagcttttatgacgtttgccaattgcagaacttcttcagctaaggttaatttgacgctatgataaaactgagagatgtcaaaaagcctcttagaaattttaatcttgaaagacttttcagggtatctcattttttaggtgggggtggcaggtgtatttcttttttaacaaataaaaggcatttaagtaaaactaaaatgaaaaaagtaggccttctgacattgtgtacttggtggttctgtccctctgcctgtaacaaatctcatttttgttaccaagaactgtatgaaagaagtaaatccaccccgattctgtatgattaattccatctgtgtttgtcatttctgactggaaaacttcttactccataccttgttcgatatggaggacaaataattggattgtctgataagtctgccaataaactatccagaaatagcaagtgtaatagtccccactatacgaattttatggtttgtataaacactaacattttccccttctgtagttgtatgaaaaaacaaatattgttagcatagtagataaattgttatgaaataccagaaaaaaaaatctgtatcttttactgagaacacccaatacccagataaatgactgtatcaggatttcatttgcatgttagtccacagagttgcccagaaccctaaatttattcataagagaaaatattgattaattattggtcattcctcataagtgtagctgttgatgtgtgcgtctgattattgcttttttaattttatgaaaattgtgtaaaattacattttttttccaggggagaaaaaaacatcaaacaaaaacatctaaatcatcctttttgttctttttcagtttttaaccacttttaggttttccccttacagaaaccacagaaatattcccttagaataaaatagtatatttgtatttgaaaaaga

SEQ ID NO: 293869 - DNA, 5232 bp, Homo sapiens
gcagtgtgggcgggggccggggggccgagaggtaccgccgccaccgcgcggggagccgcagcggttccgagcggggcccaacatggcggagagagaggtggagtccggcccccgaaagaggtttgaacaaaaaagtggtgcagtttttgatgaaattgtagagaactgtggtggtatcatggatacagaaatgtctgaagatatagaccacaacttaactcctacccttgacagcatgtcttatggaatgccgaatcaaacaggatctgaaaattcattgctggatgaagatgattattttttgaactctggggatcttgcaggaattccagtcgttggtagtgacaatgaggatgaacaggattttagttcaaaggacaatcttgtttcttcaattcatactgatgatagcttggaagtagagagaagagtcacacagcatgaatcagacaatgaaaatgaaatacaaattcaaaataagttaaaaaaagactttcctaaacaatttgatcaggtttctgtctttaaatcaatacggaaagattttagtctagtaagagaaaacagcaaagagacattttctggaaaggagaaaaatagagacctaacttatgaacgtgaaaaacggttggataaaccccataaagatttggattcaaggttgaaaagcagtttttttgataaagcagctaatcaagttgaagaaacattacatacccatttaccacaaaccccagaaacaaactttagggattccagctacccatttgccaataaagaatccattggttcggaactggggaattcctttgcatcaaatattagaattaaagaagaacctttggatgatgagtatgacaaagcaatggcaccacagcagggactactagacaaaataaaagatgaacctgacaatgctcaagagtatagtcatggccaacagcaaaaaactcaagagggggaactgaaaattagtgctgtgttttcagtcagtggcagccctcttgctccacagttgactactggctttcagccctcactggcgtcatctggcatgaataaaatgcttccttcagttccagccacagctgttcgagtttcctgttctggttgtaaaaaaatcctccagaaggggcaaactgcttatcagaggaaagggtctactcagctattctgctccacactgtgcctcactggatatacagttccacctgcccgcccaccgcctcctctcaccaagaaaacttgttcaagttgctcaaaagacattttaaatccaaaggatgtgatcagtgcccagtttgaaaacaccaccactagtaaagatttttgcagtcagtcatgtttgtcaacatatgaactgaaaaaaaaacctattgttaccataaatacaaatagtatttcaaccaaatgcagcatgtgtcagaagaatgctgttattcgacatgaagttaattaccagaatgtggtccataaactttgcagtgatgcctgcttctctaagtttcgttctgctaacaacctcaccatgaactgttgtgagaactgtgggggttactgttacagtgggtcgggacaatgccacatgcttcagatagagggacagtctaagaagttttgtagttcatcgtgtatcacggcatacaagcagaaatcagccaaaattacaccgtgtgcgctttgcaaatcattgagatcctcagcagaaatgattgaaaataccaatagcttggggaagacagagcttttctgttctgttaattgcttatctgcttacagagttaaaatggttacttctgcaggtgtacaagttcagtgtaacagttgtaaaacctcagcaattcctcagtatcacctagccatgtcagatggaagtatacgcaacttctgcagctacagctgtgtggtagctttccagaatttattcaacaaaccaactggaatgaattcttcagtagtgcccttgtctcagggccaagtaattgtaagcatccccacaggttccacagtgtcagccggaggaggtagcacatctgctgtttctcccacctccatcagtagctctgctgcagctggtctccagcgtctcgctgcccagtcccagcatgttgggtttgcacgaagtgttgtgaaactcaaatgtcaacactgtaaccgtctttttgccacaaaaccagaacttcttgactataagggcaaaatgtttcagttctgtggcaagaattgttctgatgaatataagaaaataaataatgtaatggcaatgtgtgaatattgtaaaattgagaaaattgtaaaggagactgttcggttctcaggtgctgacaagtcattctgtagtgaaggttgcaaattgctttataaacatgacttggcaaaacgctggggaaatcactgtaaaatgtgcagttattgtttacagacatctcccaaattggtacagaataatttaggagggaaagtggaagagttctgttgtgaagaatgcatgtccaaatatacagttttgttctatcagatggccaaatgtgatgcttgtaagcgacagggtaaactcagtgagtccttgaaatggcgaggggaaatgaaacatttctgtaacctgctttgtatcttgatgttctgtaatcagcaaagtgtatgtgacccgccttcacaaaataatgcagcaaatatttccatggttcaagctgcttcagcaggacccccatctctgagaaaagattcgactccagttatagccaatgtagtatcattggcaagtgcccctgctgctcagcctacagtgaattctaacagtgtcttacaaggtgcagttccaacagtaacagcgaaaatcatcggtgatgcaagtactcaaacagatgccctgaaactgccaccttcccaacctccaaggcttttgaagaacaaagctttattatgcaaacccatcacacagactaaagccacctcttgcaaaccacatacccaaaacaaagaatgccagacagaagacactccaagtcagccccagattattgtggtgccagttcccgtaccagtgtttgttcccatacctcttcacctttatactcaatatgctccagtcccatttggaattccagttccaatgcctgtccctatgcttattccatcttcaatggatagtgaagataaagtcacagagagtattgaagacattaaagaaaagcttcccacacatccatttgaagctgatctccttgagatggcagaaatgattgcagaagatgaagagaagaagactctatctcagggagagtcccaaacttctgaacacgaactctttctagacaccaagatatttgaaaaagaccaaggaagtacatacagtggtgatcttgaatcagaggcagtatctactccacatagctgggaggaagagctgaatcactatgccttaaagtcaaatgctgtgcaagaggctgattcagaattgaagcagttctcaaaaggggaaactgaacaggacctggaagcagattttccatcagactcctttgacccacttaataaaggacagggaatccaggcacgttcccgaacaagacgacgacacagagatggcttcccccaacccagacgaagaggacggaagaagtctatagtggctgtggagcccaggagtcttattcaaggagcctttcaaggctgctcagtgtccgggatgacactgaaatacatgtatggggtaaatgcttggaagaactgggttcagtggaaaaatgccaaggaagagcagggggatctaaaatgtggaggggttgaacaggcctcatctagcccacgttctgaccccttaggaagtactcaagaccatgcactctctcaagaatcctcagagccaggctgtagagtccgctctatcaagctgaaggaagacattctgtcctgcacttttgctgagttgagtttgggcttatgccagtttatccaagaggtgcggagaccaaatggtgaaaaatatgatccagacagtatcttatacttgtgccttggaattcaacagtacctgtttgaaaatggtagaatagataacatttttactgagccctattccagatttatgattgaacttaccaaactcttgaaaatatgggaacctacaatacttcctaatggttacatgttctctcgcattgaggaagagcatttgtgggagtgcaaacagctgggcgcttactcaccaatcgtccttttaaacaccctccttttcttcaataccaaatacttccaactaaagaatgttactgagcacttgaagctttcctttgcccatgtgatgagacggaccaggactctgaagtacagtaccaagatgacatatctgaggttcttcccacctttacagaagcaggagtcagaaccagataaactgactgttggcaagaggaaacgaaatgaagatgatgaggttccagtgggggtggagatggcagagaatactgacaatccactaagatgcccagtccgactttatgagttttacctgtcaaaatgttctgaaagtgtgaagcaaaggaatgatgtgttttaccttcaacctgagcgctcctgtgtcccgaatagccccatgtggtactccacattcccgatagaccctggaaccctggacaccatgttaacacgtattctcatggtgagggaggtacatgaagaacttgccaaagccaaatctgaagactctgatgttgaattatcagattaaaacggaagtgaggttcttattttcatacatattggtatgcaccaaactgtgaatgcatccagctgttggaaaatgatgtataagtctaagtcctcttgacttgaccataagatcatggaaaacagatgacttgtgaaccccacagtgtggatgtgcaaatgaaaattgaaggaaagaatatgaactgagaaatgttctttggcagtgatatagttcttagacatcttcagaatgactaatttctccgagtggtgcataatcttattttgtttgggagtaacaaatcgtggaatatttttaaggaaaactgttgtataaaactttaccatagtaaccttagaccttagagaggtagctttggagtgaaactttggctgcaataggctactttggcaagccctccgtaaaagtcagaggagagatcagtacagagctaagagtgacatcaaatgaggactgtgggacccagatttgaagacccaataaaaatactcaacttttta

SEQ ID NO: 293870 - DNA, 6629 bp, Homo sapiens
gcagtgtgggcgggggccggggggccgagaggtaccgccgccaccgcgcggggagccgcagcggttccgagcggggcccaacatggcggagagagaggtggagtccggcccccgaaagaggtttgaacaaaaaagtggtgcagtttttgatgaaattgtagagaactgtggtggtatcatggatacagaaatgtctgaagatatagaccacaacttaactcctacccttgacagcatgtcttatggaatgccgaatcaaacaggatctgaaaattcattgctggatgaagatgattattttttgaactctggggatcttgcaggaattccagtcgttggtagtgacaatgaggatgaacaggattttagttcaaaggacaatcttgtttcttcaattcatactgatgatagcttggaagtagagagaagagtcacacagcatgaatcagacaatgaaaatgaaatacaaattcaaaataagttaaaaaaagactttcctaaacaatttgatcaggtttctgtctttaaatcaatacggaaagattttagtctagtaagagaaaacagcaaagagacattttctggaaaggagaaaaatagagacctaacttatgaacgtgaaaaacggttggataaaccccataaagatttggattcaaggttgaaaagcagtttttttgataaagcagctaatcaagttgaagaaacattacatacccatttaccacaaaccccagaaacaaactttagggattccagctacccatttgccaataaagaatccattggttcggaactggggaattcctttgcatcaaatattagaattaaagaagaacctttggatgatgagtatgacaaagcaatggcaccacagcagggactactagacaaaataaaagatgaacctgacaatgctcaagagtatagtcatggccaacagcaaaaaactcaagagggggaactgaaaattagtgctgtgttttcagtcagtggcagccctcttgctccacagttgactactggctttcagccctcactggcgtcatctggcatgaataaaatgcttccttcagttccagccacagctgttcgagtttcctgttctggttgtaaaaaaatcctccagaaggggcaaactgcttatcagaggaaagggtctactcagctattctgctccacactgtgcctcactggatatacagttccacctgcccgcccaccgcctcctctcaccaagaaaacttgttcaagttgctcaaaagacattttaaatccaaaggatgtgatcagtgcccagtttgaaaacaccaccactagtaaagatttttgcagtcagtcatgtttgtcaacatatgaactgaaaaaaaaacctattgttaccataaatacaaatagtatttcaaccaaatgcagcatgtgtcagaagaatgctgttattcgacatgaagttaattaccagaatgtggtccataaactttgcagtgatgcctgcttctctaagtttcgttctgctaacaacctcaccatgaactgttgtgagaactgtgggggttactgttacagtgggtcgggacaatgccacatgcttcagatagagggacagtctaagaagttttgtagttcatcgtgtatcacggcatacaagcagaaatcagccaaaattacaccgtgtgcgctttgcaaatcattgagatcctcagcagaaatgattgaaaataccaatagcttggggaagacagagcttttctgttctgttaattgcttatctgcttacagagttaaaatggttacttctgcaggtgtacaagttcagtgtaacagttgtaaaacctcagcaattcctcagtatcacctagccatgtcagatggaagtatacgcaacttctgcagctacagctgtgtggtagctttccagaatttattcaacaaaccaactggaatgaattcttcagtagtgcccttgtctcagggccaagtaattgtaagcatccccacaggttccacagtgtcagccggaggaggtagcacatctgctgtttctcccacctccatcagtagctctgctgcagctggtctccagcgtctcgctgcccagtcccagcatgttgggtttgcacgaagtgttgtgaaactcaaatgtcaacactgtaaccgtctttttgccacaaaaccagaacttcttgactataagggcaaaatgtttcagttctgtggcaagaattgttctgatgaatataagaaaataaataatgtaatggcaatgtgtgaatattgtaaaattgagaaaattgtaaaggagactgttcggttctcaggtgctgacaagtcattctgtagtgaaggttgcaaattgctttataaacatgacttggcaaaacgctggggaaatcactgtaaaatgtgcagttattgtttacagacatctcccaaattggtacagaataatttaggagggaaagtggaagagttctgttgtgaagaatgcatgtccaaatatacagttttgttctatcagatggccaaatgtgatgcttgtaagcgacagggtaaactcagtgagtccttgaaatggcgaggggaaatgaaacatttctgtaacctgctttgtatcttgatgttctgtaatcagcaaagtgtatgtgacccgccttcacaaaataatgcagcaaatatttccatggttcaagctgcttcagcaggacccccatctctgagaaaagattcgactccagttatagccaatgtagtatcattggcaagtgcccctgctgctcagcctacagtgaattctaacagtgtcttacaaggtgcagttccaacagtaacagcgaaaatcatcggtgatgcaagtactcaaacagatgccctgaaactgccaccttcccaacctccaaggcttttgaagaacaaagctttattatgcaaacccatcacacagactaaagccacctcttgcaaaccacatacccaaaacaaagaatgccagacagaagacactccaagtcagccccagattattgtggtgccagttcccgtaccagtgtttgttcccatacctcttcacctttatactcaatatgctccagtcccatttggaattccagttccaatgcctgtccctatgcttattccatcttcaatggatagtgaagataaagtcacagagagtattgaagacattaaagaaaagcttcccacacatccatttgaagctgatctccttgagatggcagaaatgattgcagaagatgaagagaagaagactctatctcagggagagtcccaaacttctgaacacgaactctttctagacaccaagatatttgaaaaagaccaaggaagtacatacagtggtgatcttgaatcagaggcagtatctactccacatagctgggaggaagagctgaatcactatgccttaaagtcaaatgctgtgcaagaggctgattcagaattgaagcagttctcaaaaggggaaactgaacaggacctggaagcagattttccatcagactcctttgacccacttaataaaggacagggaatccaggcacgttcccgaacaagacgacgacacagagatggcttcccccaacccagacgaagaggacggaagaagtctatagtggctgtggagcccaggagtcttattcaaggagcctttcaaggctgctcagtgtccgggatgacactgaaatacatgtatggggtaaatgcttggaagaactgggttcagtggaaaaatgccaaggaagagcagggggatctaaaatgtggaggggttgaacaggcctcatctagcccacgttctgaccccttaggaagtactcaagaccatgcactctctcaagaatcctcagagccaggctgtagagtccgctctatcaagctgaaggaagacattctgtcctgcacttttgctgagttgagtttgggcttatgccagtttatccaagaggtgcggagaccaaatggtgaaaaatatgatccagacagtatcttatacttgtgccttggaattcaacagtacctgtttgaaaatggtagaatagataacatttttactgagccctattccagatttatgattgaacttaccaaactcttgaaaatatgggaacctacaatacttcctaatggttacatgttctctcgcattgaggaagagcatttgtgggagtgcaaacagctgggcgcttactcaccaatcgtccttttaaacaccctccttttcttcaataccaaatacttccaactaaagaatgttactgagcacttgaagctttcctttgcccatgtgatgagacggaccaggactctgaagtacagtaccaagatgacatatctgaggttcttcccacctttacagaagcaggagtcagaaccagataaactgactgttggcaagaggaaacgaaatgaagatgatgaggttccagtgggggtggagatggcagagaatactgacaatccactaagatgcccagtccgactttatgagttttacctgtcaaaatgttctgaaagtgtgaagcaaaggaatgatgtgttttaccttcaacctgagcgctcctgtgtcccgaatagccccatgtggtactccacattcccgatagaccctggaaccctggacaccatgttaacacgtattctcatggtgagggaggtacatgaagaacttgccaaagccaaatctgaagactctgatgttgaattatcagattaaaacggaagtgaggttcttattttcatacatattggtatgcaccaaactgtgaatgcatccagctgttggaaaatgatgtataagtctaagtcctcttgacttgaccataagatcatggaaaacagatgacttgtgaaccccacagtgtggatgtgcaaatgaaaattgaaggaaagaatatgaactgagaaatgttctttggcagtgatatagttcttagacatcttcagaatgactaatttctccgagtggtgcataatcttattttgtttgggagtaacaaatcgtggaatatttttaaggaaaactgttgtataaaactttaccatagtaaccttagaccttagagaggtagctttggagtgaaactttggctgcaataggctactttggcaagccctccgtaaaagtcagaggagagatcagtacagagctaagagtgacatcaaatgaggactgtgggacccagatttgaagacccaataaaaatactcaactttttaaaaaagatagtgaagtggtcttgattgattttgattttcactgccaagccaatcatgtgaaggacagaagcttttgccatgggcccctcacatcagggaaaatgaccttcactgctgttaacagtaatgtgtccctttcattttctggatcaagccttctcagcggtgggtctggatgtgggtaaactaaggtaaaggggatgatattccacaaactaattatgcacacagaaaatctgtggagcctatcagaccccaagtgtcttgaaatgtttgtagaaacccactaaaatgccccttctctgggtgtgggcccttattgcagctgtctcacagcctgagctgtggtacagagaaatgggggttctccttttattttcattttttttccccaatggcagcttttctcccgttgttttaccttcctatttcccaaacagttcctcttattttgtcttttgcaccagtttctggaggcccttgtcatttcaaaaaggatagtctcttttcttactctggcaaacctgtgagtgattccacaaagatacagtattacttagctatctgaattatgatagaaaaggtcctagttaggttcctatataaagcatttggaagatgaccttgttgcccttgaaacttgaaaatagggattctggggtgaggatacaaagacattgtcttgcatatccataagcaggtcttagagcattattccaaactctagctgtttcagtagttctatgaggattgcaagtcataggtgtgtgtggcatatcagtccatctccctcatctccattctcagtttcttccccacaaaatttggaatcaaagcttttatgacgtttgccaattgcagaacttcttcagctaaggttaatttgacgctatgataaaactgagagatgtcaaaaagcctcttagaaattttaatcttgaaagacttttcagggtatctcattttttaggtgggggtggcaggtgtatttcttttttaacaaataaaaggcatttaagtaaaactaaaatgaaaaaagtaggccttctgacattgtgtacttggtggttctgtccctctgcctgtaacaaatctcatttttgttaccaagaactgtatgaaagaagtaaatccaccccgattctgtatgattaattccatctgtgtttgtcatttctgactggaaaacttcttactccataccttgttcgatatggaggacaaataattggattgtctgataagtctgccaataaactatccagaaatagcaagtgtaatagtccccactatacgaattttatggtttgtataaacactaacattttccccttctgtagttgtatgaaaaaacaaatattgttagcatagtagataaattgttatgaaataccaga

SEQ ID NO: 293871 - DNA, 3571 bp, Homo sapiens
atatggattggattaaataatctctaaagccctttcttgctctaagaactctgaatctttaggatataaaactaaattctttattctacaaatgtataccctttccagctttgagaaccctgactcttaaaaatccaaaactaaattttatgttctgtaaatttttggaattcttacagggacggaagaagtctatagtggctgtggagcccaggagtcttattcaaggagcctttcaaggctgctcagtgtccgggatgacactgaaatacatgtatggggtaaatgcttggaagaactgggttcagtggaaaaatgccaaggaagagcagggggatctaaaatgtggaggggttgaacaggcctcatctagcccacgttctgaccccttaggaagtactcaagaccatgcactctctcaagaatcctcagagccaggctgtagagtccgctctatcaagctgaaggaagacattctgtcctgcacttttgctgagttgagtttgggcttatgccagtttatccaagaggtgcggagaccaaatggtgaaaaatatgatccagacagtatcttatacttgtgccttggaattcaacagtacctgtttgaaaatggtagaatagataacatttttactgagccctattccagatttatgattgaacttaccaaactcttgaaaatatgggaacctacaatacttcctaatggttacatgttctctcgcattgaggaagagcatttgtgggagtgcaaacagctgggcgcttactcaccaatcgtccttttaaacaccctccttttcttcaataccaaatacttccaactaaagaatgttactgagcacttgaagctttcctttgcccatgtgatgagacggaccaggactctgaagtacagtaccaagatgacatatctgaggttcttcccacctttacagaagcaggagtcagaaccagataaactgactgttggcaagaggaaacgaaatgaagatgatgaggttccagtgggggtggagatggcagagaatactgacaatccactaagatgcccagtccgactttatgagttttacctgtcaaaatgttctgaaagtgtgaagcaaaggaatgatgtgttttaccttcaacctgagcgctcctgtgtcccgaatagccccatgtggtactccacattcccgatagaccctggaaccctggacaccatgttaacacgtattctcatggtgagggaggtacatgaagaacttgccaaagccaaatctgaagactctgatgttgaattatcagattaaaacggaagtgaggttcttattttcatacatattggtatgcaccaaactgtgaatgcatccagctgttggaaaatgatgtataagtctaagtcctcttgacttgaccataagatcatggaaaacagatgacttgtgaaccccacagtgtggatgtgcaaatgaaaattgaaggaaagaatatgaactgagaaatgttctttggcagtgatatagttcttagacatcttcagaatgactaatttctccgagtggtgcataatcttattttgtttgggagtaacaaatcgtggaatatttttaaggaaaactgttgtataaaactttaccatagtaaccttagaccttagagaggtagctttggagtgaaactttggctgcaataggctactttggcaagccctccgtaaaagtcagaggagagatcagtacagagctaagagtgacatcaaatgaggactgtgggacccagatttgaagacccaataaaaatactcaactttttaaaaaagatagtgaagtggtcttgattgattttgattttcactgccaagccaatcatgtgaaggacagaagcttttgccatgggcccctcacatcagggaaaatgaccttcactgctgttaacagtaatgtgtccctttcattttctggatcaagccttctcagcggtgggtctggatgtgggtaaactaaggtaaaggggatgatattccacaaactaattatgcacacagaaaatctgtggagcctatcagaccccaagtgtcttgaaatgtttgtagaaacccactaaaatgccccttctctgggtgtgggcccttattgcagctgtctcacagcctgagctgtggtacagagaaatgggggttctccttttattttcattttttttccccaatggcagcttttctcccgttgttttaccttcctatttcccaaacagttcctcttattttgtcttttgcaccagtttctggaggcccttgtcatttcaaaaaggatagtctcttttcttactctggcaaacctgtgagtgattccacaaagatacagtattacttagctatctgaattatgatagaaaaggtcctagttaggttcctatataaagcatttggaagatgaccttgttgcccttgaaacttgaaaatagggattctggggtgaggatacaaagacattgtcttgcatatccataagcaggtcttagagcattattccaaactctagctgtttcagtagttctatgaggattgcaagtcataggtgtgtgtggcatatcagtccatctccctcatctccattctcagtttcttccccacaaaatttggaatcaaagcttttatgacgtttgccaattgcagaacttcttcagctaaggttaatttgacgctatgataaaactgagagatgtcaaaaagcctcttagaaattttaatcttgaaagacttttcagggtatctcattttttaggtgggggtggcaggtgtatttcttttttaacaaataaaaggcatttaagtaaaactaaaatgaaaaaagtaggccttctgacattgtgtacttggtggttctgtccctctgcctgtaacaaatctcatttttgttaccaagaactgtatgaaagaagtaaatccaccccgattctgtatgattaattccatctgtgtttgtcatttctgactggaaaacttcttactccataccttgttcgatatggaggacaaataattggattgtctgataagtctgccaataaactatccagaaatagcaagtgtaatagtccccactatacgaattttatggtttgtataaacactaacattttccccttctgtagttgtatgaaaaaacaaatattgttagcatagtagataaattgttatgaaataccagaaaaaaaaatctgtatcttttactgagaacacccaatacccagataaatgactgtatcaggatttcatttgcatgttagtccacagagttgcccagaaccctaaatttattcataagagaaaatattgattaattattggtcattcctcataagtgtagctgttgatgtgtgcgtctgattattgcttttttaattttatgaaaattgtgtaaaattacattttttttccaggggagaaaaaaacatcaaacaaaaacatctaaatcatcctttttgttctttttcagtttttaaccacttttaggttttccccttacagaaaccacagaaatattcccttagaataaaatagtatatttgtatttgaaaaaga

SEQ ID NO: 293872 - DNA, 6502 bp, Homo sapiens
gcagtgtgggcgggggccggggggccgagaggtaccgccgccaccgcgcggggagccgcagcggttccgagcggggcccaacatggcggagagagaggtggagtccggcccccgaaagaggtttgaacaaaaaagtggtgcagtttttgatgaaattgtagagaactgtggtggtatcatggatacagaaatgtctgaagatatagaccacaacttaactcctacccttgacagcatgtcttatggaatgccgaatcaaacaggatctgaaaattcattgctggatgaagatgattattttttgaactctggggatcttgcaggaattccagtcgttggtagtgacaatgaggatgaacaggattttagttcaaaggacaatcttgtttcttcaattcatactgatgatagcttggaagtagagagaagagtcacacagcatgaatcagacaatgaaaatgaaatacaaattcaaaataagttaaaaaaagactttcctaaacaatttgatcaggtttctgtctttaaatcaatacggaaagattttagtctagtaagagaaaacagcaaagagacattttctggaaaggagaaaaatagagacctaacttatgaacgtgaaaaacggttggataaaccccataaagatttggattcaaggttgaaaagcagtttttttgataaagcagctaatcaagttgaagaaacattacatacccatttaccacaaaccccagaaacaaactttagggattccagctacccatttgccaataaagaatccattggttcggaactggggaattcctttgcatcaaatattagaattaaagaagaacctttggatgatgagtatgacaaagcaatggcaccacagcagggactactagacaaaataaaagatgaacctgacaatgctcaagagtatagtcatggccaacagcaaaaaactcaagagggggaactgaaaattagtgctgtgttttcagtcagtggcagccctcttgctccacagttgactactggctttcagccctcactggcgtcatctggcatgaataaaatgcttccttcagttccagccacagctgttcgagtttcctgttctggttgtaaaaaaatcctccagaaggggcaaactgcttatcagaggaaagggtctactcagctattctgctccacactgtgcctcactggatatacagttccacctgcccgcccaccgcctcctctcaccaagaaaacttgttcaagttgctcaaaagacattttaaatccaaaggatgtgatcagtgcccagtttgaaaacaccaccactagtaaagatttttgcagtcagtcatgtttgtcaacatatgaactgaaaaaaaaacctattgttaccataaatacaaatagtatttcaaccaaatgcagcatgtgtcagaagaatgctgttattcgacatgaagttaattaccagaatgtggtccataaactttgcagtgatgcctgcttctctaagtttcgttctgctaacaacctcaccatgaactgttgtgagaactgtgggggttactgttacagtgggtcgggacaatgccacatgcttcagatagagggacagtctaagaagttttgtagttcatcgtgtatcacggcatacaagcagaaatcagccaaaattacaccgtgtgcgctttgcaaatcattgagatcctcagcagaaatgattgaaaataccaatagcttggggaagacagagcttttctgttctgttaattgcttatctgcttacagagttaaaatggttacttctgcaggtgtacaagttcagtgtaacagttgtaaaacctcagcaattcctcagtatcacctagccatgtcagatggaagtatacgcaacttctgcagctacagctgtgtggtagctttccagaatttattcaacaaaccaactggaatgaattcttcagtagtgcccttgtctcagggccaagtaattgtaagcatccccacaggttccacagtgtcagccggaggaggtagcacatctgctgtttctcccacctccatcagtagctctgctgcagctggtctccagcgtctcgctgcccagtcccagcatgttgggtttgcacgaagtgttgtgaaactcaaatgtcaacactgtaaccgtctttttgccacaaaaccagaacttcttgactataagggcaaaatgtttcagttctgtggcaagaattgttctgatgaatataagaaaataaataatgtaatggcaatgtgtgaatattgtaaaattgagaaaattgtaaaggagactgttcggttctcaggtgctgacaagtcattctgtagtgaaggttgcaaattgctttataaacatgacttggcaaaacgctggggaaatcactgtaaaatgtgcagttattgtttacagacatctcccaaattggtacagaataatttaggagggaaagtggaagagttctgttgtgaagaatgcatgtccaaatatacagttttgttctatcagatggccaaatgtgatgcttgtaagcgacagggtaaactcagtgagtccttgaaatggcgaggggaaatgaaacatttctgtaacctgctttgtatcttgatgttctgtaatcagcaaagtgtatgtgacccgccttcacaaaataatgcagcaaatatttccatggttcaagctgcttcagcaggacccccatctctgagaaaagattcgactccagttatagccaatgtagtatcattggcaagtgcccctgctgctcagcctacagtgaattctaacagtgtcttacaaggtgcagttccaacagtaacagcgaaaatcatcggtgatgcaagtactcaaacagatgccctgaaactgccaccttcccaacctccaaggcttttgaagaacaaagctttattatgcaaacccatcacacagactaaagccacctcttgcaaaccacatacccaaaacaaagaatgccagacagaagacactccaagtcagccccagattattgtggtgccagttcccgtaccagtgtttgttcccatacctcttcacctttatactcaatatgctccagtcccatttggaattccagttccaatgcctgtccctatgcttattccatcttcaatggatagtgaagataaagtcacagagagtattgaagacattaaagaaaagcttcccacacatccatttgaagctgatctccttgagatggcagaaatgattgcagaagatgaagagaagaagactctatctcagggagagtcccaaacttctgaacacgaactctttctagacaccaagatatttgaaaaagaccaaggaagtacatacagtggtgatcttgaatcagaggcagtatctactccacatagctgggaggaagagctgaatcactatgccttaaagtcaaatgctgtgcaagaggctgattcagaattgaagcagttctcaaaaggggaaactgaacaggacctggaagcagattttccatcagactcctttgacccacttaataaaggacagggaatccaggcacgttcccgaacaagacgacgacacagagatggcttcccccaacccagacgaagaggacggaagaagtctatagtggctgtggagcccaggagtcttattcaaggagcctttcaaggctgctcagtgtccgggatgacactgaaatacatgtatggggtaaatgcttggaagaactgggttcagtggaaaaatgccaaggaagagcagggggatctaaaatgtggaggggttgaacaggcctcatctagcccacgttctgaccccttaggaagtactcaagaccatgcactctctcaagaatcctcagagccaggctgtagagtccgctctatcaagctgaaggaagacattctgtcctgcacttttgctgagttgagtttgggcttatgccagtttatccaagaggtgcggagaccaaatggtgaaaaatatgatccagacagtatcttatacttgtgccttggaattcaacagtacctgtttgaaaatggtagaatagataacatttttactgagccctattccagatttatgattgaacttaccaaactcttgaaaatatgggaacctacaatacttcctaatggttacatgttctctcgcattgaggaagagcatttgtgggagtgcaaacagctgggcgcttactcaccaatcgtccttttaaacaccctccttttcttcaataccaaatacttccaactaaagaatgttactgagcacttgaagctttcctttgcccatgtgatgagacggaccaggactctgaagtacagtaccaagatgacatatctgaggttcttcccacctttacagaagcaggagtcagaaccagataaactgactgttggcaagaggaaacgaaatgaagatgatgaggttccagtgggggtggagatggcagagaatactgacaatccactaagatgcccagtccgactttatgagttttacctgtcaaaatgttctgaaagtgtgaagcaaaggaatgatgtgttttaccttcaacctgagcgctcctgtgtcccgaatagccccatgtggtactccacattcccgatagaccctggaaccctggacaccatgttaacacgtattctcatggtgagggaggtacatgaagaacttgccaaagccaaatctgaagactctgatgttgaattatcagattaaaacggaagtgaggttcttattttcatacatattggtatgcaccaaactgtgaatgcatccagctgttggaaaatgatgtataagtctaagtcctcttgacttgaccataagatcatggaaaacagatgacttgtgaaccccacagtgtggatgtgcaaatgaaaattgaaggaaagaatatgaactgagaaatgttctttggcagtgatatagttcttagacatcttcagaatgactaatttctccgagtggtgcataatcttattttgtttgggagtaacaaatcgtggaatatttttaaggaaaactgttgtataaaactttaccatagtaaccttagaccttagagaggtagctttggagtgaaactttggctgcaataggctactttggcaagccctccgtaaaagtcagaggagagatcagtacagagctaagagtgacatcaaatgaggactgtgggacccagatttgaagacccaataaaaatactcaactttttaaaaaagatagtgaagtggtcttgattgattttgattttcactgccaagccaatcatgtgaaggacagaagcttttgccatgggcccctcacatcagggaaaatgaccttcactgctgttaacagtaatgtgtccctttcattttctggatcaagccttctcagcggtgggtctggatgtgggtaaactaaggtaaaggggatgatattccacaaactaattatgcacacagaaaatctgtggagcctatcagaccccaagtgtcttgaaatgtttgtagaaacccactaaaatgccccttctctgggtgtgggcccttattgcagctgtctcacagcctgagctgtggtacagagaaatgggggttctccttttattttcattttttttccccaatggcagcttttctcccgttgttttaccttcctatttcccaaacagttcctcttattttgtcttttgcaccagtttctggaggcccttgtcatttcaaaaaggatagtctcttttcttactctggcaaacctgtgagtgattccacaaagatacagtattacttagctatctgaattatgatagaaaaggtcctagttaggttcctatataaagcatttggaagatgaccttgttgcccttgaaacttgaaaatagggattctggggtgaggatacaaagacattgtcttgcatatccataagcaggtcttagagcattattccaaactctagctgtttcagtagttctatgaggattgcaagtcataggtgtgtgtggcatatcagtccatctccctcatctccattctcagtttcttccccacaaaatttggaatcaaagcttttatgacgtttgccaattgcagaacttcttcagctaaggttaatttgacgctatgataaaactgagagatgtcaaaaagcctcttagaaattttaatcttgaaagacttttcagggtatctcattttttaggtgggggtggcaggtgtatttcttttttaacaaataaaaggcatttaagtaaaactaaaatgaaaaaagtaggccttctgacattgtgtacttggtggttctgtccctctgcctgtaacaaatctcatttttgttaccaagaactgtatgaaagaagtaaatccaccccgattctgtatgattaattccatctgtgtttgtcatttctgactggaaaacttcttactccataccttgttcgatatggaggacaaataattggattgtctgataagtctgccaataaactatccagaaata

SEQ ID NO: 293873 - DNA, 3239 bp, Homo sapiens
atctatgtggattttgaaccacaaaacaaattaccttgtcttcataattattttatgaaaatgtcttcaaaagcaagaatcactgctattgtttgatctttacaactgttgtacaacctttatgtgatacctaatctgtagttattttgttatttgtatagaaaagaaattttgttttgctaaagctataatagaaaaacaatttttaaggaattgaaattttctaagtagtccttttcttagaggaactttatgattttagagttgtaacacttttttttctgaaagaaatgtaatagcttcatttgccctttgataatgtgtattgagtgcccttggagttcattccaggatattgggcacttccaatatgtggtgcttggccatagtgtcacatgtgagttgacttttttgttgctcttaataatgtttgaagtactaaagtttatgatttacactttgtcttatattaactttatactcacttccaatccattgtgatttcagttgattcctgggaggaaatattcctgtaaactatttatctctgtgggtaccttgctttccccattgtgagtcacagtggagaaaggttgagagccatattaggttggtgcaaaaataattgcagtttttgcccttacttttaattacttttaatggcaaaaacctcagtttacttaagaatagtacatatttcctatactctctgatttctaattttcttttttctctttttttttttcccctgtggatagttctgaaagtgtgaagcaaaggaatgatgtgttttaccttcaacctgagcgctcctgtgtcccgaatagccccatgtggtactccacattcccgatagaccctggaaccctggacaccatgttaacacgtattctcatggtgagggaggtacatgaagaacttgccaaagccaaatctgaagactctgatgttgaattatcagattaaaacggaagtgaggttcttattttcatacatattggtatgcaccaaactgtgaatgcatccagctgttggaaaatgatgtataagtctaagtcctcttgacttgaccataagatcatggaaaacagatgacttgtgaaccccacagtgtggatgtgcaaatgaaaattgaaggaaagaatatgaactgagaaatgttctttggcagtgatatagttcttagacatcttcagaatgactaatttctccgagtggtgcataatcttattttgtttgggagtaacaaatcgtggaatatttttaaggaaaactgttgtataaaactttaccatagtaaccttagaccttagagaggtagctttggagtgaaactttggctgcaataggctactttggcaagccctccgtaaaagtcagaggagagatcagtacagagctaagagtgacatcaaatgaggactgtgggacccagatttgaagacccaataaaaatactcaactttttaaaaaagatagtgaagtggtcttgattgattttgattttcactgccaagccaatcatgtgaaggacagaagcttttgccatgggcccctcacatcagggaaaatgaccttcactgctgttaacagtaatgtgtccctttcattttctggatcaagccttctcagcggtgggtctggatgtgggtaaactaaggtaaaggggatgatattccacaaactaattatgcacacagaaaatctgtggagcctatcagaccccaagtgtcttgaaatgtttgtagaaacccactaaaatgccccttctctgggtgtgggcccttattgcagctgtctcacagcctgagctgtggtacagagaaatgggggttctccttttattttcattttttttccccaatggcagcttttctcccgttgttttaccttcctatttcccaaacagttcctcttattttgtcttttgcaccagtttctggaggcccttgtcatttcaaaaaggatagtctcttttcttactctggcaaacctgtgagtgattccacaaagatacagtattacttagctatctgaattatgatagaaaaggtcctagttaggttcctatataaagcatttggaagatgaccttgttgcccttgaaacttgaaaatagggattctggggtgaggatacaaagacattgtcttgcatatccataagcaggtcttagagcattattccaaactctagctgtttcagtagttctatgaggattgcaagtcataggtgtgtgtggcatatcagtccatctccctcatctccattctcagtttcttccccacaaaatttggaatcaaagcttttatgacgtttgccaattgcagaacttcttcagctaaggttaatttgacgctatgataaaactgagagatgtcaaaaagcctcttagaaattttaatcttgaaagacttttcagggtatctcattttttaggtgggggtggcaggtgtatttcttttttaacaaataaaaggcatttaagtaaaactaaaatgaaaaaagtaggccttctgacattgtgtacttggtggttctgtccctctgcctgtaacaaatctcatttttgttaccaagaactgtatgaaagaagtaaatccaccccgattctgtatgattaattccatctgtgtttgtcatttctgactggaaaacttcttactccataccttgttcgatatggaggacaaataattggattgtctgataagtctgccaataaactatccagaaatagcaagtgtaatagtccccactatacgaattttatggtttgtataaacactaacattttccccttctgtagttgtatgaaaaaacaaatattgttagcatagtagataaattgttatgaaataccagaaaaaaaaatctgtatcttttactgagaacacccaatacccagataaatgactgtatcaggatttcatttgcatgttagtccacagagttgcccagaaccctaaatttattcataagagaaaatattgattaattattggtcattcctcataagtgtagctgttgatgtgtgcgtctgattattgcttttttaattttatgaaaattgtgtaaaattacattttttttccaggggagaaaaaaacatcaaacaaaaacatctaaatcatcctttttgttctttttcagtttttaaccacttttaggttttccccttacagaaaccacagaaatattcccttagaataaaatagtatatttgtatttgaaaaaga

SEQ ID NO: 293874 - DNA, 2702 bp, Homo sapiens
acccggtagcagccaatatggaatcccacgtgattgtttgcattcattttgactaaaaacccaaggtagggagaagcctagagactttgcttctgtgtgatacattatatatcttcagcataagtgtactgatgagtgaagaatagaaaaatgggatgattattaaatgaatggttattctaattttcttttttctctttttttttttcccctgtggatagttctgaaagtgtgaagcaaaggaatgatgtgttttaccttcaacctgagcgctcctgtgtcccgaatagccccatgtggtactccacattcccgatagaccctggaaccctggacaccatgttaacacgtattctcatggtgagggaggtacatgaagaacttgccaaagccaaatctgaagactctgatgttgaattatcagattaaaacggaagtgaggttcttattttcatacatattggtatgcaccaaactgtgaatgcatccagctgttggaaaatgatgtataagtctaagtcctcttgacttgaccataagatcatggaaaacagatgacttgtgaaccccacagtgtggatgtgcaaatgaaaattgaaggaaagaatatgaactgagaaatgttctttggcagtgatatagttcttagacatcttcagaatgactaatttctccgagtggtgcataatcttattttgtttgggagtaacaaatcgtggaatatttttaaggaaaactgttgtataaaactttaccatagtaaccttagaccttagagaggtagctttggagtgaaactttggctgcaataggctactttggcaagccctccgtaaaagtcagaggagagatcagtacagagctaagagtgacatcaaatgaggactgtgggacccagatttgaagacccaataaaaatactcaactttttaaaaaagatagtgaagtggtcttgattgattttgattttcactgccaagccaatcatgtgaaggacagaagcttttgccatgggcccctcacatcagggaaaatgaccttcactgctgttaacagtaatgtgtccctttcattttctggatcaagccttctcagcggtgggtctggatgtgggtaaactaaggtaaaggggatgatattccacaaactaattatgcacacagaaaatctgtggagcctatcagaccccaagtgtcttgaaatgtttgtagaaacccactaaaatgccccttctctgggtgtgggcccttattgcagctgtctcacagcctgagctgtggtacagagaaatgggggttctccttttattttcattttttttccccaatggcagcttttctcccgttgttttaccttcctatttcccaaacagttcctcttattttgtcttttgcaccagtttctggaggcccttgtcatttcaaaaaggatagtctcttttcttactctggcaaacctgtgagtgattccacaaagatacagtattacttagctatctgaattatgatagaaaaggtcctagttaggttcctatataaagcatttggaagatgaccttgttgcccttgaaacttgaaaatagggattctggggtgaggatacaaagacattgtcttgcatatccataagcaggtcttagagcattattccaaactctagctgtttcagtagttctatgaggattgcaagtcataggtgtgtgtggcatatcagtccatctccctcatctccattctcagtttcttccccacaaaatttggaatcaaagcttttatgacgtttgccaattgcagaacttcttcagctaaggttaatttgacgctatgataaaactgagagatgtcaaaaagcctcttagaaattttaatcttgaaagacttttcagggtatctcattttttaggtgggggtggcaggtgtatttcttttttaacaaataaaaggcatttaagtaaaactaaaatgaaaaaagtaggccttctgacattgtgtacttggtggttctgtccctctgcctgtaacaaatctcatttttgttaccaagaactgtatgaaagaagtaaatccaccccgattctgtatgattaattccatctgtgtttgtcatttctgactggaaaacttcttactccataccttgttcgatatggaggacaaataattggattgtctgataagtctgccaataaactatccagaaatagcaagtgtaatagtccccactatacgaattttatggtttgtataaacactaacattttccccttctgtagttgtatgaaaaaacaaatattgttagcatagtagataaattgttatgaaataccagaaaaaaaaatctgtatcttttactgagaacacccaatacccagataaatgactgtatcaggatttcatttgcatgttagtccacagagttgcccagaaccctaaatttattcataagagaaaatattgattaattattggtcattcctcataagtgtagctgttgatgtgtgcgtctgattattgcttttttaattttatgaaaattgtgtaaaattacattttttttccaggggagaaaaaaacatcaaacaaaaacatctaaatcatcctttttgttctttttcagtttttaaccacttttaggttttccccttacagaaaccacagaaatattcccttagaataaaatagtatatttgtatttgaaaaaga

SEQ ID NO: 293875 - DNA, 2679 bp, Homo sapiens
tttaaacttcctgttgctctgtgtagtcccagtgatggctgaaggcattgaattttacattctagattggtctcaggggtccacagctaggtaagttataccttttcccacacatagtagtgcttttatggaattaattactcaaagctgatttttctaattttcttttttctctttttttttttcccctgtggatagttctgaaagtgtgaagcaaaggaatgatgtgttttaccttcaacctgagcgctcctgtgtcccgaatagccccatgtggtactccacattcccgatagaccctggaaccctggacaccatgttaacacgtattctcatggtgagggaggtacatgaagaacttgccaaagccaaatctgaagactctgatgttgaattatcagattaaaacggaagtgaggttcttattttcatacatattggtatgcaccaaactgtgaatgcatccagctgttggaaaatgatgtataagtctaagtcctcttgacttgaccataagatcatggaaaacagatgacttgtgaaccccacagtgtggatgtgcaaatgaaaattgaaggaaagaatatgaactgagaaatgttctttggcagtgatatagttcttagacatcttcagaatgactaatttctccgagtggtgcataatcttattttgtttgggagtaacaaatcgtggaatatttttaaggaaaactgttgtataaaactttaccatagtaaccttagaccttagagaggtagctttggagtgaaactttggctgcaataggctactttggcaagccctccgtaaaagtcagaggagagatcagtacagagctaagagtgacatcaaatgaggactgtgggacccagatttgaagacccaataaaaatactcaactttttaaaaaagatagtgaagtggtcttgattgattttgattttcactgccaagccaatcatgtgaaggacagaagcttttgccatgggcccctcacatcagggaaaatgaccttcactgctgttaacagtaatgtgtccctttcattttctggatcaagccttctcagcggtgggtctggatgtgggtaaactaaggtaaaggggatgatattccacaaactaattatgcacacagaaaatctgtggagcctatcagaccccaagtgtcttgaaatgtttgtagaaacccactaaaatgccccttctctgggtgtgggcccttattgcagctgtctcacagcctgagctgtggtacagagaaatgggggttctccttttattttcattttttttccccaatggcagcttttctcccgttgttttaccttcctatttcccaaacagttcctcttattttgtcttttgcaccagtttctggaggcccttgtcatttcaaaaaggatagtctcttttcttactctggcaaacctgtgagtgattccacaaagatacagtattacttagctatctgaattatgatagaaaaggtcctagttaggttcctatataaagcatttggaagatgaccttgttgcccttgaaacttgaaaatagggattctggggtgaggatacaaagacattgtcttgcatatccataagcaggtcttagagcattattccaaactctagctgtttcagtagttctatgaggattgcaagtcataggtgtgtgtggcatatcagtccatctccctcatctccattctcagtttcttccccacaaaatttggaatcaaagcttttatgacgtttgccaattgcagaacttcttcagctaaggttaatttgacgctatgataaaactgagagatgtcaaaaagcctcttagaaattttaatcttgaaagacttttcagggtatctcattttttaggtgggggtggcaggtgtatttcttttttaacaaataaaaggcatttaagtaaaactaaaatgaaaaaagtaggccttctgacattgtgtacttggtggttctgtccctctgcctgtaacaaatctcatttttgttaccaagaactgtatgaaagaagtaaatccaccccgattctgtatgattaattccatctgtgtttgtcatttctgactggaaaacttcttactccataccttgttcgatatggaggacaaataattggattgtctgataagtctgccaataaactatccagaaatagcaagtgtaatagtccccactatacgaattttatggtttgtataaacactaacattttccccttctgtagttgtatgaaaaaacaaatattgttagcatagtagataaattgttatgaaataccagaaaaaaaaatctgtatcttttactgagaacacccaatacccagataaatgactgtatcaggatttcatttgcatgttagtccacagagttgcccagaaccctaaatttattcataagagaaaatattgattaattattggtcattcctcataagtgtagctgttgatgtgtgcgtctgattattgcttttttaattttatgaaaattgtgtaaaattacattttttttccaggggagaaaaaaacatcaaacaaaaacatctaaatcatcctttttgttctttttcagtttttaaccacttttaggttttccccttacagaaaccacagaaatattcccttagaataaaatagtatatttgtatttgaaaaaga

SEQ ID NO: 293876 - DNA, 2538 bp, Homo sapiens
tctctatcgttatcactctatccttaatctctccataccttatctctctatccttaattctgaaagtgtgaagcaaaggaatgatgtgttttaccttcaacctgagcgctcctgtgtcccgaatagccccatgtggtactccacattcccgatagaccctggaaccctggacaccatgttaacacgtattctcatggtgagggaggtacatgaagaacttgccaaagccaaatctgaagactctgatgttgaattatcagattaaaacggaagtgaggttcttattttcatacatattggtatgcaccaaactgtgaatgcatccagctgttggaaaatgatgtataagtctaagtcctcttgacttgaccataagatcatggaaaacagatgacttgtgaaccccacagtgtggatgtgcaaatgaaaattgaaggaaagaatatgaactgagaaatgttctttggcagtgatatagttcttagacatcttcagaatgactaatttctccgagtggtgcataatcttattttgtttgggagtaacaaatcgtggaatatttttaaggaaaactgttgtataaaactttaccatagtaaccttagaccttagagaggtagctttggagtgaaactttggctgcaataggctactttggcaagccctccgtaaaagtcagaggagagatcagtacagagctaagagtgacatcaaatgaggactgtgggacccagatttgaagacccaataaaaatactcaactttttaaaaaagatagtgaagtggtcttgattgattttgattttcactgccaagccaatcatgtgaaggacagaagcttttgccatgggcccctcacatcagggaaaatgaccttcactgctgttaacagtaatgtgtccctttcattttctggatcaagccttctcagcggtgggtctggatgtgggtaaactaaggtaaaggggatgatattccacaaactaattatgcacacagaaaatctgtggagcctatcagaccccaagtgtcttgaaatgtttgtagaaacccactaaaatgccccttctctgggtgtgggcccttattgcagctgtctcacagcctgagctgtggtacagagaaatgggggttctccttttattttcattttttttccccaatggcagcttttctcccgttgttttaccttcctatttcccaaacagttcctcttattttgtcttttgcaccagtttctggaggcccttgtcatttcaaaaaggatagtctcttttcttactctggcaaacctgtgagtgattccacaaagatacagtattacttagctatctgaattatgatagaaaaggtcctagttaggttcctatataaagcatttggaagatgaccttgttgcccttgaaacttgaaaatagggattctggggtgaggatacaaagacattgtcttgcatatccataagcaggtcttagagcattattccaaactctagctgtttcagtagttctatgaggattgcaagtcataggtgtgtgtggcatatcagtccatctccctcatctccattctcagtttcttccccacaaaatttggaatcaaagcttttatgacgtttgccaattgcagaacttcttcagctaaggttaatttgacgctatgataaaactgagagatgtcaaaaagcctcttagaaattttaatcttgaaagacttttcagggtatctcattttttaggtgggggtggcaggtgtatttcttttttaacaaataaaaggcatttaagtaaaactaaaatgaaaaaagtaggccttctgacattgtgtacttggtggttctgtccctctgcctgtaacaaatctcatttttgttaccaagaactgtatgaaagaagtaaatccaccccgattctgtatgattaattccatctgtgtttgtcatttctgactggaaaacttcttactccataccttgttcgatatggaggacaaataattggattgtctgataagtctgccaataaactatccagaaatagcaagtgtaatagtccccactatacgaattttatggtttgtataaacactaacattttccccttctgtagttgtatgaaaaaacaaatattgttagcatagtagataaattgttatgaaataccagaaaaaaaaatctgtatcttttactgagaacacccaatacccagataaatgactgtatcaggatttcatttgcatgttagtccacagagttgcccagaaccctaaatttattcataagagaaaatattgattaattattggtcattcctcataagtgtagctgttgatgtgtgcgtctgattattgcttttttaattttatgaaaattgtgtaaaattacattttttttccaggggagaaaaaaacatcaaacaaaaacatctaaatcatcctttttgttctttttcagtttttaaccacttttaggttttccccttacagaaaccacagaaatattcccttagaataaaatagtatatttgtatttgaaaaaga

SEQ ID NO: 293877 - DNA, 1277 bp, Homo sapiens
gtcagtatagtggatacccgcgtaaagtaacctgtgagtgattccacaaagatacagtattacttagctatctgaattatgatagaaaaggtcctagttaggttcctatataaagcatttggaagatgaccttgttgcccttgaaacttgaaaatagggattctggggtgaggatacaaagacattgtcttgcatatccataagcaggtcttagagcattattccaaactctagctgtttcagtagttctatgaggattgcaagtcataggtgtgtgtggcatatcagtccatctccctcatctccattctcagtttcttccccacaaaatttggaatcaaagcttttatgacgtttgccaattgcagaacttcttcagctaaggttaatttgacgctatgataaaactgagagatgtcaaaaagcctcttagaaattttaatcttgaaagacttttcagggtatctcattttttaggtgggggtggcaggtgtatttcttttttaacaaataaaaggcatttaagtaaaactaaaatgaaaaaagtaggccttctgacattgtgtacttggtggttctgtccctctgcctgtaacaaatctcatttttgttaccaagaactgtatgaaagaagtaaatccaccccgattctgtatgattaattccatctgtgtttgtcatttctgactggaaaacttcttactccataccttgttcgatatggaggacaaataattggattgtctgataagtctgccaataaactatccagaaatagcaagtgtaatagtccccactatacgaattttatggtttgtataaacactaacattttccccttctgtagttgtatgaaaaaacaaatattgttagcatagtagataaattgttatgaaataccagaaaaaaaaatctgtatcttttactgagaacacccaatacccagataaatgactgtatcaggatttcatttgcatgttagtccacagagttgcccagaaccctaaatttattcataagagaaaatattgattaattattggtcattcctcataagtgtagctgttgatgtgtgcgtctgattattgcttttttaattttatgaaaattgtgtaaaattacattttttttccaggggagaaaaaaacatcaaacaaaaacatctaaatcatcctttttgttctttttcagtttttaaccacttttaggttttccccttacagaaaccacagaaatattcccttagaataaaatagtatatttgtatttgaaaaaga

SEQ ID NO: 293878 - DNA, 219 bp, Homo sapiens
ttaaagttgcagaaaactaatacttctacctaatgttaattttatctttcctgatttttaggttgcaaattgctttataaacatgacttggcaaaacgctggggaaatcactgtaaaatgtgcagttattgtttacagacatctcccaaattggtacagaataatttaggagggaaagtggaagagttctgttgtgaagaatgcatgtccaaatataca

SEQ ID NO: 293879 - DNA, 449 bp, Homo sapiens
gagaatacgtgagactgtcataaaccctgggtattttgaatcaaaccatgggtcttttactgttatgtgacctttggcaattctgggcttgaactttcctactgcgtctctttgaactttaaatagagagaaatctgaagattgcggcagctgcccgtctcctggctgccaattgtctgcagagtgatgtaacatgaagaaaatgttctataaagaaggtgtacagaggaaaaacaacattccacctatacaagtgctatcaaggagaagggtgatatattagaaagaaaggattttgatgttggagagacttgggttcaaattccagctctttctgtaatgaaagccaagttgcttaacctgggaatcagcttctttagttttaaaatgaggataataatacctactcatgggagtcgcataaagatgaaatgaaagtctgtatgaaa

SEQ ID NO: 293880 - DNA, 2169 bp, Homo sapiens
ttaagagacagtgtcttgctctgcctcctaggcaggagtgcggtctcacgataacagttcactgcagcctccatctcctgggctcaagcaatccacccacctcggcctcccacgtagctggggctacaggcacgcatcaccatgcctggctcttgtcagtatgaatccctgctgtgtccccagcatctagagcagagcctggcacatggcaggcccatctttgtggagtgaactgggaacaggagcgctgggatggtggagtgttctaagtgagacagccacagtgcccgtcctgtttgctcctctcgcccgaactgccactttcagtgtcaggactgggaagagcataggcagaaaggcctggaatccagggagccccaggctgcccactgcccaccgcccacctcagcctggcccagcactcagagggtctcccacctcggcctggcccagcgcacagaggcctcccacctcggcctggccaagcgcgcagaggcctcccacctcggcctggcccagcgcgcagagggcctcccacctcggccttgcccagcgtgcagagagtctccaggatcttgtgctgcagcaggtactccaggcagggccctgcctcacccgcggccgcctgctgctgctcttcatacaccaggatatccagcatctgcttcagccgccagggaatgtctgtcttcttggcgggggtgctttcatctaatgatgtttgggaaacaagggtgagtagggtaaagaggggcaccccggcttgaaaacttcaccctctcctgccaaagcccagaaaggggaggtcctgtctgggagaggtgggggaagacagctgctggcaactgggaaatggaagtttacagtgaatgcttcaatatttaagaagacaaaagtccttccaggctcaggacacagtcctctgagaacgcatgcatgcccagccctttatcagggggcagcagcatcggtttccttcaaaccctaggatgggtacagagacagggacacatggtcctgggcccacagaaggctgctgtcagctctgggcctgagtggacactgtgggctcagggctcttgtcacataacttagaagctgtaattccagcagctgcctgagagagaacctcctggggcctcccccactgacactcagagaaggcaaacctctgtttttcacaaagcagaaaaaaacatctgtgccaccaccttcaggtctgacccagtcctgctccctgtaccaacgccctgacggggaagctacttagtgggggcttttgcagtcagagtctcagtgtgtgttttaaagaaagttctggtgcttcagggctagacttggagcaccccctagctttcctttaaggaacaggagcttgagtagggcggcctgccccacgcacttccaacccttctggtctagggaccattctggaaatgaaagggctggatgggggaagccccaggtgaatttcagccagttctgatctgatcttactgagctggtggactgaggctctccttcaagagatctttaacctgaagagatggttcagaaccaggggtgcgcttttcccccccagggaacatgaggcaatgtctggagaccttcctggttgtcccaattcgggggtggggtgtgctactggcacctagtgggtagaggccagaattactgctgcacatcccacaccgcccaggacagccccgcgcagggaaggctccaggtccaatgccaactgtgccaagattgagaaacctggtctagcagaaccctcagagggtcccacagatttctgaatttcctgggctggcccgggctggaaagaaagcctgtaggaaaggtgtgggctgggatcaagccccagtatgaactccaggaagggaaaagtgagggatgcaggatatggttacctggcaaccagtccgtatccacccatggcagcctcatgactgcagagcagccactcagatgccatcccctcagtgagcggtcctgatgggaccaggtgccaaggctttggctctttggggtgtcagcttggagagagggacccaggcatgttacccaccttggttttcgttctcctcctaccccagatctctacaaggacattgcccctaagctggctcaggggaaaggggaatttattaaattcttttcttttga

SEQ ID NO: 293881 - DNA, 700 bp, Homo sapiens
  misc_feature (107)..(107): n is a, c, g, or t
  misc_feature (120)..(120): n is a, c, g, or t
ccaatattcattctgggcccatccatacaggccagaggcaaatttatctacataatacacatgaaatagtacttccaaaagaaaaaaataaggcagcttcataaccnattattctttacntttaacaatataacttctcccgttcaagactcgtgccgaattcggcaccagatcatggcgatggtttcccccttactgttctcatggtagtgaataagcctcatgagatctgatggttttataaggggtttccctttgcacttggttctcattctctcttcccaccatgtaagacatgccttttgccttctgccatgattgtgaggtctccccagccacgtgaaactgagtccattaaacctctttttctttattagttacccagtcttgagtatgtctttatcagcagtgtcagaacagactaatacacaagggtatacatttcattaaattgaactattagaagatataatgtatatgtatatactgtgttttatttgcaagagcgacaattgttggtgacaagtttgcttgtttggaagaaaagtctgatacactaattaagataaagtgggagaagggaatagcctattttattatttttcttaacttttatcttgtaaagtcattgttttcaaagccaaagcaccatggaaacttcttcactgattctaagagcattaaatattttcaaaaagta

SEQ ID NO: 293882 - DNA, 2182 bp, Homo sapiens
  misc_feature (1318)..(1318): n is a, c, g, or t
actcagtgcagagggaaattgacacagccatgatgaggcctggctcacaagagccatagttactgtaggagtttctgtggctaaatatgcttagctattgaggcaaggacatgtgctggatgtgtatgcagtctttgaagctggagaggcctgtgttggaaactgtgctctgtcccatgccagttccctgaccttggaacccctagagcaatcaacagacagacagagccctgcttcatggagcgtctgctctctcctggagctcacacgctgaaacagacaggatgcaacacctcagggttgttggagaaccagaggctgttgcaattaggatggcgaatggtgaaaaacagtgtggttgaattgaacataagctgaagggctagacatcatggcttcaatccttgtggaggagccttcatctaccacataagaattgcagcaaaccctgcagctatcctgaagctgccatgctgaaaaggccaattgggagaccacatagagaccgagagagacttccaaggactccagccaatcctgggccccagcagtttgaatctcccagcaatgccaccatacaggagagggagcaaatactcagaagattcaagtgccagctgcatgggttgatacctacataaaaggcattgggtatgtgctcttgggtgattcccctaatcatagtggaaagatgggagctgagactctaagactgtaagtaacttggccaagacttatggcttgatacggatcttctaactcaaaatcgtgtgttcttctcactacccaattattgcttcacacttcatcattttgcagatgactgtgtgttgatgagaggctgccataatttgaagtcattagaacaatgaaatagtatctgcacatatgcacagtcctcggatgcgatgggcattccctcaagctgcagtccagcaggaaattttcagtgctagaagagttaaactataagctgacttgagatgtagtagttcaaaacccttgccaataactctttattatgtgcagcattttcaaagcaaaattacaacatgttagaaagtgaatgaggcaaattactggtgatgtcatcaaagtaataactgctaatgacccttttactcctgggcattgcctgaggccacactgacaggaagagcagatctgctttctgtgaatccatttggattatctagaaggcatcctgaaagttatgaaaacataatgtgagaaaatgatagatcaaagtgtgaatacaatgcagggacaacagaaaggaaaatgtactctctgttgtgtaatgggtattttggccagngtttgaagagctttattaaggagtgacaacaaacatatatttaaatgatgacatttcctccaaaataaaataaacaaataaatatgtagaatttaaaacttttttgtttccatgaaagagtttggaatacccttccaaactctcctcattcattgagacgatggatctcttgttattaaccgagacactgaattttgaggtgacatcctgttctggaggcagaaacattgccagcacttctccttcagcagttgatttattatgtgacagtcggtgatgagcttatcctcatgaagatgctccctcccacggacagccgtatcatacttgaggcctccctgccacttacccaggccactgcaatagcccctttgttgtcatctggttaagaactaaggttcttccttaaccagtccattcccctgacttccacagagaaaccattctataaactgctcatctgtcagctgttcaccagctcaaaaaccattcagaatcccacaccttctcccactgtccacagaatattgtcagtactccttctaagagaattcaaagcaacatgacatcatcctatatttctagccttacctaataaatattcataccgactacctactgctttctatacagggaaacatttcaaggcctccgaggtctgcttggaattctcccatccaccatcatttctgctgcctattaatattccacctataatttattcaccaaatattccttgaatgagtgccaggtgtcagatacctcagttccaaggtcctttcttttgtgaagcttttcttggaagctccctttctgagctcacactctaattgggacattatttaattatagtctgtattgaac

SEQ ID NO: 293883 - DNA, 369 bp, Homo sapiens
actcagtgcagagggaaattgacacagccatgatgaggcctggctcacaagagccatagttactgtaggagtttctgtggctaaatatgcttagctattgaggcaaggacatgtgctggatgtgtatgcagtctttgaagctggagaggcctgtgttggaaactgtgctctgtcccatgccagttccctgaccttggcttcggaagtcccatttaacaactgctcccagtacagcatgagaagtgacccagagcacagcgatcgcacgcgcagcgtgctctacagaaggtgcatccacagatggcgggccagccggctcccaatatagtttttaacataaatgatgaaaataaaaaccctgaagaaaaa

SEQ ID NO: 293884 - DNA, 511 bp, Homo sapiens
actcagtgcagagggaaattgacacagccatgatgaggcctggctcacaagagccatagttactgtaggagtttctgtggctaaatatgcttagctattgaggcaaggacatgtgctggatgtgtatgcagtctttgaagctggagaggcctgtgttggaaactgtgctctgtcccatgccagttccctgaccttggaacccctagagcaatcaacagacagacagagccctgcttcatggagcgtctgctctctcctggagctcacacgctgaaacagacaggatgcaacacctcagggttgttggagaaccagaggctgttgcaattaggatggcgaatggtgaaaaacagtgtggttgaattgaacataagctgaagggctagacatcatggcttcaatccttgtggagaatgacttgtgaattgccacctcctgcaaatcctgtggcctatgatctggaccaaatcacatccaagtgtctgatcagttctgagagtggttgtggatg

SEQ ID NO: 293885 - DNA, 759 bp, Homo sapiens
ggcacaagaagggtaggagagaaaagccatggccgacaaggtcctgaaggagaagagaaagctgtttatccattccatgggtgaaggtacaataaatggcttactggatgaattattacagacaagggtgctgaaccaggaagagatggagaaagtaaaacgtgaaaatgctacagttatggataagacccgagctttgattgactccgttattccgaaaggggcacaggcatgccaaatttgcatcacatacatttgtgaagaagacagttacctggcagagacgctgggactctcagcaggtccgatacctggaaattagcttagtacacaagactcccaattactattttcttccttcccagctcttcaggcagtgcaggacaacccagctatgcccacatgctcaagcccagaaggcagaatcaagctttgctttctagaagacgctcaaaggatatggaaacaaaagttgcagaggtgccatgttcagaatacaataataaagtggagtgaaagatatacttcaggcagttttgaaatgcagtggctttttcttagaaccaattttattgagcggttctggaggaacatacttctgctccccttgcataaaggatctctatatcctagaatcccaggtttaggtaaagagttgcaaactggaactcataaattatcatagtcttcacccagtctgtctcttagaatttatttcccactgacacaaacaagccattttgtctgcttgtataaccc

SEQ ID NO: 293886 - DNA, 858 bp, Homo sapiens
  misc_feature (20)..(20): n is a, c, g, or t
ctagtggatccccggggctncaggaattcggcacgaggagtaaaagccatggccgacaaggtcctgaaggagaagagaaagctgtttatccattccatgggtgaaggtacaataaatggcttactggatgaattattacagacaagggtgctgaaccaggaagagatggagaaagtaaaacgtgaaaatgctacagttatggataagacccgagctttgattgactccgttattccgaaaggggcacaggcatgccaaatttgcatcacatacatttgtgaagaagacagttacctggcagagacgctgggactctcagcaggtaagggtcagtgactcacactcaagttcacctagggcctgtcttcgtgcctaacatttgatttctttactagtcatgttaatctgcagaatatcttcttatctctgcctttgggccatatttctgtagcagaggccctattgcatgtcccttgactcttttttgtgttccttcatcctcagtgccctcttctgattaaagttcattttctgttctgagtacatggtagctaatttccttaaggtcatgagaactatctagaaagcttcatacaatatgttccagtgttcctggcaaggcacgatatttattgattgatttattattttgtgtccagggtgtccctaagcccttatgtagttgtttgacatgagctttagggtctgtattcaaatactttttataaattcttttcaaacttttgccctcagagaagaataaagtatatttaagtgacgatgatacgttcaggaaatacattcaatgattacagaatagtaaagatttcaacagggctctttcctcccgttgccccc

SEQ ID NO: 293887 - DNA, 716 bp, Homo sapiens
  misc_feature (20)..(20): n is a, c, g, or t
ctagtggatccccggggctncaggaattcggcacgaggagtaaaagccatggccgacaaggtcctgaaggagaagagaaagctgtttatccattccatgggtgaaggtacaataaatggcttactggatgaattattacagacaagggtgctgaaccaggaagagatggagaaagtaaaacgtgaaaatgctacagttatggataagacccgagctttgattgactccgttattccgaaaggggcacaggcatgccaaatttgcatcacatacatttgtgaagaagacagttacctggcagagacgctgggactctcagcagctcttcaggcagtgcaggacaacccagctatgcccacatgctcaagcccagaaggcagaatcaagctttgctttctagaagacgctcaaaggatatggaaacaaaagttgcagaggtgccatgttcagaatacaataataaagtggagtgaaagatatacttcaggcagttttgaaatgcagtggctttttcttagaaccaattttattgagcggttctggaggaacatacttctgctccccttgcataaaggatctctatatcctagaatcccaggtttaggtaaagagttgcaaactggaactcataaattatcatagtcttcacccagtctgtctcttagaatttatttcccactgacacaaacaagccattttgtctgcttgtataaccc

SEQ ID NO: 293888 - DNA, 867 bp, Homo sapiens
agcgagtgtatcccactgaggccccttggtcgctcccactcgtcgtgccctcacctagtcaggtcccgcagccgcgcctcctccccgcgcagctcctcggaatgcgtgggggcttcctgcaacatcagtctccgccgccctccactaaatcgcgaccctgggaaggtgtttccactgtgcccatcacactaggggaaattgaggcggaggcagggtgcgcaggcaaagagcggcaagaggacagctgggaggaaaaccctcacagagagcgtgacatctgagccatctgaaggataagtaggactgtgtcaggattatcatgctggcttcagcaggtagagctgatgggaggaggtaagacaggaaggaactgcatagtccagtaaattgcaacagaaggaacagtgcatcagttctgagcctaggtgtccagaggccttgcatgctttggctctctcttttggggctctgcccaggcacccagggaacaccctgggctagcctgctggagtgtgagagatcatgtgcggcagtgctcagccaacccagccgaggccatcagaaattagccagcacccagtcaacttggcagctgaccaccaacagagaagtggactcactcaagaccagaagaaatatccagctgacctcagtcaaaactgctaacccacacaatagtgagatatatacatagctgccgttttaagccactaagtgttggggtaattggttttgcagcaaaagtagactgatacagaaattggtgtccgaaagtgagatgttaggccattaacaataccctaaaatttgtgacattagctttgagattgggagtggttggaaactgggaaaatggcaagagcaaac

SEQ ID NO: 293889 - DNA, 1765 bp, Homo sapiens
ggaattcgccgcccgctccgagcctggtgcttccgaccgctgcgcgcggctcctgggctgtcacagtctcccgttgccgccgtcatgtcccggcagctgtcgcgggcccggccagccacggtgctgggcgccatggagatggggcgccgcatggacgcgcccaccagcgccgcagtcacgcgcgccttcctggagcgcggccacaccgagatagacacggccttcgtgtacagcgagggccagtccgagaccatccttggcggcctggggctccggctgggcggcagcgactgcagagtgaaaattgataccaaggccattccactgtttgggaactccctgaagcctgacagtctccggttccagctggagacgtcactgaagcggctgcagtgtccccgagtggacctcttctacctgcatatgccagaccacagcaccccggtggaagagacactgcgtgcctgccaccagctgcaccaggagggcaagttcatggagcttggcctctccaactatgcagcctgggaagtggccgagatctgtaccctctgcaagagcaacggctggatcctgcccactgtgtaccagggcatgtacaatgccatcacccggcaggtggaaacggagctcttcccctgcctcaggcactttggactgaggttctatgccttcaaccctctggctgggggcctgctgaccggcaagtacaagtatgaggacaaggatgggaaacagcccgtgggccgcttctttgggaatacctgggcagagatgtacaggaatcgctactggaaggagcaccactttgagggcattgccctggtggagaaggccctgcaggccgcgtatggcgccagcgcccccagcatgacctcggccaccctccggtggatgtaccaccactcacagctgcagggtgcccacggggacgcggtcatcctgggcatgtccagcctggagcagctggagcagaacttggcagcggcagaggaagggcccctggagccggctgtcgtggacgcctttaatcaagcctggcatttggttgctcacgaatgtcccaactacttccgctaggcccatcgtttctcaggctgcccaaggctcttctgtaacatcttttgttactcacattttctttaatttagaactgcctcagtaaattcttagggatggaagtatttggacaaaaacctaatagaagagtcaccaccaaatgaagaataaaactcccagggtgctgtgtgttagtctgtttgcgttgctataaaagaatacctgagactgggtcatttataaagaaaagaggtttatttggctcaccactctgcagtctgtacaagggggtgtggtgccggcatctgctcttggtgagggcctcaggaagcttacagtcatggcagagggggaagcggcgccagcgtgtcacatggtgagagagggagcaagagacagacaggggaggaaattccaggctcttttaaacaaccagatcctgtgtgaactcatagagctggaactcactcattactatacagatggcaccaagccattcatgtgggatttgcccccataccctaacccctcccaccaggctcacctctaacattggggatcacattgcaacatgagatttggaggggacaaaataccctgatgatatcattgtaccagtaccacccccccgcaaatgtcatgttcttctcacattgcaaagtacagtcatcccttcccaatagtcacccaaagtcttaacttgttt

SEQ ID NO: 293890 - DNA, 444 bp, Homo sapiens
  misc_feature (17)..(17): n is a, c, g, or t
  misc_feature (24)..(24): n is a, c, g, or t
ctactactactaaattngcggcgntcgacgtctgcaggcactcagaatggtccagcgtttgacataccgacgtaggctttcctacaatacagcctctaacaaaactaggctgtcccgaacccctggtaatagaattgtttacctttataccaagaaggttgggaaagcaccaaaatctgcatgtggtgtgtgcccaggcagacttcgaggggttcgtgctgtaagacctaaagttcttatgagattgtccaaaacaaagaaacatgtcagcagggcctatggtggttccatgtgtgctaaatgtgttcgtgacaggatcaagcgtgctttccttatcgaggagcagaaaatcgttgtgaaagtgttgaaggcacaagcacagagtcagaaagctaaataaaaaaatgaaacttttttgagtaataaaaatgaaaagacgctgta

SEQ ID NO: 293891 - DNA, 214 bp, Homo sapiens
gcggccgcctactactactactactgctcgaattcaagcttctaacgatgtacggggacatgtgtgctaaatgtgttcgtgacaggatcaagcgtgctttccttatcgaggagcagaaaatcgttgtgaaagtgttgaaggcacaagcacagagtcagaaagctaaataaaaaaatgaaacttttttgagtaataaaaatgaaaagacgctgta

SEQ ID NO: 293892 - DNA, 504 bp, Homo sapiens
tttgatccccctttgaaacgttccgcgcgcctttgagatgaccactccgaaatctcggccattatggccggggctcttccggggacgttgtctgcaggcactcagaatggtccagcgtttgacataccgacgtaggctttcctacaatacagcctctaacaaaactaggctgtcccgaacccctggtaatagaattgtttacctttataccaagaaggttgggaaagcaccaaaatctgcatgtggtgtgtgcccaggcagacttcgaggggttcgtgctgtaagacctaaagttcttatgagattgtccaaaacaaagaaacatgtcagcagggcctatggtggttccatgtgtgctaaatgtgttcgtgacaggatcaagcgtgctttccttatcgaggagcagaaaatcgttgtgaaagtgttgaaggcacaagcacagagtcagaaagctaaataaaaaaatgaaacttttttgagtaataaaaatgaaaagacgctgta

SEQ ID NO: 293893 - DNA, 1246 bp, Homo sapiens
  misc_feature (10)..(10): n is a, c, g, or t
  misc_feature (14)..(14): n is a, c, g, or t
  misc_feature (89)..(89): n is a, c, g, or t
atcgactccnatgngaggccctgcgccattgcgttggaacccgcgaattcggccattatggccggggctcttccggggacgttgtcttnaggcactcagaatggtccagcgtttgacataccgacgtaggctttcctacaatacagcctctaacaaaactaggctgtcccgaacccctggtaatagaattgtttacctttataccaagaaggttgggaaagcaccaaaatctgcatgtggtgtgtgcccaggcagacttcgaggggttcgtgctgtaagacctaaagttcttatgagattgtccaaaacaaagaaacatgtcagcagggcctatggtggttccatgtgtgctaaatgtgttcgtgacaggatcaagcgtgctttccttatcgaggagcagaaaatcgttgtgaaagtgttgaaggcacaagcacagagtcagaaagctaaataaaaaaatgaaacttttttgagtaataaaaatgaaaagacgctgtagtccaatagaaaaagttggtgtgctggagctacctcacctcagcttgagagagccagttgtgtgcatctctttccagttttgcatccagtgacgtctgcttggcatcttgagattgttatggtgagagtatttacacctcagcaaatgctgcaaaatcctgttttcccccagagagctggaggttaaatactaccagcacatccctagatactactcaagttacagtatatgatcactaatatagtatgctcttggtaccaggagctctgatatatatctggtacatgtttgataatgacttgattgttattataagtacttattaatacttcgattctgtaaagagtttagggtttgattttataaaatccaaaatgagccttttattgaatccagttctctatgtgaccagttctctgtatgaatggaagggaaaagaattaaaaatcttgcaaaggggaaagttccatcttcttaaaaactagatgtggtaaacaactattctaaaccaggagtagaaaagctaacactatctggctggacacggtggctcacacctgtaatcccagcactttgggaggccaaggtgggtggatcatgaggtcaggagatggagaccatcctagctaacacagtgaaaccccgtctctactaaaaatacaaaaaattagccgggcatggtggcaggcgcctgtagtcacagctacccggaggctgaggcagaagaatggcgtgaacctgggaggt

SEQ ID NO: 293894 - DNA, 380 bp, Homo sapiens
taccaaattcgcggccgcgtcgacacagcctctaacaaaactaggctgtcccgaacccctggtaatagaattgtttacctttataccaagaaggttgggaaagcaccaaaatctgcatgtggtgtgtgcccaggcagacttcgaggggttcgtgctgtaagacctaaagttcttatgagattgtccaaaacaaagaaacatgtcagcagggcctatggtggttccatgtgtgctaaatgtgttcgtgacaggatcaagcgtgctttccttatcgaggagcagaaaatcgttgtgaaagtgttgaaggcacaagcacagagtcagaaagctaaataaaaaaatgaaacttttttgagtaataaaaatgaaaagacgctgta

SEQ ID NO: 293895 - DNA, 416 bp, Homo sapiens
taccaaattcgcggccgcgtcgacacagcctctaacaaaactaggctgtcccgaacccctggtaatagaattgtttacctttataccaagaaggttgggaaagcaccaaaatctgcatgtggtgtgtgcccaggcagacttcgaggggttcgtgctgtaagacctaaagttcttatgagattgtccaaaacaaagaaacatgtcagcagggcctatggtggttccatgtgtgctaaatgtgttcgtgacaggatcaagcgtgctttccttatcgaggagcagaaaatcgttgtgaaagtgttgaaggcacaagcacagagtcagaaagctaaataaaaaaatgaaacttttttgagtaataaaaatgaaaagacgctgtaaaaaaaaaaaagtcgacgccgcaatagtatagtagc

SEQ ID NO: 293896 - DNA, 632 bp, Homo sapiens
  misc_feature (437)..(437): n is a, c, g, or t
  misc_feature (446)..(446): n is a, c, g, or t
  misc_feature (451)..(451): n is a, c, g, or t
  misc_feature (455)..(455): n is a, c, g, or t
  misc_feature (468)..(468): n is a, c, g, or t
  misc_feature (473)..(473): n is a, c, g, or t
  misc_feature (476)..(476): n is a, c, g, or t
  misc_feature (481)..(481): n is a, c, g, or t
  misc_feature (484)..(484): n is a, c, g, or t
  misc_feature (490)..(490): n is a, c, g, or t
  misc_feature (492)..(492): n is a, c, g, or t
  misc_feature (494)..(494): n is a, c, g, or t
  misc_feature (502)..(502): n is a, c, g, or t
  misc_feature (513)..(513): n is a, c, g, or t
  misc_feature (516)..(516): n is a, c, g, or t
  misc_feature (524)..(525): n is a, c, g, or t
  misc_feature (536)..(536): n is a, c, g, or t
  misc_feature (541)..(542): n is a, c, g, or t
  misc_feature (546)..(546): n is a, c, g, or t
  misc_feature (553)..(553): n is a, c, g, or t
  misc_feature (555)..(555): n is a, c, g, or t
  misc_feature (563)..(563): n is a, c, g, or t
  misc_feature (594)..(595): n is a, c, g, or t
  misc_feature (609)..(609): n is a, c, g, or t
  misc_feature (612)..(612): n is a, c, g, or t
  misc_feature (616)..(616): n is a, c, g, or t
  misc_feature (618)..(618): n is a, c, g, or t
  misc_feature (625)..(625): n is a, c, g, or t
cctcttccggggacgttgtctgcaggtcccgaacccctggtaatagaattgtttacctttataccaagaaggttgggaaagcaccaaaatctgcatgtggtgtgtgcccaggcagacttcgaggggttcgtgctgtaagacctaaagttcttatgagattgtccaaaacaaagaaacatgtcagcagggcctatggtggttccatgtgtgctaaatgtgttcgtgacaggatcaagcgtgctttccttatcgaggagcagaaaatcgttgtgaaagtgttgaaggcacaagcacagagtcagaaagctaaataaaaaaatgaaacttttttgagtaataaaaatgaaaagacgctgtaaaaaaaacaaaaaaaaaaaaaaaaaaaaaaaaaaaaagtggcgcggcgcgcgcctccgggccctcggagaaaggttttnataaacccnttcgngtgngggccgccggggncccangtnagggnaangtagancntngggccaanacggtggtccncanagggaganncccggggccangagannaggnggcgggngnttctcccncccaaatataaaaaaaggcgccggggggggnnaaccccgagagcgngtntctntngaacaanatcctcc

SEQ ID NO: 293897 - DNA, 541 bp, Homo sapiens
ctttaccttttaattttagttcttaacacatagccccttatgtgttgttttttactgggaattttcaaaaatatggttaaaatattctaagacattttgcaaatcaagaaataccactattcctggatcctaacaataaattagagctctcataagtggtctcctgtggggatgacttcatagtttatcttgactcagaaggaggacagataactactggcatgaaattgaaggattatcctgctttaaatgaatttcaccttttaagttttactctgtatttgtgtatcctgtagtttcctgggttccctgattgctttgcttggttctttaccatgtttgccttctctgtgctaaataaaaaatgaagttcattttaaagaaatgattaatttggtattttcctttctaggatcaagcgtgctttccttatcgaggagcagaaaatcgttgtgaaagtgttgaaggcacaagcacagagtcagaaagctaaataaaaaaatgaaacttttttgagtaataaaaatgaaaagacgctgta

SEQ ID NO: 293898 - DNA, 291 bp, Homo sapiens
aaaaaaaaaaaaagaagaagaaatctcagcaggctgagatggaactcattcttctcatgaagaacgtggcaagcattatacagaggggccatagtctggaaagcaggagatgcttacagacatataagttgtttccatgtgtgctaaatgtgttcgtgacaggatcaagcgtgctttccttatcgaggagcagaaaatcgttgtgaaagtgttgaaggcacaagcacagagtcagaaagctaaataaaaaaatgaaacttttttgagtaataaaaatgaaaagacgctgta

SEQ ID NO: 293899 - DNA, 206 bp, Homo sapiens
gcggccgcctactactactacaaaattcgcggccgcgtcgacggtggttccatgtgtgctaaatgtgttcgtgacaggatcaagcgtgctttccttatcgaggagcagaaaatcgttgtgaaagtgttgaaggcacaagcacagagtcagaaagctaaataaaaaaatgaaacttttttgagtaataaaaatgaaaagacgctgta

SEQ ID NO: 293900 - DNA, 209 bp, Homo sapiens
cgcttcaggttaggaaagcctaattcaaggaagcatgggcaggtggtgtcatccatgtgtgctaaatgtgttcgtgacaggatcaagcgtgctttccttatcgaggagcagaaaatcgttgtgaaagtgttgaaggcacaagcacagagtcagaaagctaaataaaaaaatgaaacttttttgagtaataaaaatgaaaagacgctgta

SEQ ID NO: 293901 - DNA, 481 bp, Homo sapiens
cagagtaagattgtgaagcagttctgaatgttatgatttttccctaaagtatattatttattgccggtaataattattctgccattattaggtccaatagaaaaagttggtgtgctggagctacctcacctcagcttgagagagccagttgtgtgcatctctttccagttttgcatccagtgacgtctgcttggcatcttgagattgttatggtgagagtatttacacctcagcaaatgctgcaaaatcctgttttcccccagagagctggaggttaaatactaccagcacatccctagatactactcaagttacagtatatgatcactaatatagtatgctcttggtaccaggagctctgatatatatctggtacatgtttgataatgacttgattgttattataagtacttattaatacttcgattctgtaaagagtttagggtttgattttataaaatccaaaatgagccttttattg

SEQ ID NO: 293902 - DNA, 296 bp, Homo sapiens
  misc_feature (293)..(293): n is a, c, g, or t
  misc_feature (295)..(295): n is a, c, g, or t
gcggccgcctactactactacgttcgtgctgtaagacctaaagttcttatgagattgtccaaaacaaagaaacatgtcagcagggcctatggtggttccatgtgtgctaaatgtgttcgtgacaggatcaagcgtgctttccttatcgaggagcagaaaatcgttgtgaaagtgttgaaggcacaagcacagagtcagaaagctaaataaaaaaatgaaacttttttgagtaataaaaatgaaaagacgctgtaaaaaaaaaagtcgaccggccggaatttagtagtagtagngna

SEQ ID NO: 293903 - DNA, 463 bp, Homo sapiens
gcagggtccggcgagttcgggtggtttcgctatttggcttctgcgtccaaggcccatgtcaaggaagagaaaaatgtgttagaagtttctgtcttgcttttggagatgcaaacagaataatggcttcataaatcactcgcactggttttacgtgtcaagttttggtgtctggtaattctgttttagtttaattttagtgagaggcttgtgacaacaaatgaggtggttacaaggggtggaatgggaagattaaattagttcaagtattgattatgttttacgttgggtagttcccttaacgaagttgctcgtatgcatatctgtataaccgatttgctaaataacatcacgatgtttccagaagtgggaagaaagcaggtgccataacccaaagaaacttgtgtaatatcaaaattagtattaaagggtatgcctttacgcagaaacgcagaacgcgcctaat

SEQ ID NO: 293904 - DNA, 909 bp, Homo sapiens
  misc_feature (117)..(117): n is a, c, g, or t
cactgggtgtgaaacaactaattgtcggtgttaacaaaatggattccactgagccaccctacagccagaagagatatgaggaaatgttaaggaagtcagcacttacattaagaaaantggctacaaccccgacacagtagcatttgtgccaatttctggttggaatggtgacaacatgctggagccaagtgctaacatgccttggttcaagggatggaaagtcacccgtaaggatggcaatgccagtggaaccacgctgcttgaggctctggactgcatcctaccaccaactcgtccaactgacaagcccttgcgcctgcctctccaggatgtctacaaaattggtggtattggtactgttcctgttggccgagtggagactggtgttctcaaacccggtatggtggtcacctttgctccagtcaacgttacaacggaagtaaatctgtcgaaatgcaccatgaagctttgagtgaagctcttccggggacgttgtctgcaggcactcagaatggtccagcgtttgacataccgacgtaggctttcctacaatacagcctctaacaaaactaggctgtcccgaacccctggtaatagaattgtttacctttataccaagaaggttgggaaagcaccaaaatctgcatgtggtgtgtgcccaggcagacttcgaggggttcgtgctgtaagacctaaagttcttatgagattgtccaaaacaaagaaacatgtcagcagggcctatggtggttccatgtgtgctaaatgtgttcgtgacaggatcaagcgtgctttccttatcgaggagcagaaaatcgttgtgaaagtgttgaaggcacaagcacagagtcagaaagctaaataaaaaaatgaaacttttttgagtaataaaaatgaaaagacgctgta

SEQ ID NO: 293905 - DNA, 612 bp, Homo sapiens
acttcgaggggttcgtgctgtaagacctaaagttcttatgagattgtccaaaacaaagaaacatgtcagcagggcctatggtggttccatgtgtgctaaatgtgttcgtgacaggatcaagcgtgctttccttatcgaggagcagaaaatcgttgtgaaagttttgaagccacgtgggacctctttccggggacgttgtctgcaggcactcagaatggtccagcgtttgacataccgacgtaggctttcctacaatacagcctctaacaaaactaggctgtcccgaacccctggtaatagaattgtttacctttataccaagaaggttgggaaagcaccaaaatctgcatgtggtgtgtgcccaggcagacttcgaggggttcgtgctgtaagacctaaagttcttatgagattgtccaaaacaaagaaacatgtcagcagggcctatggtggttccatgtgtgctaaatgtgttcgtgacaggatcaagcgtgctttccttatcgaggagcagaaaatcgttgtgaaagtgttgaaggcacaagcacagagtcagaaagctaaataaaaaaatgaaacttttttgagtaataaaaatgaaaagacgctgta

SEQ ID NO: 293906 - DNA, 475 bp, Homo sapiens
ctctacagagttgttggacggaaagaggagagtgggcccacttctctttccggggacgttgtctgcaggcactcagaatggtccagcgtttgacataccgacgtaggctttcctacaatacagcctctaacaaaactaggctgtcccgaacccctggtaatagaattgtttacctttataccaagaaggttgggaaagcaccaaaatctgcatgtggtgtgtgcccaggcagacttcgaggggttcgtgctgtaagacctaaagttcttatgagattgtccaaaacaaagaaacatgtcagcagggcctatggtggttccatgtgtgctaaatgtgttcgtgacaggatcaagcgtgctttccttatcgaggagcagaaaatcgttgtgaaagtgttgaaggcacaagcacagagtcagaaagctaaataaaaaaatgaaacttttttgagtaataaaaatgaaaagacgctgta

SEQ ID NO: 293907 - DNA, 544 bp, Homo sapiens
cctcttccggggacgttgtctgcaggtatggatgttgttctcttttccctgtctttatttccttaccaatcggctgccatccgaggagctgaggaagcctagagctctcagaagcagtcctttgagctggtgtaggggcactcagaatggtccagcgtttgacataccgacgtaggctttcctacaatacagcctctaacaaaactaggctgtcccgaacccctggtaatagaattgtttacctttataccaagaaggttgggaaagcaccaaaatctgcatgtggtgtgtgcccaggcagacttcgaggggttcgtgctgtaagacctaaagttcttatgagattgtccaaaacaaagaaacatgtcagcagggcctatggtggttccatgtgtgctaaatgtgttcgtgacaggatcaagcgtgctttccttatcgaggagcagaaaatcgttgtgaaagtgttgaaggcacaagcacagagtcagaaagctaaataaaaaaatgaaacttttttgagtaataaaaatgaaaagacgctgta

SEQ ID NO: 293908 - DNA, 610 bp, Homo sapiens
cctcttccggggacgttgtctgcaggtatggatgttgttctcttttccctgtctttatttccttaccaatcggctgccatccgaggagctgaggaagcctagagctctcagaagcagtcctttgagctggtgtagggcggtgtttctccaactgggctcgtggcacttttctggacaccactccaaacaaaattagactctgagcactcagaatggtccagcgtttgacataccgacgtaggctttcctacaatacagcctctaacaaaactaggctgtcccgaacccctggtaatagaattgtttacctttataccaagaaggttgggaaagcaccaaaatctgcatgtggtgtgtgcccaggcagacttcgaggggttcgtgctgtaagacctaaagttcttatgagattgtccaaaacaaagaaacatgtcagcagggcctatggtggttccatgtgtgctaaatgtgttcgtgacaggatcaagcgtgctttccttatcgaggagcagaaaatcgttgtgaaagtgttgaaggcacaagcacagagtcagaaagctaaataaaaaaatgaaacttttttgagtaataaaaatgaaaagacgctgta

SEQ ID NO: 293909 - DNA, 456 bp, Homo sapiens
tcgggtacccacacgttacgccttcctctcccggggacgttgtctgcaggcactcagaatggtccagcgtttgacataccgacgtaggctttcctacaatacagcctctaacaaaactaggctgtcccgaacccctggtaatagaattgtttacctttataccaagaaggttgggaaagcaccaaaatctgcatgtggtgtgtgcccaggcagacttcgaggggttcgtgctgtaagacctaaagttcttatgagattgtccaaaacaaagaaacatgtcagcagggcctatggtggttccatgtgtgctaaatgtgttcgtgacaggatcaagcgtgctttccttatcgaggagcagaaaatcgttgtgaaagtgttgaaggcacaagcacagagtcagaaagctaaataaaaaaatgaaacttttttgagtaataaaaatgaaaagacgctgta

SEQ ID NO: 293910 - DNA, 498 bp, Homo sapiens
  misc_feature (10)..(10): n is a, c, g, or t
  misc_feature (14)..(14): n is a, c, g, or t
  misc_feature (89)..(89): n is a, c, g, or t
atcgactccnatgngaggccctgcgccattgcgttggaacccgcgaattcggccattatggccggggctcttccggggacgttgtcttnaggcactcagaatggtccagcgtttgacataccgacgtaggctttcctacaatacagcctctaacaaaactaggctgtcccgaacccctggtaatagaattgtttacctttataccaagaaggttgggaaagcaccaaaatctgcatgtggtgtgtgcccaggcagacttcgaggggttcgtgctgtaagacctaaagttcttatgagattgtccaaaacaaagaaacatgtcagcagggcctatggtggttccatgtgtgctaaatgtgttcgtgacaggatcaagcgtgctttccttatcgaggagcagaaaatcgttgtgaaagtgttgaaggcacaagcacagagtcagaaagctaaataaaaaaatgaaacttttttgagtaataaaaatgaaaagacgctgta

SEQ ID NO: 293911 - DNA, 1016 bp, Homo sapiens
tttgatccccctttgaaacgttccgcgcgcctttgagatgaccactccgaaatctcggccattatggccggggctcttccggggacgttgtctgcaggcactcagaatggtccagcgtttgacataccgacgtaggctttcctacaatacagcctctaacaaaactaggctgtcccgaacccctggtaatagaattgtttacctttataccaagaaggttgggaaagcaccaaaatctgcatgtggtgtgtgcccaggcagacttcgaggggttcgtgctgtaagacctaaagttcttatgagattgtccaaaacaaagaaacatgtcagcagggcctatggtggttccatgtgtgctaaatgtgttcgtgacaggatcaagcgtgctttccttatcgaggagcagaaaatcgttgtgaaagtgttgaaggcacaagcacagagtcagaaagctaaataaaaaaatgaaacttttttgagtaataaaaatgaaaagacgctgtaaaaaaaaaaaaaaaaaaattcgaaatagtctcgctctctctctcgcaagagggggggtgaaaaagtggagaacggccagatactaaagagaagaaacccgaagccaagaagggtggatgcggggggcacgggtgcacacaggggtaccctcaaagctaaaaagcccaagaggggaagccccatggagccgcaaccctgtcctggtcagaggactgggaggtatccccgatctgccatgtatccaagaaggcatgtcacagaggaagtactcaggcgtaaatccagggtggaacaccgacacggagggaaggttctcgcaactgtaccaaaacccggtgcgcgtgacacgaccgctggacccgggggggtaacttcgcaaatggctagatttatccactgaaaatggctcgaagctgttgacccggaaaaacctagcacgcgtgaaaaggcggccgatacccggacatggaatctccggagcaggcaaagggggtccgaacaggagggaaatg

SEQ ID NO: 293912 - DNA, 761 bp, Homo sapiens
  misc_feature (566)..(566): n is a, c, g, or t
  misc_feature (575)..(575): n is a, c, g, or t
  misc_feature (580)..(580): n is a, c, g, or t
  misc_feature (584)..(584): n is a, c, g, or t
  misc_feature (597)..(597): n is a, c, g, or t
  misc_feature (602)..(602): n is a, c, g, or t
  misc_feature (605)..(605): n is a, c, g, or t
  misc_feature (610)..(610): n is a, c, g, or t
  misc_feature (613)..(613): n is a, c, g, or t
  misc_feature (619)..(619): n is a, c, g, or t
  misc_feature (621)..(621): n is a, c, g, or t
  misc_feature (623)..(623): n is a, c, g, or t
  misc_feature (631)..(631): n is a, c, g, or t
  misc_feature (642)..(642): n is a, c, g, or t
  misc_feature (645)..(645): n is a, c, g, or t
  misc_feature (653)..(654): n is a, c, g, or t
  misc_feature (665)..(665): n is a, c, g, or t
  misc_feature (670)..(671): n is a, c, g, or t
  misc_feature (675)..(675): n is a, c, g, or t
  misc_feature (682)..(682): n is a, c, g, or t
  misc_feature (684)..(684): n is a, c, g, or t
  misc_feature (692)..(692): n is a, c, g, or t
  misc_feature (723)..(724): n is a, c, g, or t
  misc_feature (738)..(738): n is a, c, g, or t
  misc_feature (741)..(741): n is a, c, g, or t
  misc_feature (745)..(745): n is a, c, g, or t
  misc_feature (747)..(747): n is a, c, g, or t
  misc_feature (754)..(754): n is a, c, g, or t
tttgatccccctttgaaacgttccgcgcgcctttgagatgaccactccgaaatctcggccattatggccggggctcttccggggacgttgtctgcaggcactcagaatggtccagcgtttgacataccgacgtaggctttcctacaatacagcctctaacaaaactaggctgtcccgaacccctggtaatagaattgtttacctttataccaagaaggttgggaaagcaccaaaatctgcatgtggtgtgtgcccaggcagacttcgaggggttcgtgctgtaagacctaaagttcttatgagattgtccaaaacaaagaaacatgtcagcagggcctatggtggttccatgtgtgctaaatgtgttcgtgacaggatcaagcgtgctttccttatcgaggagcagaaaatcgttgtgaaagtgttgaaggcacaagcacagagtcagaaagctaaataaaaaaatgaaacttttttgagtaataaaaatgaaaagacgctgtaaaaaaaaaaaaaaaaaaattgtggcgcggcgcgcgcctccgggccctcggagaaaggttttnataaacccnttcgngtgngggccgccggggncccangtnagggnaangtagancntngggccaanacggtggtccncanagggaganncccggggccangagannaggnggcgggngnttctcccncccaaatataaaaaaaggcgccggggggggnnaaccccgagagcgngtntctntngaacaanatcctcc

SEQ ID NO: 293913 - DNA, 648 bp, Homo sapiens
  misc_feature (605)..(605): n is a, c, g, or t
  misc_feature (608)..(609): n is a, c, g, or t
  misc_feature (613)..(613): n is a, c, g, or t
  misc_feature (617)..(618): n is a, c, g, or t
  misc_feature (631)..(631): n is a, c, g, or t
  misc_feature (636)..(636): n is a, c, g, or t
tttgatccccctttgaaacgttccgcgcgcctttgagatgaccactccgaaatctcggccattatggccggggctcttccggggacgttgtctgcaggcactcagaatggtccagcgtttgacataccgacgtaggctttcctacaatacagcctctaacaaaactaggctgtcccgaacccctggtaatagaattgtttacctttataccaagaaggttgggaaagcaccaaaatctgcatgtggtgtgtgcccaggcagacttcgaggggttcgtgctgtaagacctaaagttcttatgagattgtccaaaacaaagaaacatgtcagcagggcctatggtggttccatgtgtgctaaatgtgttcgtgacaggatcaagcgtgctttccttatcgaggagcagaaaatcgttgtgaaagtgttgaaggcacaagcacagagtcagaaagctaaataaaaaaatgaaacttttttgagtaataaaaatgaaaagacgctgtaaaaaaaaaaaaaaaaaaaaaaaaaaaaaaaaaaaaaaaaaaaaaaaaaacaaaaaaaaaaaaggggggggggcgctaaaaattctccccggggggggcgcncanntttngggnnccccgtttttttntaaangggggggcccca

SEQ ID NO: 293914 - DNA, 1020 bp, Homo sapiens
tttgatccccctttgaaacgttccgcgcgcctttgagatgaccactccgaaatctcggccattatggccggggctcttccggggacgttgtctgcaggcactcagaatggtccagcgtttgacataccgacgtaggctttcctacaatacagcctctaacaaaactaggctgtcccgaacccctggtaatagaattgtttacctttataccaagaaggttgggaaagcaccaaaatctgcatgtggtgtgtgcccaggcagacttcgaggggttcgtgctgtaagacctaaagttcttatgagattgtccaaaacaaagaaacatgtcagcagggcctatggtggttccatgtgtgctaaatgtgttcgtgacaggatcaagcgtgctttccttatcgaggagcagaaaatcgttgtgaaagtgttgaaggcacaagcacagagtcagaaagctaaataaaaaaatgaaacttttttgagtaataaaaatgaaaagacgctgtaaaaaaaaaaaaaaaaaaaaaaaaaaaaaaaaaaaaaaaaaacaaaaaaaaaaaaaaaaaaaaaaaaaaaaaaacaaaaaaaaaaaaaaaaaaaaaaaaaaaaaaaaaaaattttggggggggcccgggccccaaattccccttttggggggcgttttaaaaatcaatgggccgttttttaaaaacttaggattgggaaaaacctggggttacccaaattaattgccttggaaaaaaatccctttttcccaagtggggttaatcgaaaaagggcccgaccaattggcttttccaaaaattggcccaccttaaagggaaatggcaaatttgaagggttaaatttttggtaaaaatcggcgtaaaattttggtaaaacaccttattttttaaccaattgggccaaattgggaaaattcctttttaatcaaaaaaattcccccaaaatggggtaaatggttttccacttttggaacaaagacccctttttaaaaaacgtggcttcaaaccttaaggggga

SEQ ID NO: 293915 - DNA, 1252 bp, Homo sapiens
tttgatccccctttgaaacgttccgcgcgcctttgagatgaccactccgaaatctcggccattatggccggggctcttccggggacgttgtctgcaggcactcagaatggtccagcgtttgacataccgacgtaggctttcctacaatacagcctctaacaaaactaggctgtcccgaacccctggtaatagaattgtttacctttataccaagaaggttgggaaagcaccaaaatctgcatgtggtgtgtgcccaggcagacttcgaggggttcgtgctgtaagacctaaagttcttatgagattgtccaaaacaaagaaacatgtcagcagggcctatggtggttccatgtgtgctaaatgtgttcgtgacaggatcaagcgtgctttccttatcgaggagcagaaaatcgttgtgaaagtgttgaaggcacaagcacagagtcagaaagctaaataaaaaaatgaaacttttttgagtaataaaaatgaaaagacgctgtagtccaatagaaaaagttggtgtgctggagctacctcacctcagcttgagagagccagttgtgtgcatctctttccagttttgcatccagtgacgtctgcttggcatcttgagattgttatggtgagagtatttacacctcagcaaatgctgcaaaatcctgttttcccccagagagctggaggttaaatactaccagcacatccctagatactactcaagttacagtatatgatcactaatatagtatgctcttggtaccaggagctctgatatatatctggtacatgtttgataatgacttgattgttattataagtacttattaatacttcgattctgtaaagagtttagggtttgattttataaaatccaaaatgagccttttattgaatccagttctctatgtgaccagttctctgtatgaatggaagggaaaagaattaaaaatcttgcaaaggggaaagttccatcttcttaaaaactagatgtggtaaacaactattctaaaccaggagtagaaaagctaacactatctggctggacacggtggctcacacctgtaatcccagcactttgggaggccaaggtgggtggatcatgaggtcaggagatggagaccatcctagctaacacagtgaaaccccgtctctactaaaaatacaaaaaattagccgggcatggtggcaggcgcctgtagtcacagctacccggaggctgaggcagaagaatggcgtgaacctgggaggt

SEQ ID NO: 293916 - DNA, 506 bp, Homo sapiens
ccctagaggatccccgcatgtttacgacgacatatgtggtggtcaaacatgcgcgtgtttcacgacgacgtatgtcgtcgtcaaacatgcccacgacgtacacatttagcacacatggaaccaccataccgacgtaggctttcctacaatacagcctctaacaaaactaggctgtcccgaacccctggtaatagaattgtttacctttataccaagaaggttgggaaagcaccaaaatctgcatgtggtgtgtgcccaggcagacttcgaggggttcgtgctgtaagacctaaagttcttatgagattgtccaaaacaaagaaacatgtcagcagggcctatggtggttccatgtgtgctaaatgtgttcgtgacaggatcaagcgtgctttccttatcgaggagcagaaaatcgttgtgaaagtgttgaaggcacaagcacagagtcagaaagctaaataaaaaaatgaaacttttttgagtaataaaaatgaaaagacgctgta

SEQ ID NO: 293917 - DNA, 1137 bp, Homo sapiens
  misc_feature (556)..(556): n is a, c, g, or t
  misc_feature (610)..(610): n is a, c, g, or t
  misc_feature (644)..(644): n is a, c, g, or t
  misc_feature (676)..(676): n is a, c, g, or t
tttgatccccctttgaaacgttccgcgcgcctttgagatgaccactccgaaatctcggccattatggccggggctcttccggggacgttgtctgcaggcactcagaatggtccagcgtttgacataccgacgtaggctttcctacaatacagcctctaacaaaactaggctgtcccgaacccctggtaatagaattgtttacctttataccaagaaggttgggaaagcaccaaaatctgcatgtggtgtgtgcccaggcagacttcgaggggttcgtgctgtaagacctaaagttcttatgagattgtccaaaacaaagaaacatgtcagcagggcctatggtggttccatgtgtgctaaatgtgttcgtgacaggatcaagcgtgctttccttatcgaggagcagaaaatcgttgtgaaagtgttgaaggcacaagcacagagtcagaaagctaaataaaaaaatgaaacttttttgagtaataaaaatgaaaagacgctgtaaaaaaaacaaaaaaaaaaaaaaaaaaaaaaaaaaaaaaacccgggggctttntttgggggggggggaaaaaggggtattgagaatgggcgcccgtggcgccaaaangctgtgtttcccgtggacccagttttccttggtnccaagcggggcgaaatctgcgcgggtcccccntatagagggagcccggaaataaatttccggaataacccagggttaccctgcttttataaatctacgcggcaaacacacgaggacacaccgactaacgagacagactctgtaacgtgaacacacaaggacatactaggcaacaacactaagcagcaagagaaaaaaatgggagcgataccaaaaaaaagaaaacacgcgcgacacaagaaggagtgattatggtgagcgaccagaaacaaagcaaaaaacacataaaccgaaagaaaaaggggccaaacaccaacgcaagatacacaaaaaaagcgacaacacgaaggccaccaagaaacagcgccaacaagtaacagagccgtgtgagccacgcaaaatacccgagcaggaaactcgacgaggagacaaggggagaaagaagagatccgggacgacaccaaacagcaaggaaagagcaaagaaaaacacgg

SEQ ID NO: 293918 - DNA, 1121 bp, Homo sapiens
  misc_feature (540)..(540): n is a, c, g, or t
  misc_feature (594)..(594): n is a, c, g, or t
  misc_feature (628)..(628): n is a, c, g, or t
  misc_feature (660)..(660): n is a, c, g, or t
tttgatccccctttgaaacgttccgcgcgcctttgagatgaccactccgaaatctcggccattatggccggggctcttccggggacgttgtctgcaggcactcagaatggtccagcgtttgacataccgacgtaggctttcctacaatacagcctctaacaaaactaggctgtcccgaacccctggtaatagaattgtttacctttataccaagaaggttgggaaagcaccaaaatctgcatgtggtgtgtgcccaggcagacttcgaggggttcgtgctgtaagacctaaagttcttatgagattgtccaaaacaaagaaacatgtcagcagggcctatggtggttccatgtgtgctaaatgtgttcgtgacaggatcaagcgtgctttccttatcgaggagcagaaaatcgttgtgaaagtgttgaaggcacaagcacagagtcagaaagctaaataaaaaaatgaaacttttttgagtaataaaaatgaaaagacgctgtaaacaaaaaaaaaaaaaaaaaaaacccgggggctttntttgggggggggggaaaaaggggtattgagaatgggcgcccgtggcgccaaaangctgtgtttcccgtggacccagttttccttggtnccaagcggggcgaaatctgcgcgggtcccccntatagagggagcccggaaataaatttccggaataacccagggttaccctgcttttataaatctacgcggcaaacacacgaggacacaccgactaacgagacagactctgtaacgtgaacacacaaggacatactaggcaacaacactaagcagcaagagaaaaaaatgggagcgataccaaaaaaaagaaaacacgcgcgacacaagaaggagtgattatggtgagcgaccagaaacaaagcaaaaaacacataaaccgaaagaaaaaggggccaaacaccaacgcaagatacacaaaaaaagcgacaacacgaaggccaccaagaaacagcgccaacaagtaacagagccgtgtgagccacgcaaaatacccgagcaggaaactcgacgaggagacaaggggagaaagaagagatccgggacgacaccaaacagcaaggaaagagcaaagaaaaacacgg

SEQ ID NO: 293919 - DNA, 894 bp, Homo sapiens
tttgatccccctttgaaacgttccgcgcgcctttgagatgaccactccgaaatctcggccattatggccggggctcttccggggacgttgtctgcaggcactcagaatggtccagcgtttgacataccgacgtaggctttcctacaatacagcctctaacaaaactaggctgtcccgaacccctggtaatagaattgtttacctttataccaagaaggttgggaaagcaccaaaatctgcatgtggtgtgtgcccaggcagacttcgaggggttcgtgctgtaagacctaaagttcttatgagattgtccaaaacaaagaaacatgtcagcagggcctatggtggttccatgtgtgctaaatgtgttcgtgacaggatcaagcgtgctttccttatcgaggagcagaaaatcgttgtgaaagtgttgaaggcacaagcacagagtcagaaagctaaataaaaaaatgaaacttttttgagtaataaaaatgaaaagacgctgtagtccaatagaaaaagttggtgtgctggagctacctcacctcagcttgagagagccagttgtgtgcatctctttccagttttgcatccagtgacgtctgcttggcatcttgagattgttatggtgagagtatttacacctcagcaaatgctgcaaaatcctgttttcccccagagagctggaggttaaatactaccagcacatccctagatactactcaagttacagtatatgatcactaatatagtatgctcttggtaccaggagctctgatatatatctggtacatgtttgataatgacttgattgttattataagtacttattaatacttcgattctgtaaagagtttagggtttgattttataaaatccaaaatgagccttttattg

SEQ ID NO: 293920 - DNA, 1128 bp, Homo sapiens
  misc_feature (547)..(547): n is a, c, g, or t
  misc_feature (601)..(601): n is a, c, g, or t
  misc_feature (635)..(635): n is a, c, g, or t
  misc_feature (667)..(667): n is a, c, g, or t
tttgatccccctttgaaacgttccgcgcgcctttgagatgaccactccgaaatctcggccattatggccggggctcttccggggacgttgtctgcaggcactcagaatggtccagcgtttgacataccgacgtaggctttcctacaatacagcctctaacaaaactaggctgtcccgaacccctggtaatagaattgtttacctttataccaagaaggttgggaaagcaccaaaatctgcatgtggtgtgtgcccaggcagacttcgaggggttcgtgctgtaagacctaaagttcttatgagattgtccaaaacaaagaaacatgtcagcagggcctatggtggttccatgtgtgctaaatgtgttcgtgacaggatcaagcgtgctttccttatcgaggagcagaaaatcgttgtgaaagtgttgaaggcacaagcacagagtcagaaagctaaataaaaaaatgaaacttttttgagtaataaaaatgaaaagacgctgtaaaaaaaaaaaaaaaacaaaaaaaaaaaaaacccgggggctttntttgggggggggggaaaaaggggtattgagaatgggcgcccgtggcgccaaaangctgtgtttcccgtggacccagttttccttggtnccaagcggggcgaaatctgcgcgggtcccccntatagagggagcccggaaataaatttccggaataacccagggttaccctgcttttataaatctacgcggcaaacacacgaggacacaccgactaacgagacagactctgtaacgtgaacacacaaggacatactaggcaacaacactaagcagcaagagaaaaaaatgggagcgataccaaaaaaaagaaaacacgcgcgacacaagaaggagtgattatggtgagcgaccagaaacaaagcaaaaaacacataaaccgaaagaaaaaggggccaaacaccaacgcaagatacacaaaaaaagcgacaacacgaaggccaccaagaaacagcgccaacaagtaacagagccgtgtgagccacgcaaaatacccgagcaggaaactcgacgaggagacaaggggagaaagaagagatccgggacgacaccaaacagcaaggaaagagcaaagaaaaacacgg

SEQ ID NO: 293921 - DNA, 546 bp, Homo sapiens
  misc_feature (543)..(543): n is a, c, g, or t
  misc_feature (545)..(545): n is a, c, g, or t
tttgatccccctttgaaacgttccgcgcgcctttgagatgaccactccgaaatctcggccattatggccggggctcttccggggacgttgtctgcaggcactcagaatggtccagcgtttgacataccgacgtaggctttcctacaatacagcctctaacaaaactaggctgtcccgaacccctggtaatagaattgtttacctttataccaagaaggttgggaaagcaccaaaatctgcatgtggtgtgtgcccaggcagacttcgaggggttcgtgctgtaagacctaaagttcttatgagattgtccaaaacaaagaaacatgtcagcagggcctatggtggttccatgtgtgctaaatgtgttcgtgacaggatcaagcgtgctttccttatcgaggagcagaaaatcgttgtgaaagtgttgaaggcacaagcacagagtcagaaagctaaataaaaaaatgaaacttttttgagtaataaaaatgaaaagacgctgtaaaaaaaaaagtcgaccggccggaatttagtagtagtagngna

SEQ ID NO: 293922 - DNA, 529 bp, Homo sapiens
tttgatccccctttgaaacgttccgcgcgcctttgagatgaccactccgaaatctcggccattatggccggggctcttccggggacgttgtctgcaggcactcagaatggtccagcgtttgacataccgacgtaggctttcctacaatacagcctctaacaaaactaggctgtcccgaacccctggtaatagaattgtttacctttataccaagaaggttgggaaagcaccaaaatctgcatgtggtgtgtgcccaggcagacttcgaggggttcgtgctgtaagacctaaagttcttatgagattgtccaaaacaaagaaacatgtcagcagggcctatggtggttccatgtgtgctaaatgtgttcgtgacaggatcaagcgtgctttccttatcgaggagcagaaaatcgttgtgaaagtgttgaaggcacaagcacagagtcagaaagctaaataaaaaaatgaaacttttttgagtaataaaaatgaaaagacgctgtactgtgtatgactttttttttttctg

SEQ ID NO: 293923 - DNA, 833 bp, Homo sapiens
  misc_feature (540)..(540): n is a, c, g, or t
  misc_feature (543)..(544): n is a, c, g, or t
  misc_feature (547)..(547): n is a, c, g, or t
  misc_feature (557)..(557): n is a, c, g, or t
  misc_feature (566)..(566): n is a, c, g, or t
  misc_feature (583)..(583): n is a, c, g, or t
  misc_feature (627)..(628): n is a, c, g, or t
  misc_feature (631)..(631): n is a, c, g, or t
  misc_feature (642)..(642): n is a, c, g, or t
  misc_feature (662)..(662): n is a, c, g, or t
  misc_feature (669)..(669): n is a, c, g, or t
  misc_feature (693)..(693): n is a, c, g, or t
  misc_feature (716)..(718): n is a, c, g, or t
  misc_feature (723)..(723): n is a, c, g, or t
  misc_feature (726)..(727): n is a, c, g, or t
  misc_feature (734)..(734): n is a, c, g, or t
  misc_feature (736)..(736): n is a, c, g, or t
  misc_feature (740)..(740): n is a, c, g, or t
  misc_feature (753)..(753): n is a, c, g, or t
tttgatccccctttgaaacgttccgcgcgcctttgagatgaccactccgaaatctcggccattatggccggggctcttccggggacgttgtctgcaggcactcagaatggtccagcgtttgacataccgacgtaggctttcctacaatacagcctctaacaaaactaggctgtcccgaacccctggtaatagaattgtttacctttataccaagaaggttgggaaagcaccaaaatctgcatgtggtgtgtgcccaggcagacttcgaggggttcgtgctgtaagacctaaagttcttatgagattgtccaaaacaaagaaacatgtcagcagggcctatggtggttccatgtgtgctaaatgtgttcgtgacaggatcaagcgtgctttccttatcgaggagcagaaaatcgttgtgaaagtgttgaaggcacaagcacagagtcagaaagctaaataaaaaaatgaaacttttttgagtaataaaaatgaaaagacgctgtaaaaaaaaaaaaaaacaactgagactagttctctccnganntcnccgcctcggngggctgggntcggcggtgggagcttnacccctactgggggtcccgctgctggcagcgctggaaactgggnnggncggcatgggtnggtctcaggatttgttccgngccttgnggagatcgctgtcaagggaagtgnaagagccgttggccggaccattnnnggacnatnntactacncncgcngtacagactgggnggcacctgtcggagaaaaatgtgaaccgcataaaggatgcctgagcggttcccgaggagcggttagaagaaccccagggg

SEQ ID NO: 293924 - DNA, 610 bp, Homo sapiens
  misc_feature (558)..(559): n is a, c, g, or t
tttgatccccctttgaaacgttccgcgcgcctttgagatgaccactccgaaatctcggccattatggccggggctcttccggggacgttgtctgcaggcactcagaatggtccagcgtttgacataccgacgtaggctttcctacaatacagcctctaacaaaactaggctgtcccgaacccctggtaatagaattgtttacctttataccaagaaggttgggaaagcaccaaaatctgcatgtggtgtgtgcccaggcagacttcgaggggttcgtgctgtaagacctaaagttcttatgagattgtccaaaacaaagaaacatgtcagcagggcctatggtggttccatgtgtgctaaatgtgttcgtgacaggatcaagcgtgctttccttatcgaggagcagaaaatcgttgtgaaagtgttgaaggcacaagcacagagtcagaaagctaaataaaaaaatgaaacttttttgagtaataaaaatgaaaagacgctgtacataccgacgtaggctttcctacatacagcctctaacaaactaggctgtcccannccctggtaatagaattgtttacctttataccagaaggttgggaagcaccaa

SEQ ID NO: 293925 - DNA, 661 bp, Homo sapiens
  misc_feature (618)..(618): n is a, c, g, or t
  misc_feature (621)..(622): n is a, c, g, or t
  misc_feature (626)..(626): n is a, c, g, or t
  misc_feature (630)..(631): n is a, c, g, or t
  misc_feature (644)..(644): n is a, c, g, or t
  misc_feature (649)..(649): n is a, c, g, or t
tttgatccccctttgaaacgttccgcgcgcctttgagatgaccactccgaaatctcggccattatggccggggctcttccggggacgttgtctgcaggcactcagaatggtccagcgtttgacataccgacgtaggctttcctacaatacagcctctaacaaaactaggctgtcccgaacccctggtaatagaattgtttacctttataccaagaaggttgggaaagcaccaaaatctgcatgtggtgtgtgcccaggcagacttcgaggggttcgtgctgtaagacctaaagttcttatgagattgtccaaaacaaagaaacatgtcagcagggcctatggtggttccatgtgtgctaaatgtgttcgtgacaggatcaagcgtgctttccttatcgaggagcagaaaatcgttgtgaaagtgttgaaggcacaagcacagagtcagaaagctaaataaaaaaatgaaacttttttgagtaataaaaatgaaaagacgctgtaaaaaaaaaaaaacaaaataaaaataaaaaaattttatcaaaaaaaaaaaaaaaaaaaaaaaaaaaaaaaaaaattggggggggggcgctaaaaattctccccggggggggcgcncanntttngggnnccccgtttttttntaaangggggggcccca

SEQ ID NO: 293926 - DNA, 668 bp, Homo sapiens
tttgatccccctttgaaacgttccgcgcgcctttgagatgaccactccgaaatctcggccattatggccggggctcttccggggacgttgtctgcaggcactcagaatggtccagcgtttgacataccgacgtaggctttcctacaatacagcctctaacaaaactaggctgtcccgaacccctggtaatagaattgtttacctttataccaagaaggttgggaaagcaccaaaatctgcatgtggtgtgtgcccaggcagacttcgaggggttcgtgctgtaagacctaaagttcttatgagattgtccaaaacaaagaaacatgtcagcagggcctatggtggttccatgtgtgctaaatgtgttcgtgacaggatcaagcgtgctttccttatcgaggagcagaaaatcgttgtgaaagtgttgaaggcacaagcacagagtcagaaagctaaataaaaaaatgaaacttttttgagtaataaaaatgaaaagacgctgtacctatatttatatttttatattatatattttattatttctataattttcctatatcttcataacccttatatttattttctcttactctacattctatcatttactcattattattacttttatatatcttatattcatttattttcttcttctcttcccttcc

SEQ ID NO: 293927 - DNA, 546 bp, Homo sapiens
tttgatccccctttgaaacgttccgcgcgcctttgagatgaccactccgaaatctcggccattatggccggggctcttccggggacgttgtctgcaggcactcagaatggtccagcgtttgacataccgacgtaggctttcctacaatacagcctctaacaaaactaggctgtcccgaacccctggtaatagaattgtttacctttataccaagaaggttgggaaagcaccaaaatctgcatgtggtgtgtgcccaggcagacttcgaggggttcgtgctgtaagacctaaagttcttatgagattgtccaaaacaaagaaacatgtcagcagggcctatggtggttccatgtgtgctaaatgtgttcgtgacaggatcaagcgtgctttccttatcgaggagcagaaaatcgttgtgaaagtgttgaaggcacaagcacagagtcagaaagctaaataaaaaaatgaaacttttttgagtaataaaaatgaaaagacgctgtaccaaataccacctcttaatttcctttctctaacacttctact

SEQ ID NO: 293928 - DNA, 540 bp, Homo sapiens
tttgatccccctttgaaacgttccgcgcgcctttgagatgaccactccgaaatctcggccattatggccggggctcttccggggacgttgtctgcaggcactcagaatggtccagcgtttgacataccgacgtaggctttcctacaatacagcctctaacaaaactaggctgtcccgaacccctggtaatagaattgtttacctttataccaagaaggttgggaaagcaccaaaatctgcatgtggtgtgtgcccaggcagacttcgaggggttcgtgctgtaagacctaaagttcttatgagattgtccaaaacaaagaaacatgtcagcagggcctatggtggttccatgtgtgctaaatgtgttcgtgacaggatcaagcgtgctttccttatcgaggagcagaaaatcgttgtgaaagtgttgaaggcacaagcacagagtcagaaagctaaataaaaaaatgaaacttttttgagtaataaaaatgaaaagacgctgtaaaaaaaaaaaagtcgacgccgcaatagtatagtagc

SEQ ID NO: 293929 - DNA, 573 bp, Homo sapiens
  misc_feature (530)..(530): n is a, c, g, or t
  misc_feature (532)..(533): n is a, c, g, or t
  misc_feature (535)..(536): n is a, c, g, or t
tttgatccccctttgaaacgttccgcgcgcctttgagatgaccactccgaaatctcggccattatggccggggctcttccggggacgttgtctgcaggcactcagaatggtccagcgtttgacataccgacgtaggctttcctacaatacagcctctaacaaaactaggctgtcccgaacccctggtaatagaattgtttacctttataccaagaaggttgggaaagcaccaaaatctgcatgtggtgtgtgcccaggcagacttcgaggggttcgtgctgtaagacctaaagttcttatgagattgtccaaaacaaagaaacatgtcagcagggcctatggtggttccatgtgtgctaaatgtgttcgtgacaggatcaagcgtgctttccttatcgaggagcagaaaatcgttgtgaaagtgttgaaggcacaagcacagagtcagaaagctaaataaaaaaatgaaacttttttgagtaataaaaatgaaaagacgctgtattttcatttttattactcaaaaaagntnnanntgcgtatttagctttctgactctgtgcttgtcgacgc

SEQ ID NO: 293930 - DNA, 1168 bp, Homo sapiens
  misc_feature (587)..(587): n is a, c, g, or t
  misc_feature (641)..(641): n is a, c, g, or t
  misc_feature (675)..(675): n is a, c, g, or t
  misc_feature (707)..(707): n is a, c, g, or t
cctcttccggggacgttgtctgcaggtatggatgttgttctcttttccctgtctttatttccttaccaatcggctgccatccgaggagctgaggaagcctagagctctcagaagcagtcctttgagctggtgtaggggcactcagaatggtccagcgtttgacataccgacgtaggctttcctacaatacagcctctaacaaaactaggctgtcccgaacccctggtaatagaattgtttacctttataccaagaaggttgggaaagcaccaaaatctgcatgtggtgtgtgcccaggcagacttcgaggggttcgtgctgtaagacctaaagttcttatgagattgtccaaaacaaagaaacatgtcagcagggcctatggtggttccatgtgtgctaaatgtgttcgtgacaggatcaagcgtgctttccttatcgaggagcagaaaatcgttgtgaaagtgttgaaggcacaagcacagagtcagaaagctaaataaaaaaatgaaacttttttgagtaataaaaatgaaaagacgctgtaaaaaaaaaaaaaaaacaaaaaaaaaaaaaacccgggggctttntttgggggggggggaaaaaggggtattgagaatgggcgcccgtggcgccaaaangctgtgtttcccgtggacccagttttccttggtnccaagcggggcgaaatctgcgcgggtcccccntatagagggagcccggaaataaatttccggaataacccagggttaccctgcttttataaatctacgcggcaaacacacgaggacacaccgactaacgagacagactctgtaacgtgaacacacaaggacatactaggcaacaacactaagcagcaagagaaaaaaatgggagcgataccaaaaaaaagaaaacacgcgcgacacaagaaggagtgattatggtgagcgaccagaaacaaagcaaaaaacacataaaccgaaagaaaaaggggccaaacaccaacgcaagatacacaaaaaaagcgacaacacgaaggccaccaagaaacagcgccaacaagtaacagagccgtgtgagccacgcaaaatacccgagcaggaaactcgacgaggagacaaggggagaaagaagagatccgggacgacaccaaacagcaaggaaagagcaaagaaaaacacgg

SEQ ID NO: 293931 - DNA, 934 bp, Homo sapiens
cctcttccggggacgttgtctgcaggtatggatgttgttctcttttccctgtctttatttccttaccaatcggctgccatccgaggagctgaggaagcctagagctctcagaagcagtcctttgagctggtgtaggggcactcagaatggtccagcgtttgacataccgacgtaggctttcctacaatacagcctctaacaaaactaggctgtcccgaacccctggtaatagaattgtttacctttataccaagaaggttgggaaagcaccaaaatctgcatgtggtgtgtgcccaggcagacttcgaggggttcgtgctgtaagacctaaagttcttatgagattgtccaaaacaaagaaacatgtcagcagggcctatggtggttccatgtgtgctaaatgtgttcgtgacaggatcaagcgtgctttccttatcgaggagcagaaaatcgttgtgaaagtgttgaaggcacaagcacagagtcagaaagctaaataaaaaaatgaaacttttttgagtaataaaaatgaaaagacgctgtagtccaatagaaaaagttggtgtgctggagctacctcacctcagcttgagagagccagttgtgtgcatctctttccagttttgcatccagtgacgtctgcttggcatcttgagattgttatggtgagagtatttacacctcagcaaatgctgcaaaatcctgttttcccccagagagctggaggttaaatactaccagcacatccctagatactactcaagttacagtatatgatcactaatatagtatgctcttggtaccaggagctctgatatatatctggtacatgtttgataatgacttgattgttattataagtacttattaatacttcgattctgtaaagagtttagggtttgattttataaaatccaaaatgagccttttattg

SEQ ID NO: 293932 - DNA, 1525 bp, Homo sapiens
cctcttccggggacgttgtctgcaggtatggatgttgttctcttttccctgtctttatttccttaccaatcggctgccatccgaggagctgaggaagcctagagctctcagaagcagtcctttgagctggtgtaggggtaaggggcacaacagggaggttggtggtgaggaagttccttactttgatctttggaaatcccttgttcctggtggcacctccaaagccgtgagtagccacagctcaccacccgggactttgctgcattccaagtgtagcgtttggagactaacgagttgtggtttggcggtttgagtctggaaaatcgccaaacgttttcatattttacacccacgttttcacagcacgcctgcactcagaatggtccagcgtttgacataccgacgtaggctttcctacaatacagcctctaacaaaactaggctgtcccgaacccctggtaatagaattgtttacctttataccaagaaggttgggaaagcaccaaaatctgcatgtggtgtgtgcccaggcagacttcgaggggttcgtgctgtaagacctaaagttcttatgagattgtccaaaacaaagaaacatgtcagcagggcctatggtggttccatgtgtgctaaatgtgttcgtgacaggatcaagcgtgctttccttatcgaggagcagaaaatcgttgtgaaagtgttgaaggcacaagcacagagtcagaaagctaaataaaaaaatgaaacttttttgagtaataaaaatgaaaagacgctgtagtccaatagaaaaagttggtgtgctggagctacctcacctcagcttgagagagccagttgtgtgcatctctttccagttttgcatccagtgacgtctgcttggcatcttgagattgttatggtgagagtatttacacctcagcaaatgctgcaaaatcctgttttcccccagagagctggaggttaaatactaccagcacatccctagatactactcaagttacagtatatgatcactaatatagtatgctcttggtaccaggagctctgatatatatctggtacatgtttgataatgacttgattgttattataagtacttattaatacttcgattctgtaaagagtttagggtttgattttataaaatccaaaatgagccttttattgaatccagttctctatgtgaccagttctctgtatgaatggaagggaaaagaattaaaaatcttgcaaaggggaaagttccatcttcttaaaaactagatgtggtaaacaactattctaaaccaggagtagaaaagctaacactatctggctggacacggtggctcacacctgtaatcccagcactttgggaggccaaggtgggtggatcatgaggtcaggagatggagaccatcctagctaacacagtgaaaccccgtctctactaaaaatacaaaaaattagccgggcatggtggcaggcgcctgtagtcacagctacccggaggctgaggcagaagaatggcgtgaacctgggaggt

SEQ ID NO: 293933 - DNA, 613 bp, Homo sapiens
  misc_feature (545)..(546): n is a, c, g, or t
cctcttccggggacgttgtctgcaggtatggatgttgttctcttttccctgtctttatttccttaccaatcggctgccatccgaggagctgaggaagcctagagctctcagaagcagtcctttgagctggtgtaggggcactcagaatggtccagcgtttgacataccgacgtaggctttcctacaatacagcctctaacaaaactaggctgtcccgaacccctggtaatagaattgtttacctttataccaagaaggttgggaaagcaccaaaatctgcatgtggtgtgtgcccaggcagacttcgaggggttcgtgctgtaagacctaaagttcttatgagattgtccaaaacaaagaaacatgtcagcagggcctatggtggttccatgtgtgctaaatgtgttcgtgacaggatcaagcgtgctttccttatcgaggagcagaaaatcgttgtgaaagtgttgaaggcacaagcacagagtcagaaagctaaataaaaaaatgaaacttttttgagtaataaaaatgaaaagacgctgtannaaaaaaaaatatctttcactttaaaattaaataattctttctacggccgaatttgggcttacttggc

SEQ ID NO: 293934 - DNA, 785 bp, Homo sapiens
  misc_feature (492)..(492): n is a, c, g, or t
  misc_feature (495)..(496): n is a, c, g, or t
  misc_feature (499)..(499): n is a, c, g, or t
  misc_feature (509)..(509): n is a, c, g, or t
  misc_feature (518)..(518): n is a, c, g, or t
  misc_feature (535)..(535): n is a, c, g, or t
  misc_feature (579)..(580): n is a, c, g, or t
  misc_feature (583)..(583): n is a, c, g, or t
  misc_feature (594)..(594): n is a, c, g, or t
  misc_feature (614)..(614): n is a, c, g, or t
  misc_feature (621)..(621): n is a, c, g, or t
  misc_feature (645)..(645): n is a, c, g, or t
  misc_feature (668)..(670): n is a, c, g, or t
  misc_feature (675)..(675): n is a, c, g, or t
  misc_feature (678)..(679): n is a, c, g, or t
  misc_feature (686)..(686): n is a, c, g, or t
  misc_feature (688)..(688): n is a, c, g, or t
  misc_feature (692)..(692): n is a, c, g, or t
  misc_feature (705)..(705): n is a, c, g, or t
tcgggtacccacacgttacgccttcctctcccggggacgttgtctgcaggcactcagaatggtccagcgtttgacataccgacgtaggctttcctacaatacagcctctaacaaaactaggctgtcccgaacccctggtaatagaattgtttacctttataccaagaaggttgggaaagcaccaaaatctgcatgtggtgtgtgcccaggcagacttcgaggggttcgtgctgtaagacctaaagttcttatgagattgtccaaaacaaagaaacatgtcagcagggcctatggtggttccatgtgtgctaaatgtgttcgtgacaggatcaagcgtgctttccttatcgaggagcagaaaatcgttgtgaaagtgttgaaggcacaagcacagagtcagaaagctaaataaaaaaatgaaacttttttgagtaataaaaatgaaaagacgctgtaaaaaaaaaaaaaaacaactgagactagttctctccnganntcnccgcctcggngggctgggntcggcggtgggagcttnacccctactgggggtcccgctgctggcagcgctggaaactgggnnggncggcatgggtnggtctcaggatttgttccgngccttgnggagatcgctgtcaagggaagtgnaagagccgttggccggaccattnnnggacnatnntactacncncgcngtacagactgggnggcacctgtcggagaaaaatgtgaaccgcataaaggatgcctgagcggttcccgaggagcggttagaagaaccccagggg

SEQ ID NO: 293935 - DNA, 515 bp, Homo sapiens
  misc_feature (472)..(472): n is a, c, g, or t
  misc_feature (474)..(475): n is a, c, g, or t
  misc_feature (477)..(478): n is a, c, g, or t
tttgatccccctttgaaacgttccgcgcgcctttgagatgaccactccgaaatctcggccattatggccggggctcttccggggacgttgtctgcaggcactcagaatggtccagcgtttgacataccgacgtaggctttcctacaatacagcctctaacaaaactaggctgtcccgaacccctggtaatagaattgtttacctttataccaagaaggttgggaaagcaccaaaatctgcatgtggtgtgtgcccaggcagacttcgaggggttcgtgctgtaagacctaaagttcttatgagattgtccaaaacaaagaaacatgtcagcagggcctatggtggttccatgtgtgctaaatgtgttcgtgacaggatcaagcgtgctttccttatcgaggagcagaaaatcgttgtgaaagtgttgaaggcacaagcacagagtcttttcatttttattactcaaaaaagntnnanntgcgtatttagctttctgactctgtgcttgtcgacgc

SEQ ID NO: 293936 - DNA, 531 bp, Homo sapiens
cgctccaagtttttacgctagtatatcctttctcttccatttctccaccagtaataatggcaaaaatgggacaataaactcattcatgataatcaaaccattgtttacttctcgatcctctccagattcgaagagttctgcggcttgctccatttaattttagcaaacattctcttctataatgtgatatcaattcttcatcagcggtaaaagcttaagcttttaccgcatacataccaagaaggttgggaaagcaccaaaatctgcatgtggtgtgtgcccaggcagacttcgaggggttcgtgctgtaagacctaaagttcttatgagattgtccaaaacaaagaaacatgtcagcagggcctatggtggttccatgtgtgctaaatgtgttcgtgacaggatcaagcgtgctttccttatcgaggagcagaaaatcgttgtgaaagtgttgaaggcacaagcacagagtcagaaagctaaataaaaaaatgaaacttttttgagtaataaaaatgaaaagacgctgta

SEQ ID NO: 293937 - DNA, 1131 bp, Homo sapiens
gcggccgcctactactactactactgctcgaattcaagcttctaacgatgtacggggacatgtgtgctaaatgtgttcgtgacagataccaagaaggttgggaaagcaccaaaatctgcatgtggtgtgtgcccaggcagacttcgaggggttcgtgctgtaagacctaaagttcttatgagattgtccaaaacaaagaaacatgtcagcagggcctatggtggttccatgtgtgctaaatgtgttcgtgacaggatcaagcgtgctttccttatcgaggagcagaaaatcgttgtgaaagtgttgaaggcacaagcacagagtcagaaagctaaataaaaaaatgaaacttttttgagtaataaaaatgaaaagacgctgtagtccaatagaaaaagttggtgtgctggagctacctcacctcagcttgagagagccagttgtgtgcatctctttccagttttgcatccagtgacgtctgcttggcatcttgagattgttatggtgagagtatttacacctcagcaaatgctgcaaaatcctgttttcccccagagagctggaggttaaatactaccagcacatccctagatactactcaagttacagtatatgatcactaatatagtatgctcttggtaccaggagctctgatatatatctggtacatgtttgataatgacttgattgttattataagtacttattaatacttcgattctgtaaagagtttagggtttgattttataaaatccaaaatgagccttttattgaatccagttctctatgtgaccagttctctgtatgaatggaagggaaaagaattaaaaatcttgcaaaggggaaagttccatcttcttaaaaactagatgtggtaaacaactattctaaaccaggagtagaaaagctaacactatctggctggacacggtggctcacacctgtaatcccagcactttgggaggccaaggtgggtggatcatgaggtcaggagatggagaccatcctagctaacacagtgaaaccccgtctctactaaaaatacaaaaaattagccgggcatggtggcaggcgcctgtagtcacagctacccggaggctgaggcagaagaatggcgtgaacctgggaggt

SEQ ID NO: 293938 - DNA, 1238 bp, Homo sapiens
  misc_feature (328)..(328): n is a, c, g, or t
  misc_feature (368)..(368): n is a, c, g, or t
  misc_feature (385)..(385): n is a, c, g, or t
tgatgttactctattcttaatttaggcactcagaatggtccagcgtttgacataccgacgtaggctttcctacaatacagcctctaacaaaactaggctgtcccgaacccctggtaatagaattgtttacctttataccaagaaggttgggaaagcaccaaaatctgcatgtggtgtgtgcccaggcagacttcgaggggttcgtgctgtaagacctaaagttcttatgagattgtccaaaacaaagaaacatgtcagcagggcctatggtggttccatgtgtgctaaatgtgttcgtgacagatcaagcgtgctttcctttaatcgnaaggggggggaaaagggggcccccccccaaaaggggggcntaaaataaaacaaacanaaatttttttccccttgtgaaagtgttgaaggcacaagcacagagtcagaaagctaaataaaaaaatgaaacttttttgagtaataaaaatgaaaagacgctgtagtccaatagaaaaagttggtgtgctggagctacctcacctcagcttgagagagccagttgtgtgcatctctttccagttttgcatccagtgacgtctgcttggcatcttgagattgttatggtgagagtatttacacctcagcaaatgctgcaaaatcctgttttcccccagagagctggaggttaaatactaccagcacatccctagatactactcaagttacagtatatgatcactaatatagtatgctcttggtaccaggagctctgatatatatctggtacatgtttgataatgacttgattgttattataagtacttattaatacttcgattctgtaaagagtttagggtttgattttataaaatccaaaatgagccttttattgaatccagttctctatgtgaccagttctctgtatgaatggaagggaaaagaattaaaaatcttgcaaaggggaaagttccatcttcttaaaaactagatgtggtaaacaactattctaaaccaggagtagaaaagctaacactatctggctggacacggtggctcacacctgtaatcccagcactttgggaggccaaggtgggtggatcatgaggtcaggagatggagaccatcctagctaacacagtgaaaccccgtctctactaaaaatacaaaaaattagccgggcatggtggcaggcgcctgtagtcacagctacccggaggctgaggcagaagaatggcgtgaacctgggaggt

SEQ ID NO: 293939 - DNA, 488 bp, Homo sapiens
ccggccgcgtcgacgttgtctgcaggcactcagaatggtccagcgtttgacataccgacgtaggctttcctacaatacagcctctaacaaaactaggctgtcccgaacccctggtaatagaattgtttacctttataccaagaaggttgggaaagcaccaaaatctgcatgtggtgtgtgcccaggcagacttcgagggtcgtgctgtaagacctaaagtctgcatgtggtgtgtgcccaggcagacttcgaggggttcgtgctgtaagacctaaagttcttatgagattgtccaaaacaaagaaacatgtcagcagggcctatggtggttccatgtgtgctaaatgtgttcgtgacaggatcaagcgtgctttccttatcgaggagcagaaaatcgttgtgaaagtgttgaaggcacaagcacagagtcagaaagctaaataaaaaaatgaaacttttttgagtaataaaaatgaaaagacgctgta

SEQ ID NO: 293940 - DNA, 827 bp, Homo sapiens
  misc_feature (117)..(117): n is a, c, g, or t
  misc_feature (798)..(798): n is a, c, g, or t
cactgggtgtgaaacaactaattgtcggtgttaacaaaatggattccactgagccaccctacagccagaagagatatgaggaaatgttaaggaagtcagcacttacattaagaaaantggctacaaccccgacacagtagcatttgtgccaatttctggttggaatggtgacaacatgctggagccaagtgctaacatgccttggttcaagggatggaaagtcacccgtaaggatggcaatgccagtggaaccacgctgcttgaggctctggactgcatcctaccaccaactcgtccaactgacaagcccttgcgcctgcctctccaggatgtctacaaaattggtggtattggtactgttcctgttggccgagtggagactggtgttctcaaacccggtatggtggtcacctttgctccagtcaacgttacaacggaagtaaatctgtcgaaatgcaccatgaagctttgagtgaagctcttccggggacgttgtctgcaggcactcagaatggtccagcgtttgacataccgacgtaggctttcctacaatacagcctctaacaaaactaggctgtcccgaacccctggtaatagaattgtttacctttataccaagaaggttgggaaagcaccaaaatctgcatgtggtgtgtgcccaggcagacttcgaggggttcgtgctgtaagacctaaagttcttatgagattgtccaaaacaaagaaacatgtcagcagggcctatggtggttccatgtgtgctaaatgtgttcgtgacagatcactgcttccttatcnaagaaccaaaaaccctgttaaatttttta

SEQ ID NO: 293941 - DNA, 326 bp, Homo sapiens
  misc_feature (85)..(85): n is a, c, g, or t
atgtggtgtgtgcccaggcagcccctggtaatagaattgtttacctttataccaagggctgcctgggcacacaccacatgcaganttcgaggggttcgtgctgtaagacctaaagttcttatgagattgtccaaaacaaagaaacatgtcagcagggcctatggtggttccatgtgtgctaaatgtgttcgtgacaggatcaagcgtgctttccttatcgaggagcagaaaatcgttgtgaaagtgttgaaggcacaagcacagagtcagaaagctaaataaaaaaatgaaacttttttgagtaataaaaatgaaaagacgctgta

SEQ ID NO: 293942 - DNA, 457 bp, Homo sapiens
ctctacagagttgttggacggaaagaggagagtgggcccacttctctttccggggacgttgtctgcaggcactcagaatggtccagcgtttgacataccgacgtaggctttcctacaatacagcctctaacaaaactaggctgtcccgaacccctggtaatagaattgtttacctttataccaagaaggttgggaaagcaccaaaatctgcatgtggtgtgtgcccaggcagacttcgaggggttcgtgctgtaagacctaaagttcttatgagattgtccgcctgctactgagtaaggggcattcctgttacagaccaaggagaactggagaaagaaagagaaaatcagttcgtggttgcattgtggatgcaaatctgagcgtctcaacttggttattgtaaaaaaaggagagaaggatattcctggactgactgatactacagtgcctcgccgcc

SEQ ID NO: 293943 - DNA, 730 bp, Homo sapiens
gcggccgcctactactactactactgctcgaattcaagcttctaacgatgtacggggacatgtgtgctaaatgtgttcgtgacaggatcaagcgtgctttccttatcgaggagcagaaaatcgttgtgaaagtgttgaaggcacaagcacagagtcagaaagctaaataaaaaaatgaaacttttttgagtaataaaaatgaaaagacgctgtaaaaaaaaaaaaaaaaaaaaaaaaaaaaaaaaaaaaaaaaaacaaaaaaaaaaaaaaaaaaaaaaaaaaaaaaacaaaaaaaaaaaaaaaaaaaaaaaaaaaaaaaaaaaattttggggggggcccgggccccaaattccccttttggggggcgttttaaaaatcaatgggccgttttttaaaaacttaggattgggaaaaacctggggttacccaaattaattgccttggaaaaaaatccctttttcccaagtggggttaatcgaaaaagggcccgaccaattggcttttccaaaaattggcccaccttaaagggaaatggcaaatttgaagggttaaatttttggtaaaaatcggcgtaaaattttggtaaaacaccttattttttaaccaattgggccaaattgggaaaattcctttttaatcaaaaaaattcccccaaaatggggtaaatggttttccacttttggaacaaagacccctttttaaaaaacgtggcttcaaaccttaaggggga

SEQ ID NO: 293944 - DNA, 676 bp, Homo sapiens
gcggccgcctactactactacaaaattcgcggccgcgtcgacggtggttccatgtgtgctaaatgtgttcgtgacaggatcaagcgtgctttccttatcgaggagcagaaaatcgttgtgaaagtgttgaaggcacaagcacagagtcagaaagctaaataaaaaaatgaaacttttttgagtaataaaaatgaaaagacgctgtaaaaaaaaaaaaaaacaactgagactagttctcttcttctctcttctcgactctccgggcccaattatgacgagcgggctcggaaaaaccgagaggagctagacaagttactgggtcctccagcgagtatttggggggagagccacccacagtgggtccccacacagtctggctgagtgttgggagcttgctgagacgacgctcacagagctggagacgtacagtccagtccttgggagatcgacctgggactccatgagaatatctgagggccaagcttgggagaacagcctgagggaggtggatggcccgttacgccctacagtttggagcagctcaaggggatcctggtgccccttgagtcagagctgggcacagacccgggcagagggactgcgccaggcccaggatatgaggccctgttgaacatcagggtcaagctggaaggctgagattcgcacctaccggcgc

SEQ ID NO: 293945 - DNA, 448 bp, Homo sapiens
ttatgttttacgttgggtagttcccttaacgaagttgctcgtatgcatatctgtataaccgatttgctaaataacatcacgatgtttccagaagtgggaagaaagcaggtgccataacccaaagaaacttgtgtaatatcaaaattagtattaaagggtatgcctttacgcaggtggtgctttagggcaagacattgaaccctgatatgtgccaggcattgtgttgggacggatagcccacgtcgtttaatcctaatgacagctgtataaagtagacagaattcccatgttagagataaggaggctagctccttgccctttatattcccagtaaatggcatagctaaggattcgacttcagagctcactttttgtgctctttgtttaaagcggtgtttctccaactgggctcgtggcacttttctggacaccactccaaacaaaatta

SEQ ID NO: 293946 - DNA, 523 bp, Homo sapiens
gcgagtcgagagtagaggaaacccaattcggcccgggcaatgtcagccatctctgttttttaaagggcttattgaaaaatgacatgtatttattcagaaatcttgagttttgtggacaaatttttctgcttctcagagggaagctaaatctttccctagggtggaaagaagagagacttctattcagaatttgattcccagagaatttgaagttgtagaaatgagaatttaaccttgccagaataaaagttattgaggggaaaggaggatttatagaaagtgtaaaaggaatggaatgacttagagtaggtagtccctacattctagaggtgacttttctgctctttaactcaagggtgaagaacctgatacatatttgattgtttttccatgttagacaataggaaaaactgctgaatggctgggtaaagaagcaagaagtgatgtgcaaatataaatcaaaactgggacaagagggcatggctgtgtttttggactgaaagagtatctgtttcaggtgtgg

SEQ ID NO: 293947 - DNA, 882 bp, Homo sapiens
gggggggagcggggaaaacaaaaggagacgaaggacgcatgcgtttggtgagtcccggattctggtgggttcttccgctcaggctgggtgaagcgcttccgggtcgccgccggcagcagcctcccggcgcgatgaagacactgaggctcagagaggttaagtgactcagccaaggtcaaacagctagtaagtggtggagccaggactcaaagccagtctaggagccatgtccactttgttcccctcactcttccctcgtgtgactgagactctgtggtttaatctggatcgaccctgtgtggaagagacagagctgcagcagcaggaacagcagcatcaggcctggctccaaagcatcgcggagaaagacaacaacctggttcctattggcaagccagcctcagagcactatgatgacgaggaagaagaggatgatgaagatgatgaggatagtgaagaggactcagaggatgatgaggatatgcaggacatggacgagatgaatgactacaatgagtcaccggatgatggagaggtcaatgaggtggacatggaaggcaacgaacaggatcaggaccagtggatgatctaggtagacaaggcagggtggcctcagggagattccaggccagcccaaactaccctgcatcccaacccccaacccctgcccacagaaccagctgatggccccagtgcctgaaagtgcccttgggcacctcctcagctgctgccaggatctggtctctttggcccctcccaggccatcagtctgcacttgaaatccccagggcctgaaacctactccaccttcctggccagtacctcaccccttgattgccaggtctggtctaagtttctttaataaagacaaaggagtgattt

SEQ ID NO: 293948 - DNA, 917 bp, Homo sapiens
gggggggagcggggaaaacaaaaggagacgaaggacgcatgcgtttggtgagtcccggattctggtgggttcttccgctcaggctgggtgaagcgcttccgggtcgccgccggcagcagcctcccggcgcgatgaagacactgaggctcagagaggttaagtgactcagccaaggtcaaacagctagtaagtggtggagccaggactcaaagccagtctaggagccatgtccactttgttcccctcactcttccctcgtgtgactgagactctgtggtttaatctggatcgaccctgtgtggaagagacagagctgcagcagcaggaacagcagcatcaggcctggctccaaagcatcgcggagaaagacaacaacctggttcctattggcaagccagcctcagagcactatgatgacgaggaagaagaggatgatgaagatgatgaggatagtgaagaggactcagaggatgatgaggatatgcaggacatggacgagatgaatgactacaatgagtcaccggatgatggagaggtcaatgaggtggacatggaaggcaacgaacaggatcaggaccagtggatgatctaggtagacaaggcagggtggcctcagggagattccaggccagcccaaactaccctgcatcccaacccccaacccctgcccacagaaccagctgatggccccagtgcctgaaagtgcccttgggcacctcctcagctgctgccaggatctggtctctttggcccctcccaggccatcagtctgcacttgaaatccccagggcctgaaacctactccaccttcctggccagtacctcaccccttgattgccaggtctggtctaagtttctttaataaagacaaaggagtgatttccaaaagaaaataaagagaaacgtctccaagcctt

SEQ ID NO: 293949 - DNA, 867 bp, Homo sapiens
gggggggagcggggaaaacaaaaggagacgaaggacgcatgcgtttggtgagtcccggattctggtgggttcttccgctcaggctgggtgaagcgcttccgggtcgccgccggcagcagcctcccggcgcgatgaagacactgaggctcagagaggttaagtgactcagccaaggtcaaacagctagtaagtggtggagccaggactcaaagccagtctaggagccatgtccactttgttcccctcactcttccctcgtgtgactgagactctgtggtttaatctggatcgaccctgtgtggaagagacagagctgcagcagcaggaacagcagcatcaggcctggctccaaagcatcgcggagaaagacaacaacctggttcctattggcaagccagcctcagagcactatgatgacgaggaagaagaggatgatgaagatgatgaggatagtgaagaggactcagaggatgatgaggatatgcaggacatggacgagatgaatgactacaatgagtcaccggatgatggagaggtcaatgaggttcatctctcagtacttcccacctgtggcctgtatcacagccatcccaaacaactgtgcccagaatccatcaagctgtctcattccttcatgccacatgtgtatatgtggctggctttgcccttcccacccccatcgccatctgcctggccaactcagaacttccagattcagttcaaatgttgctctttctccatgaagtcccaggcagaaacaaccaccctatctttcagatttatgaaaggtctctgttagaatttgtagtttcattccccttttattgctcatcaaatgtatttctgatcttggaattggatgaactt

SEQ ID NO: 293950 - DNA, 624 bp, Homo sapiens
gggggggagcggggaaaacaaaaggagacgaaggacgcatgcgtttggtgagtcccggattctggtgggttcttccgctcaggctgggtgaagcgcttccgggtcgccgccggcagcagcctcccggcgcgatgaagacactgaggctcagagaggttaagtgactcagccaaggtcaaacagctagtaagtggtggagccaggactcaaagccagtctaggagccatgtccactttgttcccctcactcttccctcgtgtgactgagactctgtggtttaatctggatcgaccctgtgtggaagagacagagctgcagcagcaggaacagcagcatcaggcctggctccaaagcatcgcggagaaagacaacaacctggttcctattggcaagccagcctcagagcactatgatgacgaggaagaagaggatgatgaagatgatgaggatagtgaagaggactcagaggatgatgaggatatgcaggacatggacgagatgaatgactacaatgagtcaccggatgatggagaggtcaatgaggaggaccgagagcgagcggacagctgctagctggaccctagacagaccccctctaccaaagctctcaatggagccgagcc

SEQ ID NO: 293951 - DNA, 888 bp, Homo sapiens
  misc_feature (26)..(27): n is a, c, g, or t
  misc_feature (860)..(860): n is a, c, g, or t
cggcacgagggagcaccgaaagggcnntggctttgcgacgatgaagacactgaggctcagagaggttaagtgactcagccaaggtcaaacagctagtaagtggtggagccaggactcaaagccagtctaggagccatgtccactttgttcccctcactcttccctcgtgtgactgagactctgtggtttaatctggatcgaccctgtgtggaagagacagagctgcagcagcaggaacagcagcatcaggcctggctccaaagcatcgcggagaaagacaacaacctggttcctattggcaagccagcctcagagcactatgatgacgaggaagaagaggatgatgaagatgatgaggatagtgaagaggactcagaggatgatgaggatatgcaggacatggacgagatgaatgactacaatgagtcaccggatgatggagaggtcaatgaggtggacatggaaggcaacgaacaggatcaggaccagtggatgatctaggtagacaaggcagggtggcctcagggagattccaggccagcccaaactaccctgcatcccaacccccaacccctgcccacagaaccagctgatggccccagtgcctgaaagtgcccttgggcacctcctcagctgctgccaggatctggtctctttggcccctcccaggccatcagtctgcacttgaaatccccagggcctgaaacctactccaccttcctggccagtacctcaccccttgattgccaggtctggtctaagtttctttaataaagacaaaggagtgatttaaaaaaaaaaatgagggttttgcggggcggaaagagttggagggctggataggttctgcccttttggcnaggaatgcgcccaagggggtaatgaacg

SEQ ID NO: 293952 - DNA, 942 bp, Homo sapiens
  misc_feature (942)..(942): n is a, c, g, or t
taattacgcgggttgggaatctgagatacagggaagggcagcggctggccctgggtcggtcagataaattaagacaaaagcaggaccaggcatcgattattttctcctgctcatccctttcacggaggaattctaagccccgacacactgtatgacctaaagccagtctctgcctgtcgctgggcctcagttcgcctgtcctaagtttaattcagattatctggcactcctggtcggctccctcagccgctcaaagctgattgtacccttataatatgaagacactgaggctcagagaggttaagtgactcagccaaggtcaaacagctagtaagtggtggagccaggactcaaagccagtctaggagccatgtccactttgttcccctcactcttccctcgtgtgactgagactctgtggtttaatctggatcgaccctgtgtggaagagacagagctgcagcagcaggaacagcagcatcaggcctggctccaaagcatcgcggagaaagacaacaacctggttcctattggcaagccagcctcagagcactatgatgacgaggaagaagaggatgatgaagatgatgaggatagtgaagaggactcagaggatgatgaggatatgcaggacatggacgagatgaatgactacaatgagtcaccggatgatggagaggtcaatgaggagtccatgggtggactgggagcgacgcacaggatccggaaccgtggtgttctcgctgacacggggggccccggaatcaggccagccaaatacctggttcaaccccacctgtcccagcatgttgccccgctaatgcttgagcccacgggcacatggttttgccccccaaggttgaacgcgggaataactcgggacacctggggggtttacaagagaaaaggcactccccctcgcgttaggttagaaaaagaaan

SEQ ID NO: 293953 - DNA, 985 bp, Homo sapiens
gggggggagcggggaaaacaaaaggagacgaaggacgcatgcgtttggtgagtcccggattctggtgggttcttccgctcaggctgggtgaagcgcttccgggtcgccgccggcagcagcctcccggcgcgatgaagacactgaggcaggataattgcatgaacctgggagaggcagaggttgcagtgagccaagatcatgccattgcactccagcctgggcgacagagcaagactccatctcaaaaataaataaataaataaatagattaaataaataaaaaaatccactgtgcaaaaagggaacacagccttctcctgtagagacaagttttctgagtggggactcagctcccctggggcatcagagcacactactctcagccttgcaggagggagggtgcctctcgcttgttagaacttttctttccttggctgggtgtggtggctcatgcctgtaatcccagcactttaggaggctgaggcgggtagatagctttagaccaggagttcaaggccagcctgggcagcatggcaaagacccatctctacaaaaacataaaaattagctgggtgtggtggccaggtgcctgtagtccacagcttctcaggaggctgaggcaggagaatcgcttgaacctgggaggcagaggttgcagcagagaccaagattgtacccactgggactccaagtaagggtgaccacagtaagaactctcatctacagagaaaaaaaacaagggcggcaacgccaccgacgaggaaggccaacagaaggggagacacaacggcatgaagcgcggaaagacaaaacagctacgagcgaaaccaaagagaggacccaaaaataagacgaaacacgcgaaaacaaatgagacacgagggaccagcggccagcgagcgcagtgagcaagacgaaggagaagcacgcggacaagaacagcaggataacacacgcggaagatcaatagtagacaagaacactg

SEQ ID NO: 293954 - DNA, 979 bp, Homo sapiens
  misc_feature (951)..(951): n is a, c, g, or t
gggggggagcggggaaaacaaaaggagacgaaggacgcatgcgtttggtgagtcccggattctggtgggttcttccgctcaggctgggtgaagcgcttccgggtcgccgccggcagcagcctcccggcgcgatgaagacactgaggctcagagaggttaagtgactcagccaaggtcaaacagctagtaagtggtggagccaggactcaaagccagtctaggagccatgtccactttgttcccctcactcttccctcgtgtgactgagactctgtggtttaatctggatcgaccctgtgtggaagagacagagctgcagcagcaggaacagcagcatcaggcctggctccaaagcatcgcggagaaagacaacaacctggttcctattggcaagccagcctcagagcactatgatgacgaggaagaagaggatgatgaagatgatgaggatagtgaagaggactcagaggatgatgaggatatgcaggacatggacgagatgaatgactacaatgagtcaccggatgatggagaggtcaatgaggtggacatggaaggcaacgaacaggatcaggaccagtggatgatctaggtagacaaggcagggtggcctcagggagattccaggccagcccaaactaccctgcatcccaacccccaacccctgcccacagaaccagctgatggccccagtgcctgaaagtgcccttgggcacctcctcagctgctgccaggatctggtctctttggcccctcccaggccatcagtctgcacttgaaatccccagggcctgaaacctactccaccttcctggccagtacctcaccccttgattgccaggtctggtctaagtttctttaataaagacaaaggagtgatttaaaaaaaaaaatgagggttttgcggggcggaaagagttggagggctggataggttctgcccttttggcnaggaatgcgcccaagggggtaatgaacg

SEQ ID NO: 293955 - DNA, 1026 bp, Homo sapiens
gggggggagcggggaaaacaaaaggagacgaaggacgcatgcgtttggtgagtcccggattctggtgggttcttccgctcaggctgggtgaagcgcttccgggtcgccgccggcagcagcctcccggcgcgatgaagacactgaggctcagagaggttaagtgactcagccaaggtcaaacagctagtaagtggtggagccaggactcaaagccagtctaggagccatgtccactttgttcccctcactcttccctcgtgtgactgagactctgtggtttaatctggatcgaccctgtgtggaagagacagagctgcagcagcaggaacagcagcatcaggcctggctccaaagcatcgcggagaaagacaacaacctggttcctattggcaagccagcctcagagcactatgatgacgaggaagaagaggatgatgaagatgatgaggatagtgaagaggactcagaggatgatgaggatatgcaggacatggacgagatgaatgactacaatgagtcaccggatgatggagaggtcaatgaggtggacatggaaggcaacgaacaggatcaggaccagtggatgatctaggtagacaaggcagggtggcctcagggagattccaggccagcccaaactaccctgcatcccaacccccaacccctgcccacagaaccagctgatggccccagtgcctgaaagtgcccttgggcacctcctcagctgctgccaggatctggtctctttggcccctcccaggccatcagtctgcacttgaaatccccagggcctgaaacctactccaccttcctggccagtacctcaccccttgattgccaggtctggtctaagtttctttaataaagacaaaggagtgatttcacccatgtctattccctatttgttggtggggcccagaggagtccagcatcttcttttgggctttaggaagagggcactcaagggacatcagccacacctaattggctaggtgggccagagttagggaaggccagggcatccct

SEQ ID NO: 293956 - DNA, 791 bp, Homo sapiens
  misc_feature (26)..(27): n is a, c, g, or t
cggcacgagggagcaccgaaagggcnntggctttgcgacgatgaagacactgaggctcagagaggttaagtgactcagccaaggtcaaacagctagtaagtggtggagccaggactcaaagccagtctaggagccatgtccactttgttcccctcactcttccctcgtgtgactgagactctgtggtttaatctggatcgaccctgtgtggaagagacagagctgcagcagcaggaacagcagcatcaggcctggctccaaagcatcgcggagaaagacaacaacctggttcctattggcaagccagcctcagagcactatgatgacgaggaagaagaggatgatgaagatgatgaggatagtgaagaggactcagaggatgatgaggatatgcaggacatggacgagatgaatgactacaatgagtcaccggatgatggagaggtcaatgaggtggacatggaaggcaacgaacaggatcaggaccagtggatgatctaggtagacaaggcagggtggcctcagggagattccaggccagcccaaactaccctgcatcccaacccccaacccctgcccacagaaccagctgatggccccagtgcctgaaagtgcccttgggcacctcctcagctgctgccaggatctggtctctttggcccctcccaggccatcagtctgcacttgaaatccccagggcctgaaacctactccaccttcctggccagtacctcaccccttgattgccaggtctggtctaagtttctttaataaagacaaaggagtgattt

SEQ ID NO: 293957 - DNA, 797 bp, Homo sapiens
  misc_feature (26)..(27): n is a, c, g, or t
cggcacgagggagcaccgaaagggcnntggctttgcgacgatgaagacactgaggctcagagaggttaagtgactcagccaaggtcaaacagctatctaggagccatgtccactttgttcccctcactcttccctcgtgtgactgagactctgtggtttaatctggatcgaccctgtgtggaagagacagagctgcagcagcaggaacagcagcatcaggcctggctccaaagcatcgcggagaaagacaacaacctggttcctattggcaagccagcctcagaggcctgtagggcttacaggctctgtcctgcccaccagcactatgatgacgaggaagaagaggatgatgaagatgatgaggatagtgaagaggactcagaggatgatgaggatatgcaggacatggacgagatgaatgactacaatgagtcaccggatgatggagaggtcaatgaggtggacatggaaggcaacgaacaggatcaggaccagtggatgatctaggtagacaaggcagggtggcctcagggagattccaggccagcccaaactaccctgcatcccaacccccaacccctgcccacagaaccagctgatggccccagtgcctgaaagtgcccttgggcacctcctcagctgctgccaggatctggtctctttggcccctcccaggccatcagtctgcacttgaaatccccagggcctgaaacctactccaccttcctggccagtacctcaccccttgattgccaggtctggtctaagtttctttaataaagacaaaggagtgattt

SEQ ID NO: 293958 - DNA, 658 bp, Homo sapiens
gggggggagcggggaaaacaaaaggagacgaaggacgcatgcgtttggtgagtcccggattctggtgggttcttccgctcaggctgggtgaagcgcttccgggtcgccgccggcagcagcctcccggcgcgatgaagacactgaggctcagagaggttaagtgactcagccaaggtcaaacagctagtaagtggtggagccaggactcaaagccagtctaggagccatgtccactttgttcccctcactcttccctcgtgtgactgagactctgtggtttaatctggatcgaccctgtgtggaagagacagagctgcagcagcaggaacagcagcatcaggcctggctccaaagcatcgcggagaaagacaacaacctggttcctattggcaagccagcctcagagcactatgatgacgaggaagaagaggatgatgaagatgatgaggatagtgaagaggactcagaggatgatgaggatatgcaggacatggacggagattccaggccagcccaaactaccctgcatcccaacccccaaccctctgcacttgaaatccccagggcctgaaacctactccaccttcctggccagtacctcaccccttgattgccaggtctggtctaagtttctttaataaagacaaaggagtgattt

SEQ ID NO: 293959 - DNA, 613 bp, Homo sapiens
gggggggagcggggaaaacaaaaggagacgaaggacgcatgcgtttggtgagtcccggattctggtgggttcttccgctcaggctgggtgaagcgcttccgggtcgccgccggcagcagcctcccggcgcgatgaagacactgaggctcagagaggttaagtgactcagccaaggtcaaacagctagtaagtggtggagccaggactcaaagccagtctaggagccatgtccactttgttcccctcactcttccctcgtgtgactgagactctgtggtttaatctggatcgaccctgtgtggaagagacagagctgcagcagcaggaacagcagcatcaggcctggctccaaagcatcgcggagaaagacaacaacctggttcctattggcaagccagcctcagagtacctcaccccttgattgccaggtctggtctaagtttctttaataaagacaaaggagtgatttcacccatgtctattccctatttgttggtggggcccagaggagtccagcatcttcttttgggctttaggaagagggcactcaagggacatcagccacacctaattggctaggtgggccagagttagggaaggccagggcatccct

SEQ ID NO: 293960 - DNA, 566 bp, Homo sapiens
atttctgtctgagacccgccctgctttctttctgttggtcaactgcatggtcattatcgtaatgagcaaagaaagggcggtggctttgcgacggtgggttgggctttcggagccgagatcgctggtctgtcagtacttcttggacatgagggtgtttaccgtcgtgcctaattacgcgggttgggaatctgagatacagggaagggcagcggctggccctgggtcggtcagataaattaagacaaaagcaggaccaggcatcgattattttctcctgctcatccctttcacggaggaattctaagccccgacacactgtatgacctaaagccagtctctgcctgtcgctgggcctcagttcgcctgtcctaagtttaattcagattatctggcactcctggtcggctccctcagccgctcaaagctgattgtacccttataatgttagttcatccattcaatcttccatctacttatttatccacttattcatgcctcctagaatgtcttactgaaccctgcttgcatatgctacaatccctccaccccgacatttggctgtgatt

SEQ ID NO: 293961 - DNA, 663 bp, Homo sapiens
actcagccaaggtcaaacagctagtaagtggtggagccaggactcaaagccaggtctgtctgattcctagggggaggggctgctttcctgctgtcttccaccctatccctaaatcaaattacaaccaaattaaaaacaaaaacaaagcaaaacacattcacttgaccctttccctcagttctaggagccatgtccactttgttcccctcactcttccctcgtgtgactgagactctgtggtttaatctggatcgaccctgtgtggaagagacagagctgcagcagcaggaacagcagcatcaggcctgggtgagtgagcagctagcacagcacagagacctcagcacagacagagacctccttcagtgggccatgacccagccttactccagaaatctacccaggaagagctttttgccctgagctgggaataatcgggctgggagccagggagccaaggttctcatcttgtggtaccctattttacaggggtaccatgtgacttctgggccagattagagcccaggctgctgacactcagcccaagctcttttccctaaagcacaggaaataattttgactattaattgaggatctagcagatgatgctttctaggctgataagtctctcacttcatcctcaccataattatacaaaaaaaa

SEQ ID NO: 293962 - DNA, 177 bp, Homo sapiens
  misc_feature (177)..(177): n is a, c, g, or t
agtctggtgtgcatgccatatgatcaggacagcttttccactttactcggtttcctacaagcaagtaggaaatacagtgaatttaccctaaaatgtccaatctgtatttatgtaccttgtcagtgttttgctgttggttttctaaaacaatctgatcaataaatcttatccaaatcn

SEQ ID NO: 293963 - DNA, 6336 bp, Homo sapiens
  misc_feature (2113)..(2113): n is a, c, g, or t
ctcgtggggaaaaggcagggagggggtggtgtccccagccggtttggggggtgcgttgcccggagacggaaagtttgggagcccgagcaggctcggctgcagcctcggggagggggtccagcgggtggcggccctggggatggggaaggagcaggagctgctggaggcggcccgcaccgggcacctcccggcggtggagaagctgctgtccgggaagcggctctcctcaggctttgggggcggcggcggcggtggctctgggggcggcggcggcggcagcggcggcggcggcggcggcctcggctcttccagccaccccctctccagtctgctcagcatgtggagagggccaaatgtgaactgtgttgacagcactggctacacacccctgcaccatgctgctttgaatggccataaggatgtggtcgaggttcttctgaggaacgatgcgctgaccaacgtggctgactcaaaaggctgctaccctctgcatttggcagcctggaaaggagatgcccagatagtgcggttgctcatccatcaagggccttcacacaccagagtcaatgaacagaacaatgacaacgagacagccctgcattgtgcagcgcagtatggccacacagaggtggtgaaggtgctcttagaggagctgacggaccccaccatgcgcaacaacaaattcgagacccctttggacctggcagcactgtacgggcgactggaggtggtgaaaatgctccttaatgcacaccccaacctcctgagctgcaacactaagaagcacacccctctgcacttggcagcaaggaatggccacaaagccgtggtccaggtcctcctcgatgctggcatggacagcaactaccagacggagatgggcagtgctttgcatgaggctgctttgtttggcaagaccgatgtggtgcaaatcctgctggctgcaggaactgacgtcaacataaaagataaccatggactgactgccctagacactgttcgggaactgccttctcaaaagagccagcaaatagcagcattaattgaagatcacatgactggaaaaagaagtacaaaagaagtagataaaacccccccaccccagccacctctcatctccagtatggactccatatcacagaagtctcagggtgacgtggagaaagcagtgactgaactgattatagattttgatgcaaatgctgaagaagagggtccctacgaagctctgtataatgccatctcctgccattcgttggacagcatggccagcgggcgatcatctgaccaagactccacgaacaaggaggctgaggcagcaggagtgaaacctgctggagtgaggcctagggaacgtccaccacctccagcaaagccaccgcccgatgaagaggaagaagaccacatagataagaagtattttcccttgacagcttctgaggttctgtccatgagacctaggattcatgggagtgcagcccgggaagaagacgaacacccttatgaactgttgttaacagcagagacaaagaaagtggtgttggtggatggaaaaacaaaagaccacaggcggagcagcagcagccggagccaggactctgcggaggggcaggacgggcaggtcccagagcagttctcaggcctcctccacggctcctccccggtgtgcgaggtggggcaggaccctttccagctgctctgtaccgctggccagagccatccagacgggtccccccagcagggcgcctgccacaaggccagcatgcagctggaggagacgggtgtgcatgctcctggagcctcccagcccagtgccctggaccagagcaagagagtgggctacctcacaggcctgcccaccaccaacagccgctcgcaccctgaaactttgactcacacagcatctccgcaccctggtggtgctgaggaaggagaccggagtggggccaggagccgagcgcctcccactagcaaacccaaagctgaactcaaactcagccgcagcttgtccaagtctgactctgatctcctgacctgctcacccacagaggacgctaccatggggagtcggagtgagtccttatccaactgcagcattgggaagaaaaggctngagaagtcaccctccttcgcctcggagtgggatgagattgagaaaatcatgagttctattggagaagggattgacttttctcaggaacggcagaagatctcaggttcacggacgctggagcagagtgtcggggagtggctggagtcgattgggctgcagcagtatgagagcaagttgcttctgaatggctttgacgatgtccacttcctggggtctaatgtgatggaagagcaggacctgcgggacatcggcatcagcgacccacagcaccggcggaagctgctccaggcggcacgctccctacccaaggtgaaggctctgggttatgacgggaacagcccccctagcgtgccctcctggctggactccctggggctgcaggactacgtccattccttcttgtcaagtggttacagctccattgacaccgtgaagaacctctgggagctagagctcgtcaatgtcctgaaggtccagctgctcggccatcgcaagcgcatcatcgcctccctcgcagacagaccgtacgaggagccgccccagaagccccccagattctcccagctgaggtgccaagatttgctctcccagacgtcatccccactgagtcagaatgattcctgcactgggcggtcggcagatctgctgctgcctccaggggacacaggcaggaggcgccatgacagtctccatgaccctgcggcaccctcccgagcggagcgcttcaggatccaggaggagcaccgtgaggccaagctgaccctgcggcccccaagcctggcagccccctacgccccagtgcagagttggcaacaccagccagagaaactcatcttcgagtcctgtggttatgaagccaattatctgggctccatgctgatcaaagatctgcgagggacagaatccacgcaagacgcctgtgccaagatgcggaaatctacggagcacatgaagaagatccccaccatcatcctgtccatcacatacaaaggtgtcaagtttcatcgatgcctccaacaagaacgtcattgcagagcacgagatccggaacatttcctgtgcggcccaggacccggaggacctctgtacctttgcctacatcaccaaggacctgcagaccagccaccactattgccatgtgttcagcaccgtggatgtgaacctgacctacgagatcatcctgacgctggggcaggccttcgaagtggcctatcagttggccctgcaggcccagaagtccagggcgacgggcgcctctgcagctgagatgattgaaacaaaatcttccaaaccggtgcctaagcctcgggtcggcgtgaggaaatccgcactggaaccacctgatatggaccaagatgcccaatcccatgccagtgtctcctgggttgtggaccccaaaccagactctaagcggagcctcagcaccaactgagccactgaggaaccacactgtgctgcggaaacatagacgtgggggcataggctcccgctgccaccaccgccatcgcctcacctgcagctctgaagacccaggcctcacctccgcctgcaggacctcctcttggccacttggcctgggcctgccaccaccacgtcctgcagaacgagccctgccttggctgtggagaagcactccaggccgctagcagatgggactggcattccagagggtcaagaagtgacttgttcagaacacattgtttttaacagaaaaaaaatctttttataaaatgaacttttaacacttggctcaaacctctaggtcatactgccaatctttagacaaatggccatggggcagaggacaggggagctgaggttggttcagaggccagcctgcatagcctctgtcctcaggacggaacttgggtgcagctcagtgggtcggaagagaaggcggtggcctgtgggtgaggggaacggagcaggctcaggcagaattgagtacggtgcgtctgcttttcaaacccaaccatatcagctgctgctctttatgaactgcccaacttcctgtccctttcaggggctagacacaggcttctcgtaagaacacagccttagaggcacctgagcaactcaaaggtttccggtccatttctggggttcccgatgggaaggttcagtggccaaatgaagataagtgtgcagtttctagtgctgggaagtcttagccagcaccagagcgccaggcctctccctggcctcttacctgtcagtgatcggagcactgccctgggctggccggcgccgtactgcctgcgttgtgtcagagaataggaaaagcagctttgtttggggcattaatgcttggagtggggtcagctaaggttgctacttgccaatttgtgatttgtctaatcagcctgtgtgattggggctcattttgattctctgaattatcggtttgacggttacacttggctgctgggcccatccctggcccccggtgtggaaaaggctaaataaggtgacagtgcatcgatgctcccccgcgtggcctttggggcaggctggcatcccggtgcgcctctgcttcttaagctttcctgctgctcgctttgtttttaaaagtaacttgggttgcattcttccctctggactagagtagaaatgcaggggaaactgctgtggatttgagaggcaaagttggctcagctgtgtgcccagttcctcctgtgggcactttagcaggctccgagctttcctggcataggtcaatcaggtcccaggatgaataatccaggcttcagcaacactcctctttcccagccagcaaaggctgtgaatttgaattctttgttggtatgtatgtgcagggagtactgttaggcacattcttaacccatgtggttggccagaaatcagaagtggggctgtgtctctgactggctagaggccaggccttgtgggtttctatctgctaagcacccagcaggttggggcctgggactcagctctctctgcggtagaggcaggccctcctccacttcttggtactaaacgaagatctcgacaccttgcagttttacttcatttcctgcccctttcagggcctgtgaggatgcccatgagctaccgctgtacagttctcggccccggctttcttccaagagttgaccaggaaccctaaagcatccagagtagactgcgctgccactgcgcgcatgctggtgcccgtcttcctcctaaggggccaggccacatccaagtgggcctctgtcgggggcggggcggtaggtccgaaagaaaccgcagacactacgatgcactcctcaagctgtcttttgtgcttagatcatccataggtgtttcttctgcttgaagctgctatatcatctttatttattcagggtattttcatattggaagccttggctagtctgctctagctctgggttctgtttagagattggtttatttctgaatattcaagaaaggaaaatgactgggcctttctttcttttcttctcctctgggatgggtagtctccctttcctagaaaggttattataactttaaggacaggcttcaagtgggaaggcccctacttttgcacttctccaagtgcaggtcacaccaggggcagaccctgtcgctgcgtttctgaactgtgaaggagcccattcgggtgggagacttcagatgggctcagtacctgtcccagccacaggcttcttgtccacctcttctcccctgcccaccagctgctcagcgcataagaccttcccgacaggctctgcgtgtgcagctctctgcgtccctcctgggccctccagcgtcagacactaatgggagttcccgagatgctcgggtttgagcagggagcaggcagagctgcagtcagagacattagaaaaccagtctgaattgggtctgtctttgagatgcccaggccagcagaaagcagctcagaagtattgttgctcatggtgtggcaatggactgaactgtaatgaaaatgttatttaatctttgtctctgtattttgatacttgaatgactttcccttttgttttactgtatataaaattgttaatctgtctgattttgtctgaattataaacactttgaggtaccaaacataaccaatctgtgcaacaacatagactgacctcagtacccaagagagtgtaaatatttctgggcttccagctttggttttgttattttcataactgtacacaacttagaacagactgaattaataaatgagaagcgacatg

SEQ ID NO: 293964 - DNA, 949 bp, Homo sapiens
  misc_feature (908)..(908): n is a, c, g, or t
cctttagacaaagcattctgctgcggctctgtcagcgcgcacatccaccggcagcaggcaggaccacagctgcccggctgggggattacaagcaagaatgaatcagcacccggggacacttgacttcatgggcatagaagaacctgccacgtaggctcctggagcagacttccccattcaagggcaggggagctcaagtatcccccagactcggcatcttggagcgctgcggcagcgtgcatccagaaggccgccgggtccctgaccatcatctgttctgcaggagacagaggagagggagtggaggctggcagagttggtcaccagggtcttgtagataaccaaggaagttggcattgtcctgccccaaggggcagaaagtacctgggaacggcagaatgactttcaccgtgtcaggagttcactggaggttcacggacgctggagcagagtgtcggggagtggctggagtcgattgggctgcagcagtatgagagcaagttgcttctgaatggctttgacgatgtccacttcctggggtctaatgtgatggaagagcaggacctgcgggacatcggcatcagcgacccacagcaccggcggaagctgctccaggcggcacgctccctacccaaggtgaaggctctgggttatgacgggaacagcccccctagcgtgccctcctggctggactccctggggctgcaggactacgtccattccttcttgtcaagtggttacagctccattgacaccgtgaagaacctctgggagctagagctcgtcaatgtcctgaaggtccagctgctcggccatcgcaagcgcatcatcgcctccctcgcagacagaccgtacgaggagccgccccagaagccccccagattctcccagctgaggtgcaaagattnctctccagacgtattccactgagtagaataatctgcatggg

SEQ ID NO: 293965 - DNA, 2926 bp, Homo sapiens
ccccacctgcactgggacctgctcctcttgggcgggcggtacacttgcagctctcgcacctaccaccaccgaacactgtgaattctcccccttgggctgaggacagcttgagggggtgagttgcctttgagctgagccactgaggaaccacactgtgctgcggaaacatagacgtgggggcataggctcccgctgccaccaccgccatcgcctcacctgcagctctgaagacccaggcctcacctccgcctgcaggacctcctcttggccacttggcctgggcctgccaccaccacgtcctgcagaacgagccctgccttggctgtggagaagcactccaggccgctagcagatgggactggcattccagagggtcaagaagtgacttgttcagaacacattgtttttaacagaaaaaaaatctttttataaaatgaacttttaacacttggctcaaacctctaggtcatactgccaatctttagacaaatggccatggggcagaggacaggggagctgaggttggttcagaggccagcctgcatagcctctgtcctcaggacggaacttgggtgcagctcagtgggtcggaagagaaggcggtggcctgtgggtgaggggaacggagcaggctcaggcagaattgagtacggtgcgtctgcttttcaaacccaaccatatcagctgctgctctttatgaactgcccaacttcctgtccctttcaggggctagacacaggcttctcgtaagaacacagccttagaggcacctgagcaactcaaaggtttccggtccatttctggggttcccgatgggaaggttcagtggccaaatgaagataagtgtgcagtttctagtgctgggaagtcttagccagcaccagagcgccaggcctctccctggcctcttacctgtcagtgatcggagcactgccctgggctggccggcgccgtactgcctgcgttgtgtcagagaataggaaaagcagctttgtttggggcattaatgcttggagtggggtcagctaaggttgctacttgccaatttgtgatttgtctaatcagcctgtgtgattggggctcattttgattctctgaattatcggtttgacggttacacttggctgctgggcccatccctggcccccggtgtggaaaaggctaaataaggtgacagtgcatcgatgctcccccgcgtggcctttggggcaggctggcatcccggtgcgcctctgcttcttaagctttcctgctgctcgctttgtttttaaaagtaacttgggttgcattcttccctctggactagagtagaaatgcaggggaaactgctgtggatttgagaggcaaagttggctcagctgtgtgcccagttcctcctgtgggcactttagcaggctccgagctttcctggcataggtcaatcaggtcccaggatgaataatccaggcttcagcaacactcctctttcccagccagcaaaggctgtgaatttgaattctttgttggtatgtatgtgcagggagtactgttaggcacattcttaacccatgtggttggccagaaatcagaagtggggctgtgtctctgactggctagaggccaggccttgtgggtttctatctgctaagcacccagcaggttggggcctgggactcagctctctctgcggtagaggcaggccctcctccacttcttggtactaaacgaagatctcgacaccttgcagttttacttcatttcctgcccctttcagggcctgtgaggatgcccatgagctaccgctgtacagttctcggccccggctttcttccaagagttgaccaggaaccctaaagcatccagagtagactgcgctgccactgcgcgcatgctggtgcccgtcttcctcctaaggggccaggccacatccaagtgggcctctgtcgggggcggggcggtaggtccgaaagaaaccgcagacactacgatgcactcctcaagctgtcttttgtgcttagatcatccataggtgtttcttctgcttgaagctgctatatcatctttatttattcagggtattttcatattggaagccttggctagtctgctctagctctgggttctgtttagagattggtttatttctgaatattcaagaaaggaaaatgactgggcctttctttcttttcttctcctctgggatgggtagtctccctttcctagaaaggttattataactttaaggacaggcttcaagtgggaaggcccctacttttgcacttctccaagtgcaggtcacaccaggggcagaccctgtcgctgcgtttctgaactgtgaaggagcccattcgggtgggagacttcagatgggctcagtacctgtcccagccacaggcttcttgtccacctcttctcccctgcccaccagctgctcagcgcataagaccttcccgacaggctctgcgtgtgcagctctctgcgtccctcctgggccctccagcgtcagacactaatgggagttcccgagatgctcgggtttgagcagggagcaggcagagctgcagtcagagacattagaaaaccagtctgaattgggtctgtctttgagatgcccaggccagcagaaagcagctcagaagtattgttgctcatggtgtggcaatggactgaactgtaatgaaaatgttatttaatctttgtctctgtattttgatacttgaatgactttcccttttgttttactgtatataaaattgttaatctgtctgattttgtctgaattataaacactttgaggtaccaaacataaccaatctgtgcaacaacatagactgacctcagtacccaagagagtgtaaatatttctgggcttccagctttggttttgttattttcataactgtacacaacttagaacagactgaattaataaatgagaagcgacatg

SEQ ID NO: 293966 - DNA, 5862 bp, Homo sapiens
  misc_feature (2113)..(2113): n is a, c, g, or t
ctcgtggggaaaaggcagggagggggtggtgtccccagccggtttggggggtgcgttgcccggagacggaaagtttgggagcccgagcaggctcggctgcagcctcggggagggggtccagcgggtggcggccctggggatggggaaggagcaggagctgctggaggcggcccgcaccgggcacctcccggcggtggagaagctgctgtccgggaagcggctctcctcaggctttgggggcggcggcggcggtggctctgggggcggcggcggcggcagcggcggcggcggcggcggcctcggctcttccagccaccccctctccagtctgctcagcatgtggagagggccaaatgtgaactgtgttgacagcactggctacacacccctgcaccatgctgctttgaatggccataaggatgtggtcgaggttcttctgaggaacgatgcgctgaccaacgtggctgactcaaaaggctgctaccctctgcatttggcagcctggaaaggagatgcccagatagtgcggttgctcatccatcaagggccttcacacaccagagtcaatgaacagaacaatgacaacgagacagccctgcattgtgcagcgcagtatggccacacagaggtggtgaaggtgctcttagaggagctgacggaccccaccatgcgcaacaacaaattcgagacccctttggacctggcagcactgtacgggcgactggaggtggtgaaaatgctccttaatgcacaccccaacctcctgagctgcaacactaagaagcacacccctctgcacttggcagcaaggaatggccacaaagccgtggtccaggtcctcctcgatgctggcatggacagcaactaccagacggagatgggcagtgctttgcatgaggctgctttgtttggcaagaccgatgtggtgcaaatcctgctggctgcaggaactgacgtcaacataaaagataaccatggactgactgccctagacactgttcgggaactgccttctcaaaagagccagcaaatagcagcattaattgaagatcacatgactggaaaaagaagtacaaaagaagtagataaaacccccccaccccagccacctctcatctccagtatggactccatatcacagaagtctcagggtgacgtggagaaagcagtgactgaactgattatagattttgatgcaaatgctgaagaagagggtccctacgaagctctgtataatgccatctcctgccattcgttggacagcatggccagcgggcgatcatctgaccaagactccacgaacaaggaggctgaggcagcaggagtgaaacctgctggagtgaggcctagggaacgtccaccacctccagcaaagccaccgcccgatgaagaggaagaagaccacatagataagaagtattttcccttgacagcttctgaggttctgtccatgagacctaggattcatgggagtgcagcccgggaagaagacgaacacccttatgaactgttgttaacagcagagacaaagaaagtggtgttggtggatggaaaaacaaaagaccacaggcggagcagcagcagccggagccaggactctgcggaggggcaggacgggcaggtcccagagcagttctcaggcctcctccacggctcctccccggtgtgcgaggtggggcaggaccctttccagctgctctgtaccgctggccagagccatccagacgggtccccccagcagggcgcctgccacaaggccagcatgcagctggaggagacgggtgtgcatgctcctggagcctcccagcccagtgccctggaccagagcaagagagtgggctacctcacaggcctgcccaccaccaacagccgctcgcaccctgaaactttgactcacacagcatctccgcaccctggtggtgctgaggaaggagaccggagtggggccaggagccgagcgcctcccactagcaaacccaaagctgaactcaaactcagccgcagcttgtccaagtctgactctgatctcctgacctgctcacccacagaggacgctaccatggggagtcggagtgagtccttatccaactgcagcattgggaagaaaaggctngagaagtcaccctccttcgcctcggagtgggatgagattgagaaaatcatgagttctattggagaagggattgacttttctcaggaacggcagaagatctcaggttcacggacgctggagcagagtgtcggggagtggctggagtcgattgggctgcagcagtatgagagcaagttgcttctgaatggctttgacgatgtccacttcctggggtctaatgtgatggaagagcaggacctgcgggacatcggcatcagcgacccacagcaccggcggaagctgctccaggcggcacgctccctacccaaggtgaaggctctgggttatgacgggaacagcccccctagcgtgccctcctggctggactccctggggctgcaggactacgtccattccttcttgtcaagtggttacagctccattgacaccgtgaagaacctctgggagctagagctcgtcaatgtcctgaaggtccagctgctcggccatcgcaagcgcatcatcgcctccctcgcagacagaccgtacgaggagccgccccagaagccccccagattctcccagctgaggtgccaagatttgctctcccagacgtcatccccactgagtcagaatgattcctgcactgggcggtcggcagatctgctgctgcctccaggggacacaggcaggaggcgccatgacagtctccatgaccctgcggcaccctcccgagcggagcgcttcaggatccaggaggagcaccgtgaggccaagctgaccctgcggcccccaagcctggcagccccctacgccccagtgcagagttggcaacaccagccagagaaactcatcttcgagtcctgtggttatgaagccaattatctgggctccatgctgatcaaagatctgcgagggacagaatccacgcaagacgcctgtgccaagatgcggaaatctacggagcacatgaagaagatccccaccatcatcctgtccatcacatacaaaggtgtcaagtttcatcgatgcctccaacaagaacgtcattgcagagcacgagatccggaacatttcctgtgcggcccaggacccggaggacctctgtacctttgcctacatcaccaaggacctgcagaccagccaccactattgccatgtgttcagcaccgtggatgtgaacctgacctacgagatcatcctgacgctggggcaggccttcgaagtggcctatcagttggccctgcaggcccagaagtccagggcgacgggcgcctctgcagctgagatgattgaaacaaaatcttccaaaccggtgcctaagcctcgggtcggcgtgaggaaatccgcactggaaccacctgatatggaccaagatgcccaatcccatgccagtgtctcctgggttgtggaccccaaaccagactctaagcggagcctcagcaccaactgagccactgaggaaccacactgtgctgcggaaacatagacgtgggggcataggctcccgctgccaccaccgccatcgcctcacctgcagctctgaagacccaggcctcacctccgcctgcaggacctcctcttggccacttggcctgggcctgccaccaccacgtcctgcagaacgagccctgccttggctgtggagaagcactccaggccgctagcagatgggactggcattccagagggtcaagaagtgacttgttcagaacacattgtttttaacagaaaaaaaatctttttataaaatgaacttttaacacttggctcaaacctctaggtcatactgccaatctttagacaaatggccatggggcagaggacaggggagctgaggttggttcagaggccagcctgcatagcctctgtcctcaggacggaacttgggtgcagctcagtgggtcggaagagaaggcggtggcctgtgggtgaggggaacggagcaggctcaggcagaattgagtacggtgcgtctgcttttcaaacccaaccatatcagctgctgctctttatgaactgcccaacttcctgtccctttcaggggctagacacaggcttctcgtaagaacacagccttagaggcacctgagcaactcaaaggtttccggtccatttctggggttcccgatgggaaggttcagtggccaaatgaagataagtgtgcagtttctagtgctgggaagtcttagccagcaccagagcgccaggcctctccctggcctcttacctgtcagtgatcggagcactgccctgggctggccggcgccgtactgcctgcgttgtgtcagagaataggaaaagcagctttgtttggggcattaatgcttggagtggggtcagctaaggttgctacttgccaatttgtgatttgtctaatcagcctgtgtgattggggctcattttgattctctgaattatcggtttgacggttacacttggctgctgggcccatccctggcccccggtgtggaaaaggctaaataaggtgacagtgcatcgatgctcccccgcgtggcctttggggcaggctggcatcccggtgcgcctctgcttcttaagctttcctgctgctcgctttgtttttaaaagtaacttgggttgcattcttccctctggactagagtagaaatgcaggggaaactgctgtggatttgagaggcaaagttggctcagctgtgtgcccagttcctcctgtgggcactttagcaggctccgagctttcctggcataggtcaatcaggtcccttgaccaggaaccctaaagcatccagagtagactgcgctgccactgcgcgcatgctggtgcccgtcttcctcctaaggggccaggccacatccaagtgggcctctgtcgggggcggggcggtaggtccgaaagaaaccgcagacactacgatgcactcctcaagctgtcttttgtgcttagatcatccataggtgtttcttctgcttgaagctgctatatcatctttatttattcagggtattttcatattggaagccttggctagtctgctctagctctgggttctgtttagagattggtttatttctgaatattcaagaaaggaaaatgactgggcctttctttcttttcttctcctctgggatgggtagtctccctttcctagaaaggttattataactttgaactgtgaaggagcccattcgggtgggagacttcagatgggctcagtacctgtcccagccacaggcttcttgtccacctcttctcccctgcccaccagctgctcagcgcataagaccttcccgacaggctctgcgtgtgcagctctctgcgtccctcctgggccctccagcgtcagacactaatgggagttcccgagatgctcgggtttgagcagggagcaggcagagctgcagtcagagacattagaaaaccagtctgaattgggtctgtctttgagatgcccaggccagcagaaagcagctcagaagtattgttgctcatggtgtggcaatggactgaactgtaatgaaaatgttatttaatctttgtctctgtattttgatacttgaatgactttcccttttgttttactgtatataaaattgttaatctgtctgattttgtctgaattataaacactttgaggtaccaaacataaccaatctgtgcaacaacatagactgacctcagtacccaagagagtgtaaatatttctgggcttccagctttggttttgttattttcataactgtacacaacttagaacagactgaattaataaatgagaagcgacatg

SEQ ID NO: 293967 - DNA, 1899 bp, Homo sapiens
ttaggctaggtagaggcccgggtgtgatcggcgaggcacctgtgtgattggggctcattttgattctctgaattatcggtttgacggttacacttggctgctgggcccatccctggcccccggtgtggaaaaggctaaataaggtgacagtgcatcgatgctcccccgcgtggcctttggggcaggctggcatcccggtgcgcctctgcttcttaagctttcctgctgctcgctttgtttttaaaagtaacttgggttgcattcttccctctggactagagtagaaatgcaggggaaactgctgtggatttgagaggcaaagttggctcagctgtgtgcccagttcctcctgtgggcactttagcaggctccgagctttcctggcataggtcaatcaggtcccaggatgaataatccaggcttcagcaacactcctctttcccagccagcaaaggctgtgaatttgaattctttgttggtatgtatgtgcagggagtactgttaggcacattcttaacccatgtggttggccagaaatcagaagtggggctgtgtctctgactggctagaggccaggccttgtgggtttctatctgctaagcacccagcaggttggggcctgggactcagctctctctgcggtagaggcaggccctcctccacttcttggtactaaacgaagatctcgacaccttgcagttttacttcatttcctgcccctttcagggcctgtgaggatgcccatgagctaccgctgtacagttctcggccccggctttcttccaagagttgaccaggaaccctaaagcatccagagtagactgcgctgccactgcgcgcatgctggtgcccgtcttcctcctaaggggccaggccacatccaagtgggcctctgtcgggggcggggcggtaggtccgaaagaaaccgcagacactacgatgcactcctcaagctgtcttttgtgcttagatcatccataggtgtttcttctgcttgaagctgctatatcatctttatttattcagggtattttcatattggaagccttggctagtctgctctagctctgggttctgtttagagattggtttatttctgaatattcaagaaaggaaaatgactgggcctttctttcttttcttctcctctgggatgggtagtctccctttcctagaaaggttattataactttaaggacaggcttcaagtgggaaggcccctacttttgcacttctccaagtgcaggtcacaccaggggcagaccctgtcgctgcgtttctgaactgtgaaggagcccattcgggtgggagacttcagatgggctcagtacctgtcccagccacaggcttcttgtccacctcttctcccctgcccaccagctgctcagcgcataagaccttcccgacaggctctgcgtgtgcagctctctgcgtccctcctgggccctccagcgtcagacactaatgggagttcccgagatgctcgggtttgagcagggagcaggcagagctgcagtcagagacattagaaaaccagtctgaattgggtctgtctttgagatgcccaggccagcagaaagcagctcagaagtattgttgctcatggtgtggcaatggactgaactgtaatgaaaatgttatttaatctttgtctctgtattttgatacttgaatgactttcccttttgttttactgtatataaaattgttaatctgtctgattttgtctgaattataaacactttgaggtaccaaacataaccaatctgtgcaacaacatagactgacctcagtacccaagagagtgtaaatatttctgggcttccagctttggttttgttattttcataactgtacacaacttagaacagactgaattaataaatgagaagcgacatg

SEQ ID NO: 293968 - DNA, 470 bp, Homo sapiens
tgagcagagtcactgagccagaggcagtgggggctgcaggctgtgggtgctcaaagcaggcatggagggtgccccggggaggctgtgagggatcgtctgtcctgctctgtgtttcctttccatttcctccaccgtccgcaggccccattggttaaccctttcctccccccattgtttgcttctgccaagctgagccactgaggaaccacactgtgctgcggaaacatagacgtgggggcataggctcccgctgccaccaccgccatcgcctcacctgcagctctgaagacccaggcctcacctccgcctgcaggacctcctcttggccacttggcctgggcctgccaccaccacgtcctgcagaacgagccctgccttggctgtggagaagcactccaggccgctagcagatgggactggcattccagagggtcaagaagtgacttgttcagaacacattgtttttaaca

SEQ ID NO: 293969 - DNA, 2104 bp, Homo sapiens
tccagcctcccaaagtgctgggattgcaggcatgagccactgctcccggccctattatccatagttctaatccacagggattacagcataatgctagcagggccaggttcatccttgagacagtgtggctggctgtcacctggtcctccctttaccagccagccccattgcacactgtgcagcccatcccctcccagaaatagagtgacaaactctgcacttaagtcccctgtttctgtttaacttgcagtgcttatcacaggcccttccttaattttttaaacaaggctgcttgaggctggggtaaattttggggctttgggagtacacaggactactgagggacggggagttggtggcttggtgttcatggtggagacttggttctttacgcagagcaggctaaaggcgtgttttttctgctctgtttctaattcatgttaagtagttggtcatcactttggtcagagctgctgctgaagctctcttaactgtgagtcactggacgttggcagggagttggctgtgagattgtaggtgctcaagtgtttctgttcgggactgagtgtgaatctgtaaaaggggaaaatcctcgcaagaggtctacgagaaggttgagggcccaagtctagggtctaaacaaagccaggagtggtttggtatattactgagtgcaatcattgcgtgccattcctgcactcaatgtattgtgtaaaatccttaggtaaaatgggataaacccacagctggtcctacttggcctcttgaaaaccattccatcattgtgccaatctagcctgaaaaggaaaaaaaaaagggaaaccattgattgtctcttgcctcggaggttgggggtatgcccctactccaggctttgcagtgatcatatgatgcagtaatgaagatctggggcctggcacaacactttgggatccacccaaggcgggtggatcacttgacctcaggagttggagaccagcctgggcaacacggcaaaaccccatctctacaaaaatcacaaaaattagccgggtgtggcaagtgcctgtagtcccagctactcaggaggctaaggtgggagaatcgcttgagcctgagaggtcgtggttgcagtgagctgcgatcctgccactgcattccagcctgggctacaaagctagaccctatctcaaaaaaaaaaaaaaaaagaaaaagaaaaaaaagatttgagcccaatctggttcagacctgtttggctcagtgagcctggacttgggggaaggggatatgtactttttaaaagaacatttattgttactatgtttcatatttagaaaacaggacagagacttttttctggaaaaacaaaactgcagcaagtggagtttcttttttctggaaaaacaaactgcacgaagtggagtttagcaaaatgttctgaaactagtgcttctcaaccagtaaagcaggcacgacagaaacagtggggcaagggctttttgttctagtgaaacaggtggcctcctttcgatgtgggtttgtaaagcactagtggtctaatagcatgggctccttgagatagacctctgaagtttgttttctcagtcaagatcccagccaggaacgttccctgtgagcccccgaatctggggtacatagaaaattccagaaggttcagactgggggtgggtccagactaaggtaaacttctgggacattccatgaaactctaagcaaagtattctataaggtttactaaccatcatccaatcctaagcctctcccctgactcagcacaaggcctactccgtaatgtcatccctttatgcctcagggttttgtaggccagagctaatgcctgagggaccccactccctgcctgccctgaaactgagcctgtgctcttcatggaaaggaaaatgtgtgggaggctttttgaaggacccccaaaaggttcccatggtcacattttccccccacccactcagattggcttgagtcttttctttctctgctgctacctggcaagtggaggctgaactcggccatgaccttagcccctgccttctaggggctattccataattcctggttgtggaggatggctcagacatgcccagcctta

SEQ ID NO: 293970 - DNA, 2471 bp, Homo sapiens
ttctcttgcaccgcctgccgaatcaattcaacatggcagccatgcgctggcgatggtggcagcggctgttaccttggaggttgctgcaggcccgtggctttccacaaaattctgcacccagcctgggcctaggagcgaggacttattcccagggcgactgctcgtattcgcgcacggcgctgtatgatctgctcggcgtcccctccacagccacgcaggcccaaatcaaggcggcttactaccgtcagtgctttctctaccacccggaccgcaactccgggagcgcggaggccgccgagcgcttcacgcgcatctcccaggcctacgtggtgctgggcagtgccaccctccgtcgcaagtatgatcgcggcctactcagcgacgaggacctgcgcggacctggcgtccggccctccaggacgcccgcacccgaccccggctcgccgcgtaccccgccgcccacctctcggacccacgacggttctcgggcctcccccggcgccaaccgcacgatgttcaactttgacgccttctaccaggcccactacggggaacaactggagcgggaacggcgcctgagggcccggcgggaggcccttcgcaaacggcaggagtatcggtccatgaaaggcctccgctgggaggatacccgagacacggctgccattttcctcatcttttcaatcttcatcatcatcggcttttatatttaatcggagagagaagggaaggggagtgtccccagccaaccccccagaaacggccttttttcctgcctctgaacccttggccattgatagtctacctttgctgggatccgaaggaactgtactccccctgccctccccgacccgcccagcttagccgatgacctgcacatcgctccactgtggtccagaaaaggaggcctttcgatgtctgagaaagaggccccacgctgtagagtcccgaaagcccaggagtgaagggggttcctggagtctctagggtgcttcttccagagtctgtcttcttgcttccagatgtggtcaacttctggaacactcgctgtagctttattgtttagccccaagcaagatttatctcctcctgccccgcatgtgtatggtgggcctctgtaaccttgaaatgtgcaatgtgaccaattgttgactaccaaaagaaaaggtctggggttgtacgaaacttgtctttctgtgacttccccaagccgcaggtgagacctggtccagggtaagaatgggatcggtggagagcctgtcgttcctcccgctaaggtcagccccctggggcactcctccttatgttgatagcatgtaggagtgagaaaaagtcattgagcataaggaatgagtgttcctgtgcccatatttaatgtgtgaccttggagaagttactctgtaggcatgacagcagaggagaaaatcatttggcatcttgaggtctgtcatgctttattatccatagtttttggggggttttttgttttgttttgtttttgagatggagtctgggctacaaagctagaccctatctcaaaaaaaaaaaaaaaaagaaaaagaaaaaaaagatttgagcccaatctggttcagacctgtttggctcagtgagcctggacttgggggaaggggatatgtactttttaaaagaacatttattgttactatgtttcatatttagaaaacaggacagagacttttttctggaaaaacaaaactgcagcaagtggagtttcttttttctggaaaaacaaactgcacgaagtggagtttagcaaaatgttctgaaactagtgcttctcaaccagtaaagcaggcacgacagaaacagtggggcaagggctttttgttctagtgaaacaggtggcctcctttcgatgtgggtttgtaaagcactagtggtctaatagcatgggctccttgagatagacctctgaagtttgttttctcagtcaagatcccagccaggaacgttccctgtgagcccccgaatctggggtacatagaaaattccagaaggttcagactgggggtgggtccagactaaggtaaacttctgggacattccatgaaactctaagcaaagtattctataaggtttactaaccatcatccaatcctaagcctctcccctgactcagcacaaggcctactccgtaatgtcatccctttatgcctcagggttttgtaggccagagctaatgcctgagggaccccactccctgcctgccctgaaactgagcctgtgctcttcatggaaaggaaaatgtgtgggaggctttttgaaggacccccaaaaggttcccatggtcacattttccccccacccactcagattggcttgagtcttttctttctctgctgctacctggcaagtggaggctgaactcggccatgaccttagcccctgccttctaggggctattccataattcctggttgtggaggatggctcagacatgcccagcctta

SEQ ID NO: 293971 - DNA, 1625 bp, Homo sapiens
ttctcttgcaccgcctgccgaatcaattcaacatggcagccatgcgctggcgatggtggcagcggctgttaccttggaggttgctgcaggcccgtggctttccacaaaattctgcacccagcctgggcctaggagcgaggacttattcccagggcgactgctcgtattcgcgcacggcgctgtatgatctgctcggcgtcccctccacagccacgcaggcccaaatcaaggcggcttactaccgtcagtgctttctctaccacccggaccgcaactccgggagcgcggaggccgccgagcgcttcacgcgcatctcccaggcctacgtggtgctgggcagtgccaccctccgtcgcaagtatgatcgcggcctactcagcgacgaggacctgcgcggacctggcgtccggccctccaggacgcccgcacccgaccccggctcgccgcgtaccccgccgcccacctctcggacccacgacggttctcgggcctcccccggcgccaaccgcacgatgttcaactttgacgccttctaccaggcccactacggggaacaactggagcgggaacggcgcctgagggcccggcgggaggcccttcgcaaacggcaggagtatcggtccatgaaaggcctccgctgggaggatacccgagacacggctgccattttcctcatcttttcaatcttcatcatcatcggcttttatatttaatcggagagagaagggaaggggagtgtccccagccaaccccccagaaacggccttttttcctgcctctgaacccttggccattgatagtctacctttgctgggatccgaaggaactgtactccccctgccctccccgacccgcccagcttagccgatgacctgcacatcgctccactgtggtccagaaaaggaggcctttcgatgtctgagaaagaggccccacgctgtagagtcccgaaagcccaggagtgaagggggttcctggagtctctagggtgcttcttccagagtctgtcttcttgcttccagatgtggtcaacttctggaacactcgctgtagctttattgtttagccccaagcaagatttatctcctcctgccccgcatgtgtatggtgggcctctgtaaccttgaaatgtgcaatgtgaccaattgttgactaccaaaagaaaaggtctggggttgtacgaaacttgtctttctgtgacttccccaagccgcaggtgagacctggtccagggtaagaatgggatcggtggagagcctgtcgttcctcccgctaaggtcagccccctggggcactcctccttatgttgatagcatgtaggagtgagaaaaagtcattgagcataaggaatgagtgttcctgtgcccatatttaatgtgtgaccttggagaagttactctgtaggcatgacagcagaggagaaaatcatttggcatcttgaggtctgtcatgctttattatccatagtttttggggggttttttgttttgttttgtttttgagatggagtcttgcgctctgttgcccaggctggagtgcagtggtgcgatcttagctcactgcaacctccacctcccgggttcaagcgattctcctgcctcagcctcctgtgtaactgggattac

SEQ ID NO: 293972 - DNA, 1323 bp, Homo sapiens
  misc_feature (1205)..(1205): n is a, c, g, or t
ttctcttgcaccgcctgccgaatcaattcaacatggcagccatgcgctggcgatggtggcagcggctgttaccttggaggttgctgcaggcccgtggctttccacaaaattctgcacccagcctgggcctaggagcgaggacttattcccagggcgactgctcgtattcgcgcacggcgctgtatgatctgctcggcgtcccctccacagccacgcaggcccaaatcaaggcggcttactaccgtcagtgctttctctaccacccggaccgcaactccgggagcgcggaggccgccgagcgcttcacgcgcatctcccaggcctacgtggtgctgggcagtgccaccctccgtcgcaagtatgatcgcggcctactcagcgacgaggacctgcgcggacctggcgtccggccctccaggacgcccgcacccgaccccggctcgccgcgtaccccgccgcccacctctcggacccacgacggttctcgggcctcccccggcgccaaccgcacgatgttcaactttgacgccttctaccaggcccactacggggaacaactggagcgggaacggcgcctgagggcccggcgggaggcccttcgcaaacggcaggagtatcggtccatgaaaggcctccgctgggaggatacccgagacacggctgccattttcctcatcttttcaatcttcatcatcatcggcttttatatttaatcggagagagaagggaaggggagtgtccccagccaaccccccagaaacggccttttttcctgcctctgaacccttggccattgatagtctacctttgctgggatccgaaggaactgtactccccctgccctccccgacccgcccagcttagccgatgacctgcacatcgctccactgtggtccagaaaaggaggcctttcgatgtctgagaaagaggccccacgctgtagagtcccgaaagcccaggagtgaagggggttcctggagtctctagggtgcttcttccagagtctgtcttcttgcttccagatgtggtcaacttctggaacactcgctgtagctttattgtttagccccaagcaagatttatctcctcctgccccgcatgtgtatggtgggcctctgtaaccttgaaatgtgcaatgtgaccaattgttgactaccaaaagaaaaggtctggggttgtaattataataatattaactttttttntatcattcaattatggttatattttaaacaatataatatttatatacccgaggggggggcccggtcccaatatcccccttatagggggtggttataaatttccggggccgtgttttta

SEQ ID NO: 293973 - DNA, 1952 bp, Homo sapiens
gggggcgtggccccgagaaggcggagacaagatggccgcccatagcgcttggaggacctaagaggcggtggccggggccacgccccgggcaggagggccgctctgtgcgcgcccgctctatgatgcttgcgcgcgtcccccgcgcgccgcgctgcgggcggggcgggtctccgggattccaagggctcggttacggaagaagcgcagcgccggctggggagggggctggatgcgcgcgcacccggggggaggccgctgctgcccggagcaggaggagggggagagtgcggcgggcggcagcggcgctggcggcgactccgccatagagcaggggggccagggcagcgcgctcgccccgtccccggtgagcggcgtgcgcagggaaggcgctcggggcggcggccgtggccgggggcggtggaagcaggcgggccggggcggcggcgtctgtggccgtggccggggccggggccgtggccggggacggggacggggccggggccggggccgcggccgtcccccgagtggcggcagcggccttggcggcgacggcggcggctgcggcggcggcggcagcggtggcggcggcgccccccggcgggagccggtccctttcccgtcggggagcgcggggccggggcccaggggaccccgggccacggagagcgggaagaggatggattgcccggccctcccccccggatggaagaaggaggaagtgatccgaaaatctgggctaagtgctggcaagagcgatgtctactacttcagtccaagtggtaagaagttcagaagcaagcctcagttggcaaggtacctgggaaatactgttgatctcagcagttttgacttcagaactggaaagatgatgcctagtaaattacagaagaacaaacagagactgcgaaacgatcctctcaatcaaaataagggtaaaccagacttgaatacaacattgccaattagacaaacagcatcaattttcaaacaaccggtaaccaaagtcacaaatcatcctagtaataaagtgaaatcagacccacaacgaatgaatgaacagccacgtcagcttttctgggagaagaggctacaaggacttagtgcatcagatgtaacagaacaaattataaaaaccatggaactacccaaaggtcttcaaggagttggtccaggtagcaatgatgagacccttttatctgctgttgccagtgctttgcacacaagctctgcgccaatcacagggcaagtctccgctgctgtggaaaagaaccctgctgtttggcttaacacatctcaacccctctgcaaagcttttattgtcacagatgaagacatcaggaaacaggaagagcgagtacagcaagtacgcaagaaattggaagaagcactgatggcagacatcttgtcgcgagctgctgatacagaagagatggatattgaaatggacagtggagatgaagcctaagaatatgatcaggtaactttcgaccgactttccccaagagaaaattcctagaaattgaacaaaaatgtttccactggcttttgcctgtaagaaaaaaaatgtacccgagcacatagagctttttaatagcactaaccaatgcctttttagatgtatttttgatgtatatatctattattcaaaaaatcatgtttattttgagtcctaggacttaaaattagtcttttgtaatatcaagcaggaccctaagatgaagctgagcttttgatgccaggtgcaatctactggaaatgtagcacttacgtaaaacatttgtttcccccacagttttaataagaacagatcaggaattctaaataaatttcccagttaaagattattgtgacttcactgtatataaacatatttttatactttattgaaaggggacacctgtacattcttccatcatcactgtaaagacaaataaatgattatattcacagac

SEQ ID NO: 293974 - DNA, 2584 bp, Homo sapiens
gggggcgtggccccgagaaggcggagacaagatggccgcccatagcgcttggaggacctaagaggcggtggccggggccacgccccgggcaggagggccgctctgtgcgcgcccgctctatgatgcttgcgcgcgtcccccgcgcgccgcgctgcgggcggggcgggtctccgggattccaagggctcggttacggaagaagcgcagcgccggctggggagggggctggatgcgcgcgcacccggggggaggccgctgctgcccggagcaggaggagggggagagtgcggcgggcggcagcggcgctggcggcgactccgccatagagcaggggggccagggcagcgcgctcgccccgtccccggtgagcggcgtgcgcagggaaggcgctcggggcggcggccgtggccgggggcggtggaagcaggcgggccggggcggcggcgtctgtggccgtggccggggccggggccgtggccggggacggggacggggccggggccggggccgcggccgtcccccgagtggcggcagcggccttggcggcgacggcggcggctgcggcggcggcggcagcggtggcggcggcgccccccggcgggagccggtccctttcccgtcggggagcgcggggccggggcccaggggaccccgggccacggagagcgggaagaggatggattgcccggccctcccccccggatggaagaaggaggaagtgatccgaaaatctgggctaagtgctggcaagagcgatgtctactacttcagtccaagtggtaagaagttcagaagcaagcctcagttggcaaggtacctgggaaatactgttgatctcagcagttttgacttcagaactggaaagatgatgcctagtaaattacagaagaacaaacagagactgcgaaacgatcctctcaatcaaaataagggtaaaccagacttgaatacaacattgccaattagacaaacagcatcaattttcaaacaaccggtaaccaaagtcacaaatcatcctagtaataaagtgaaatcagacccacaacgaatgaatgaacagccacgtcagcttttctgggagaagaggctacaaggacttagtgcatcagatgtaacagaacaaattataaaaaccatggaactacccaaaggtcttcaaggagttggtccaggtagcaatgatgagacccttttatctgctgttgccagtgctttgcacacaagctctgcgccaatcacagggcaagtctccgctgctgtggaaaagaaccctgctgtttggcttaacacatctcaacccctctgcaaagcttttattgtcacagatgaagacatcaggaaacaggaagagcgagtacagcaagtacgcaagaaattggaagaagcactgatggcagacatcttgtcgcgagctgctgatacagaagagatggatattgaaatggacagtggagatgaagcctaagaatatgatcaggtaactttcgaccgactttccccaagagaaaattcctagaaattgaacaaaaatgtttccactggcttttgcctgtaagaaaaaaaatgtacccgagcacatagagctttttaatagcactaaccaatgcctttttagatgtatttttgatgtatatatctattattcaaaaaatcatgtttattttgagtcctaggacttaaaattagtcttttgtaatatcaagcaggaccctaagatgaagctgagcttttgatgccaggtgcaatctactggaaatgtagcacttacgtaaaacatttgtttcccccacagttttaataagaacagatcaggaattctaaataaatttcccagttaaagattattgtgacttcactgtatataaacatatttttatactttattgaaaggggacacctgtacattcttccatcatcactgtaaagacaaataaatgattatattcacagactgattggaattcctgcagttgaaaagcacacacaataaagaacccctcgttagccttcctctgatttacattcaactctgatccctgggccttaggtttgacatggaggtggaggaagatagcgcatatatttgcagtatgaactattgcctctggacgttgtgagaattgtgctttcaccagaatttctaagaatttctgctaaatatcacctagcatgtgtaattttttttccttgcctgtgacttggacttttgatagttctataagaataaggctttttcttcccttgggcatgagtcagatacacaaggacccttcaggtgttactagaaggcgtccatgtttattgttttttaaagaatgtttggcactctctaacgtccactagcttactgagttatcaggtgcaggtcagactcttggctacagtgagaggcagcttctagacagagttgcttaatgaaagggtttgtaatactttacaaaccattacctgtacctggcctggcctccaaaatattaacattctttttctgttgaaactcgcgagtgtaactttcataccacttgaatttattgatatttaattatgaaaactagcattacattattaaacgatttctaaaatc

SEQ ID NO: 293975 - DNA, 2793 bp, Homo sapiens
gggggcgtggccccgagaaggcggagacaagatggccgcccatagcgcttggaggacctaagaggcggtggccggggccacgccccgggcaggagggccgctctgtgcgcgcccgctctatgatgcttgcgcgcgtcccccgcgcgccgcgctgcgggcggggcgggtctccgggattccaagggctcggttacggaagaagcgcagcgccggctggggagggggctggatgcgcgcgcacccggggggaggccgctgctgcccggagcaggaggagggggagagtgcggcgggcggcagcggcgctggcggcgactccgccatagagcaggggggccagggcagcgcgctcgccccgtccccggtgagcggcgtgcgcagggaaggcgctcggggcggcggccgtggccgggggcggtggaagcaggcgggccggggcggcggcgtctgtggccgtggccggggccggggccgtggccggggacggggacggggccggggccggggccgcggccgtcccccgagtggcggcagcggccttggcggcgacggcggcggctgcggcggcggcggcagcggtggcggcggcgccccccggcgggagccggtccctttcccgtcggggagcgcggggccggggcccaggggaccccgggccacggagagcgggaagaggatggattgcccggccctcccccccggatggaagaaggaggaagtgatccgaaaatctgggctaagtgctggcaagagcgatgtctactacttcagtccaagtggtaagaagttcagaagcaagcctcagttggcaaggtacctgggaaatactgttgatctcagcagttttgacttcagaactggaaagatgatgcctagtaaattacagaagaacaaacagagactgcgaaacgatcctctcaatcaaaataagctgcgctggaacactcatcgtcctgcaccatggcatgcgctttcaagactctgcttgctcatacgctgtttgctctgcttggaatgtgcttacccccttccccttcatctggtgaactcctactcatccaagacccagcttcattgtctccatctctgggaagcctgccctgcatactccaggcagaaccaatcctttcctccataatgggtaaaccagacttgaatacaacattgccaattagacaaacagcatcaattttcaaacaaccggtaaccaaagtcacaaatcatcctagtaataaagtgaaatcagacccacaacgaatgaatgaacagccacgtcagcttttctgggagaagaggctacaaggacttagtgcatcagatgtaacagaacaaattataaaaaccatggaactacccaaaggtcttcaaggagttggtccaggtagcaatgatgagacccttttatctgctgttgccagtgctttgcacacaagctctgcgccaatcacagggcaagtctccgctgctgtggaaaagaaccctgctgtttggcttaacacatctcaacccctctgcaaagcttttattgtcacagatgaagacatcaggaaacaggaagagcgagtacagcaagtacgcaagaaattggaagaagcactgatggcagacatcttgtcgcgagctgctgatacagaagagatggatattgaaatggacagtggagatgaagcctaagaatatgatcaggtaactttcgaccgactttccccaagagaaaattcctagaaattgaacaaaaatgtttccactggcttttgcctgtaagaaaaaaaatgtacccgagcacatagagctttttaatagcactaaccaatgcctttttagatgtatttttgatgtatatatctattattcaaaaaatcatgtttattttgagtcctaggacttaaaattagtcttttgtaatatcaagcaggaccctaagatgaagctgagcttttgatgccaggtgcaatctactggaaatgtagcacttacgtaaaacatttgtttcccccacagttttaataagaacagatcaggaattctaaataaatttcccagttaaagattattgtgacttcactgtatataaacatatttttatactttattgaaaggggacacctgtacattcttccatcatcactgtaaagacaaataaatgattatattcacagactgattggaattcctgcagttgaaaagcacacacaataaagaacccctcgttagccttcctctgatttacattcaactctgatccctgggccttaggtttgacatggaggtggaggaagatagcgcatatatttgcagtatgaactattgcctctggacgttgtgagaattgtgctttcaccagaatttctaagaatttctgctaaatatcacctagcatgtgtaattttttttccttgcctgtgacttggacttttgatagttctataagaataaggctttttcttcccttgggcatgagtcagatacacaaggacccttcaggtgttactagaaggcgtccatgtttattgttttttaaagaatgtttggcactctctaacgtccactagcttactgagttatcaggtgcaggtcagactcttggctacagtgagaggcagcttctagacagagttgcttaatgaaagggtttgtaatactttacaaaccattacctgtacctggcctggcctccaaaatattaacattctttttctgttgaaactcgcgagtgtaactttcataccacttgaatttattgatatttaattatgaaaactagcattacattattaaacgatttctaaaatc

SEQ ID NO: 293976 - DNA, 1799 bp, Homo sapiens
gggggcgtggccccgagaaggcggagacaagatggccgcccatagcgcttggaggacctaagaggcggtggccggggccacgccccgggcaggagggccgctctgtgcgcgcccgctctatgatgcttgcgcgcgtcccccgcgcgccgcgctgcgggcggggcgggtctccgggattccaagggctcggttacggaagaagcgcagcgccggctggggagggggctggatgcgcgcgcacccggggggaggccgctgctgcccggagcaggaggagggggagagtgcggcgggcggcagcggcgctggcggcgactccgccatagagcaggggggccggggccggggccggggccgcggccgtcccccgagtggcggcagcggccttggcggcgacggcggcggctgcggcggcggcggcagcggtggcggcggcgccccccggcgggagccggtccctttcccgtcggggagcgcggggccggggcccaggggaccccgggccacggagagcgggaagaggatggattgcccggccctcccccccggatggaagaaggaggaagtgatccgaaaatctgggctaagtgctggcaagagcgatgtctactacttcagtccaagtggtaagaagttcagaagcaagcctcagttggcaaggtacctgggaaatactgttgatctcagcagttttgacttcagaactggaaagatgatgcctagtaaattacagaagaacaaacagagactgcgaaacgatcctctcaatcaaaataagggtaaaccagacttgaatacaacattgccaattagacaaacagcatcaattttcaaacaaccggtaaccaaagtcacaaatcatcctagtaataaagtgaaatcagacccacaacgaatgaatgaacagccacgtcagcttttctgggagaagaggctacaaggacttagtgcatcagatgtaacagaacaaattataaaaaccatggaactacccaaaggtcttcaaggagttggtccaggtagcaatgatgagacccttttatctgctgttgccagtgctttgcacacaagctctgcgccaatcacagggcaagtctccgctgctgtggaaaagaaccctgctgtttggcttaacacatctcaacccctctgcaaagcttttattgtcacagatgaagacatcaggaaacaggaagagcgagtacagcaagtacgcaagaaattggaagaagcactgatggcagacatcttgtcgcgagctgctgatacagaagagatggatattgaaatggacagtggagatgaagcctaagaatatgatcaggtaactttcgaccgactttccccaagagaaaattcctagaaattgaacaaaaatgtttccactggcttttgcctgtaagaaaaaaaatgtacccgagcacatagagctttttaatagcactaaccaatgcctttttagatgtatttttgatgtatatatctattattcaaaaaatcatgtttattttgagtcctaggacttaaaattagtcttttgtaatatcaagcaggaccctaagatgaagctgagcttttgatgccaggtgcaatctactggaaatgtagcacttacgtaaaacatttgtttcccccacagttttaataagaacagatcaggaattctaaataaatttcccagttaaagattattgtgacttcactgtatataaacatatttttatactttattgaaaggggacacctgtacattcttccatcatcactgtaaagacaaataaatgattatattcacagac

SEQ ID NO: 293977 - DNA, 2093 bp, Homo sapiens
gggggcgtggccccgagaaggcggagacaagatggccgcccatagcgcttggaggacctaagaggcggtggccggggccacgccccgggcaggagggccgctctgtgcgcgcccgctctatgatgcttgcgcgcgtcccccgcgcgccgcgctgcgggcggggcgggtctccgggattccaagggctcggttacggaagaagcgcagcgccggctggggagggggctggatgcgcgcgcacccggggggaggccgctgctgcccggagcaggaggagggggagagtgcggcgggcggcagcggcgctggcggcgactccgccatagagcaggggggccagggcagcgcgctcgccccgtccccggtgagcggcgtgcgcagggaaggcgctcggggcggcggccgtggccgggggcggtggaagcaggcgggccggggcggcggcgtctgtggccgtggccggggccggggccgtggccggggacggggacggggccggggccggggccgcggccgtcccccgagtggcggcagcggccttggcggcgacggcggcggctgcggcggcggcggcagcggtggcggcggcgccccccggcgggagccggtccctttcccgtcggggagcgcggggccggggcccaggggaccccgggccacggagagcgggaagaggatggattgcccggccctcccccccggatggaagaaggaggaagtgatccgaaaatctgggctaagtgctggcaagagcgatgtctactacttcagtccaagtggtaagaagttcagaagcaagcctcagttggcaaggtacctgggaaatactgttgatctcagcagttttgacttcagaactggaaagatgatgcctagtaaattacagaagaacaaacagagactgcgaaacgatcctctcaatcaaaataagggtaaaccagacttgaatacaacattgccaattagacaaacagcatcaattttcaaacaaccggtaaccaaagtcacaaatcatcctagtaataaagtgaaatcagacccacaacgaatgaatgaacagccacgtcagtgttttttcctcttcaggtgagccaggaaaacagaagatatttggagccacattggatcagcatcttgctatagatgtctcaagatttgaagttctaaacttgctttactgttggtccccaagagattcaacaggggccatcttttctgggagaagaggctacaaggacttagtgcatcagatgtaacagaacaaattataaaaaccatggaactacccaaaggtcttcaaggagttggtccaggtagcaatgatgagacccttttatctgctgttgccagtgctttgcacacaagctctgcgccaatcacagggcaagtctccgctgctgtggaaaagaaccctgctgtttggcttaacacatctcaacccctctgcaaagcttttattgtcacagatgaagacatcaggaaacaggaagagcgagtacagcaagtacgcaagaaattggaagaagcactgatggcagacatcttgtcgcgagctgctgatacagaagagatggatattgaaatggacagtggagatgaagcctaagaatatgatcaggtaactttcgaccgactttccccaagagaaaattcctagaaattgaacaaaaatgtttccactggcttttgcctgtaagaaaaaaaatgtacccgagcacatagagctttttaatagcactaaccaatgcctttttagatgtatttttgatgtatatatctattattcaaaaaatcatgtttattttgagtcctaggacttaaaattagtcttttgtaatatcaagcaggaccctaagatgaagctgagcttttgatgccaggtgcaatctactggaaatgtagcacttacgtaaaacatttgtttcccccacagttttaataagaacagatcaggaattctaaataaatttcccagttaaagattattgtgacttcactgtatataaacatatttttatactttattgaaaggggacacctgtacattcttccatcatcactgtaaagacaaataaatgattatattcacagac

SEQ ID NO: 293978 - DNA, 1843 bp, Homo sapiens
gggggcgtggccccgagaaggcggagacaagatggccgcccatagcgcttggaggacctaagaggcggtggccggggccacgccccgggcaggagggccgctctgtgcgcgcccgctctatgatgcttgcgcgcgtcccccgcgcgccgcgctgcgggcggggcgggtctccgggattccaagggctcggttacggaagaagcgcagcgccggctggggagggggctggatgcgcgcgcacccggggggaggccgctgctgcccggagcaggaggagggggagagtgcggcgggcggcagcggcgctggcggcgactccgccatagagcaggggggccagggcagcgcgctcgccccgtccccggtgagcggcgtgcgcagggaaggcgctcggggcggcggccgtggccgggggcggtggaagcaggcgggccggggcggcggcgtctgtggccgtggccggggccggggccgtggccggggacggggacggggccggggccggggccgcggccgtcccccgagtggcggcagcggccttggcggcgacggcggcggctgcggcggcggcggcagcggtggcggcggcgccccccggcgggagccggtccctttcccgtcggggagcgcggggccggggcccaggggaccccgggccacggagagcgggaagaggatggattgcccggccctcccccccggatggaagaaggaggaagtgatccgaaaatctgggctaagtgctggcaagagcgatgtctactacttcagtccaagtggtaagaagttcagaagcaagcctcagttggcaaggtacctgggaaatactgttgatctcagcagttttgacttcagaactggaaagatgatgcctagtaaattacagaagaacaaacagagactgcgaaacgatcctctcaatcaaaataagggtaaaccagacttgaatacaacattgccaattagacaaacagcatcaattttcaaacaaccggtaaccaaagtcacaaatcatcctagtaataaagtgaaatcagacccacaacgaatgaatgaacagccacgtcagcttttctgggagaagaggctacaaggacttagtgcatcagatgtaacagaacaaattataaaaaccatggaactacccaaaggtcttcaaggagttggtccaggtagcaatgatgagacccttttatctgctgttgccagtgctttgcacacaagctctgcgccaatcacagggcaagtctccgctgctgtggaaaagaaccctgctgtttggcttaacacatctcaacccctctgcaaagcttttattgtcacagatgaagacatcaggaaacaggaagagcgagtacagcaagtacgcaagaaattggaagaagcactgatggcagacatcttgtcgcgagctgctgatacagaagagatggatattgaaatggacagtggagatgaagcctaagaatatgatcaggtaactttcgaccgactttccccaagagaaaattcctagaaattgaacaaaaatgtttccactggcttttgcctgtaagaaaaaaaatgtacccgagcacatagagctttttaatagcactaaccaatgcctttttagatgtatttttgatgtatatatctattattcaaaaaatcatgtttattttgagtcctaggacttaaaattagtcttttgtaatatcaagcaggaccctaagatgaagctgagcttttgatgccaggtgcaatctactggaaatgtagcacttacgtaaaacatttgtttcccccacagttttaataagaacagatcaggaattctaaataaatttcccagttaaagatt

SEQ ID NO: 293979 - DNA, 677 bp, Homo sapiens
gatagtgagatacatctatttagtcttctatatagagaccaccgcgcccgcccgcttgcggcggaaacaggaagagcgagtacagcaagtacgcaagaaattggaagaagcactgatggcagacatcttgtcgcgagctgctgatacagaagagatggatattgaaatggacagtggagatgaagcctaagaatatgatcaggtaactttcgaccgactttccccaagagaaaattcctagaaattgaacaaaaatgtttccactggcttttgcctgtaagaaaaaaaatgtacccgagcacatagagctttttaatagcactaaccaatgcctttttagatgtatttttgatgtatatatctattattcaaaaaatcatgtttattttgagtcctaggacttaaaattagtcttttgtaatatcaagcaggaccctaagatgaagctgagcttttgatgccaggtgcaatctactggaaatgtagcacttacgtaaaacatttgtttcccccacagttttaataagaacagatcaggaattctaaataaatttcccagttaaagattattgtgacttcactgtatataaacatatttttatactttattgaaaggggacacctgtacattcttccatcatcactgtaaagacaaataaatgattatattcacagac

SEQ ID NO: 293980 - DNA, 1809 bp, Homo sapiens
gggggcgtggccccgagaaggcggagacaagatggccgcccatagcgcttggaggacctaagaggcggtggccggggccacgccccgggcaggagggccgctctgtgcgcgcccgctctatgatgcttgcgcgcgtcccccgcgcgccgcgctgcgggcggggcgggtctccgggattccaagggctcggttacggaagaagcgcagcgccggctggggagggggctggatgcgcgcgcacccggggggaggccgctgctgcccggagcaggaggagggggagagtgcggcgggcggcagcggcgctggcggcgactccgccatagagcaggggggccagggcagcgcgctcgccccgtccccggtgagcggcgtgcgcagggaaggcgctcggggcggcggccgtggccgggggcggtggaagcaggcgggccggggcggcggcgtctgtggccgtggccggggccggggccgtggccggggacggggacggggccggggccggggccgcggccgtcccccgagtggcggcagcggccttggcggcgacggcggcggctgcggcggcggcggcagcggtggcggcggcgccccccggcgggagccggtccctttcccgtcggggagcgcggggccggggcccaggggaccccgggccacggagagcgggaagaggatggattgcccggccctcccccccggatggaagaaggaggaagtgatccgaaaatctgggctaagtgctggcaagagcgatgtctactacttcagtccaagtggtaagaagttcagaagcaagcctcagttggcaaggtacctgggaaatactgttgatctcagcagttttgacttcagaactggaaagatgatgcctagtaaattacagaagaacaaacagagactgcgaaacgatcctctcaatcaaaataagggtaaaccagacttgaatacaacattgccaattagacaaacagcatcaattttcaaacaaccggtaaccaaagtcacaaatcatcctagtaataaagtgaaatcagacccacaacgaatgaatgaacagccacgtcagcttttctgggagaagaggctacaaggacttagtgcatcagatgtaacagaacaaattataaaaaccatggaactacccaaaggtcttcaaggagttggtccaggtagcaatgatgagacccttttatctgctgttgccagtgctttgcacacaagctctgcgccaatcacagggcaagtctccgctgctgtggaaaagaaccctgctgtttggcttaacacatctcaacccctctgcaaagcttttattgtcacagatgaagacatcaggaaacaggaagagcgagtacagcaagtacgcaagaaattggaagaagcactgatggcagacatcttgtcgcgagctgctgatacagaagagatggatattgaaatggacagtggagatgaagcctaagaatatgatcaggtaaactgacaccagagagagtgacttggaacttaaggtgtgttttcttggccggacatagtgcttctgcctgtaatcccagcacttgggtggctgaggcgggcgatcagttgagctcagtagttcgagaccagcttgagcaacatggcaaaaccccatctctacccaaaatacaaaaaattaactgggtgtggtgttgtgtgtgtgtggttccagctactcaggaggctgaggtgggaggatcactcgagcctgggaggcagaaatttcagtgagccaaaattgtgctactgttctccaacctgggtgacagagtgaaaccccatctcaga

SEQ ID NO: 293981 - DNA, 1553 bp, Homo sapiens
gggggcgtggccccgagaaggcggagacaagatggccgcccatagcgcttggaggacctaagaggcggtggccggggccacgccccgggcaggagggccgctctgtgcgcgcccgctctatgatgcttgcgcgcgtcccccgcgcgccgcgctgcgggcggggcgggtctccgggattccaagggctcggttacggaagaagcgcagcgccggctggggagggggctggatgcgcgcgcacccggggggaggccgctgctgcccggagcaggaggagggggagagtgcggcgggcggcagcggcgctggcggcgactccgccatagagcaggggggccagggcagcgcgctcgccccgtccccggtgagcggcgtgcgcagggaaggcgctcggggcggcggccgtggccgggggcggtggaagcaggcgggccggggcggcggcgtctgtggccgtggccggggccggggccgtggccggggacggggacggggccggggccggggccgcggccgtcccccgagtggcggcagcggccttggcggcgacggcggcggctgcggcggcggcggcagcggtggcggcggcgccccccggcgggagccggtccctttcccgtcggggagcgcggggccggggcccaggggaccccgggccacggagagcgggaagaggatggattgcccggccctcccccccggatggaagaaggaggaagtgatccgaaaatctgggctaagtgctggcaagagcgatgtctactacttcagtccaagtggtaagaagttcagaagcaagcctcagttggcaaggtacctgggaaatactgttgatctcagcagttttgacttcagaactggaaagatgatgcctagtaaattacagaagaacaaacagagactgcgaaacgatcctctcaatcaaaataagggtaaaccagacttgaatacaacattgccaattagacaaacagcatcaattttcaaacaaccggtaaccaaagtcacaaatcatcctagtaataaagtgaaatcagacccacaacgaatgaatgaacagccacgtcagcttttctgggagaagaggctacaaggacttagtgcatcagatgtaacagaacaaattataaaaaccatggaactacccaaaggtcttcaaggagttggtccaggtagcaatgatgagacccttttatctgctgttgccagtgctttgcacacaagctctgcgccaatcacagggcaagtctccgctgctgtggaaaagaaccctgctgtttggcttaacacatctcaacccctctgcaaagcttttattgtcacagatgaagacatcaggaaacaggaagagcgagtacagcaagtacgcaagaaattggaagaagcactgatggcagacatcttgtcgcgagctgctgatacagaagagatggatattgaaatggacagtggagatgaagcctaagaatatgatcaggtaactttcgaccgacttccccaagagaaaatacctagagattgaaccggatagctgcctaatcctcggagtcacc

SEQ ID NO: 293982 - DNA, 1553 bp, Homo sapiens
gggggcgtggccccgagaaggcggagacaagatggccgcccatagcgcttggaggacctaagaggcggtggccggggccacgccccgggcaggagggccgctctgtgcgcgcccgctctatgatgcttgcgcgcgtcccccgcgcgccgcgctgcgggcggggcgggtctccgggattccaagggctcggttacggaagaagcgcagcgccggctggggagggggctggatgcgcgcgcacccggggggaggccgctgctgcccggagcaggaggagggggagagtgcggcgggcggcagcggcgctggcggcgactccgccatagagcaggggggccagggcagcgcgctcgccccgtccccggtgagcggcgtgcgcagggaaggcgctcggggcggcggccgtggccgggggcggtggaagcaggcgggccggggcggcggcgtctgtggccgtggccggggccggggccgtggccggggacggggacggggccggggccggggccgcggccgtcccccgagtggcggcagcggccttggcggcgacggcggcggctgcggcggcggcggcagcggtggcggcggcgccccccggcgggagccggtccctttcccgtcggggagcgcggggccggggcccaggggaccccgggccacggagagcgggaagaggatggattgcccggccctcccccccggatggaagaaggaggaagtgatccgaaaatctgggctaagtgctggcaagagcgatgtctactacttcagtccaagtggtaagaagttcagaagcaagcctcagttggcaaggtacctgggaaatactgttgatctcagcagttttgacttcagaactggaaagatgatgcctagtaaattacagaagaacaaacagagactgcgaaacgatcctctcaatcaaaataagggtaaaccagacttgaatacaacattgccaattagacaaacagcatcaattttcaaacaaccggtaaccaaagtcacaaatcatcctagtaataaagtgaaatcagacccacaacgaatgaatgaacagccacgtcagcttttctgggagaagaggctacaaggacttagtgcatcagatgtaacagaacaaattataaaaaccatggaactacccaaaggtcttcaaggagttggtccaggtagcaatgatgagacccttttatctgctgttgccagtgctttgcacacaagctctgcgccaatcacagggcaagtctccgctgctgtggaaaagaaccctgctgtttggcttaacacatctcaacccctctgcaaagcttttattgtcacagatgaagacatcagggaaaccggaaaacgagttcagaagttaggacgaactgggagaagcccgatgtgcgaatctggtgcgagaggtaatcagagacatgaggttgaatgggccgtgtataagcgtaaattgtagggatattgaaggtttcccaggaaatttcaaagcgaagttcgcgtgggtatggggaacgacgctattgtagtaggacggttaagtgaggtatttt

SEQ ID NO: 293983 - DNA, 1376 bp, Homo sapiens
gggggcgtggccccgagaaggcggagacaagatggccgcccatagcgcttggaggacctaagaggcggtggccggggccacgccccgggcaggagggccgctctgtgcgcgcccgctctatgatgcttgcgcgcgtcccccgcgcgccgcgctgcgggcggggcgggtctccgggattccaagggctcggttacggaagaagcgcagcgccggctggggagggggctggatgcgcgcgcacccggggggaggccgctgctgcccggagcaggaggagggggagagtgcggcgggcggcagcggcgctggcggcgactccgccatagagcaggggggccagggcagcgcgctcgccccgtccccggtgagcggcgtgcgcagggaaggcgctcggggcggcggccgtggccgggggcggtggaagcaggcgggccggggcggcggcgtctgtggccgtggccggggccggggccgtggccggggacggggacggggccggggccggggccgcggccgtcccccgagtggcggcagcggccttggcggcgacggcggcggctgcggcggcggcggcagcggtggcggcggcgccccccggcgggagccggtccctttcccgtcggggagcgcggggccggggcccaggggaccccgggccacggagagcgggaagaggatggattgcccggccctcccccccggatggaagaaggaggaagtgatccgaaaatctgggctaagtgctggcaagagcgatgtctactacttcagtccaagtggtaagaagttcagaagcaagcctcagttggcaaggtacctgggaaatactgttgatctcagcagttttgacttcagaactggaaagatgatgcctagtaaattacagaagaacaaacagagactgcgaaacgatcctctcaatcaaaataagggtaaaccagacttgaatacaacattgccaattagacaaacagcatcaattttcaaacaaccggtaaccaaagtcacaaatcatcctagtaataaagtgaaatcagacccacaacgaatgaatgaacagccacgtcagcttttctgggagaagaggctacaaggacttagtgcatcagatgtaacagaacaaattataaaaaccatggaactacccaaaggtcttcaaggagttggtccaggtagcaatgatgagacccttttatctgctgttgccagtgctttgcacacaagctctgcgccaatcacagggcaagtctccgctgctgtggaaaagaaccctgctgtttggcttaacacatctcaacccctctgcaaagcttttattcccacagttttaataagaacagatcaggaattctaaataaatttcccagttaaagatt

SEQ ID NO: 293984 - DNA, 1363 bp, Homo sapiens
gggggcgtggccccgagaaggcggagacaagatggccgcccatagcgcttggaggacctaagaggcggtggccggggccacgccccgggcaggagggccgctctgtgcgcgcccgctctatgatgcttgcgcgcgtcccccgcgcgccgcgctgcgggcggggcgggtctccgggattccaagggctcggttacggaagaagcgcagcgccggctggggagggggctggatgcgcgcgcacccggggggaggccgctgctgcccggagcaggaggagggggagagtgcggcgggcggcagcggcgctggcggcgactccgccatagagcaggggggccagggcagcgcgctcgccccgtccccggtgagcggcgtgcgcagggaaggcgctcggggcggcggccgtggccgggggcggtggaagcaggcgggccggggcggcggcgtctgtggccgtggccggggccggggccgtggccggggacggggacggggccggggccggggccgcggccgtcccccgagtggcggcagcggccttggcggcgacggcggcggctgcggcggcggcggcagcggtggcggcggcgccccccggcgggagccggtccctttcccgtcggggagcgcggggccggggcccaggggaccccgggccacggagagcgggaagaggatggattgcccggccctcccccccggatggaagaaggaggaagtgatccgaaaatctgggctaagtgctggcaagagcgatgtctactacttcagtccaagtggtaagaagttcagaagcaagcctcagttggcaaggtacctgggaaatactgttgatctcagcagttttgacttcagaactggaaagatgatgcctagtaaattacagaagaacaaacagagactgcgaaacgatcctctcaatcaaaataagctgcgctggaacactcatcgtcctgcaccatggcatgcgctttcaagactctgcttgctcatacgctgtttgctctgcttggaatgtgcttacccccttccccttcatctggtgaactcctactcatccaagacccagcttcattgtctccatctctgggaagcctgccctgcatactccaggcagaaccaatcctttcctccataatgcttccctggtgctttgccattgtatttgtgacttgtttgtctgcttcagctagactgtgagctccatgagggcagggaccatgtctttttttgcttttgcacacggtaggtacttaatattgctttatgtttatttgatttaccatccacctcattctagaagtgtatagtggtaataaatgtttattaaataaataaattataccgtacattattttggaaa

SEQ ID NO: 293985 - DNA, 1387 bp, Homo sapiens
gggggcgtggccccgagaaggcggagacaagatggccgcccatagcgcttggaggacctaagaggcggtggccggggccacgccccgggcaggagggccgctctgtgcgcgcccgctctatgatgcttgcgcgcgtcccccgcgcgccgcgctgcgggcggggcgggtctccgggattccaagggctcggttacggaagaagcgcagcgccggctggggagggggctggatgcgcgcgcacccggggggaggccgctgctgcccggagcaggaggagggggagagtgcggcgggcggcagcggcgctggcggcgactccgccatagagcaggggggccagggcagcgcgctcgccccgtccccggtgagcggcgtgcgcagggaaggcgctcggggcggcggccgtggccgggggcggtggaagcaggcgggccggggcggcggcgtctgtggccgtggccggggccggggccgtggccggggacggggacggggccggggccggggccgcggccgtcccccgagtggcggcagcggccttggcggcgacggcggcggctgcggcggcggcggcagcggtggcggcggcgccccccggcgggagccggtccctttcccgtcggggagcgcggggccggggcccaggggaccccgggccacggagagcgggaagaggatggattgcccggccctcccccccggatggaagaaggaggaagtgatccgaaaatctgggctaagtgctggcaagagcgatgtctactacttcagtccaagtggtaagaagttcagaagcaagcctcagttggcaaggtacctgggaaatactgttgatctcagcagttttgacttcagaactggaaagatgatgcctagtaaattacagaagaacaaacagagactgcgaaacgatcctctcaatcaaaataagtttgtgtgcacttttctgctctagctgcgctggaacactcatcgtcctgcaccatggcatgcgctttcaagactctgcttgctcatacgctgtttgctctgcttggaatgtgcttacccccttccccttcatctggtgaactcctactcatccaagacccagcttcattgtctccatctctgggaagcctgccctgcatactccaggcagaaccaatcctttcctccataatgcttccctggtgctttgccattgtatttgtgacttgtttgtctgcttcagctagactgtgagctccatgagggcagggaccatgtctttttttgcttttgcacacggtaggtacttaatattgctttatgtttatttgatttaccatccacctcattctagaagtgtatagtggtaataaatgtttattaaataaataaattataccgtacattattttggaaa

SEQ ID NO: 293986 - DNA, 2759 bp, Homo sapiens
  misc_feature (25)..(25): n is a, c, g, or t
tccggaattcccgggatggcggagnagcggtgcgctcagctcccgggagcggcccgagcagccgagcgcccagggctgcccttcccgggccggcgggctccccgggctccccgccgccgccccgtgcgccccgggagggcccggcatgctgcgccagctgctgctcgccgcgctctgcctggcgggtcccccagcgcccgcgcgcgcctgccagctgccctccgagtggaggcccctgagcgagggctgccgcgccgagctggccgagaccatcgtgtacgccagggtgctggcgctgcaccccgaggcgcccggcctctacaaccacctgccctggcagtaccacgccggccaggggggcctcttctactcggccgaggtcgagatgctgtgcgaccaggcgtggggcagcatgctggaggtgcccgccggctccaggctcaacctcaccggcctgggctacttctcgtgccactcccacaccgtggtccaggactactcctatttcttcttcctcaggatggatgaaaattataacctcttgcctcacggagtcaatttccaagatgccatcttcccagacactcaagagaacagaaggatgttttctagccttttccagttttcaaactgttcgcaagggcagcagctggcgactttctccagtgactgggaaatccaggaagacagtaggctcatgtgctcctcggtgcagaaggccttgtttgaggaggaggaccacgtcaagaaactgcagcagaaagtggccaccctggagaagcgcaaccggcagctccgggagcgagtgaagaaggtcaagaggtccttgcggcaggcgcgtaagaagggccgccacctggagctggcgaaccagaaactcagtgagaagctggcggcgggcgcgctgccgcacatcaacgcccgggggcccgtgcgccccccctacctgcgggggtaacgggcctgggggctgccaggtgtgcagggccaatcctggcggtaattgagaatgagtgaggtttcgtacatgcagctatttcaagggttgtaagagtttttgtttttaatcacgcatttggtagagtctaaatggataaaatgcaaggcttgctttccccttgggtgctggcctcaatgtcagaccccacgcgctgccccttcctggcctgaccccagacgcagtgcctggcagtccagaggcagtgggatccctgagtgctgaatgctcgcctgcagagcagcccagaaagagccctgactggggagagaacattttagaatctctagtgtaaaagacatcaacgtgcttagcctttatttcagaaaaaaatcagggtggttcccagctccccagtccaggacaaccattagtcctgatgagtgagctgacgctggtgctggaacctgctggcacctcactggccacatctttggaaggggatggtggccttgcatccaagatgcctgaaaatcagcacgtgcagggcctccctatccagccagcattttccttccagctgaggcaggtgaagacttcataagctcatcacaggggagggaattaggagcagggcagcaggtaattaaacaagataaattatacctgatttccaacaccagctacaaagagttgaagatgatacctatgggtcgcgttaacacagggggcaactgccttgatcggcctgccatgggtcatcagactgcttcctaaattgagagaaactgagcaatctctcagccactgctatagtctaacttcttgtttgctgagtaattgtttctaatgtctctgaactcaaagtgaggtgctccaagacgctgtgaacttctgcaaagacacctccttacctactgggatcacgtgacctgacctcactcccagccaggctcccaaagggctcattccagccattccaatctcttcttctttatgcaaacacttttcccccacaacaagccttgtttgttccgataggaatacgtgtacgtcagtgcacttgtccttacgtcagttccttacaccaccaaagcacttcacctttctggaaataaaacttttaagacactactataagtaaaaatgagagtattcactagacttattgctcaggcacatttgagtgggtcccagctgtgtgattaagaagtcaactgggtggccttttctgggttatcttctgatcatggcctttcaacccaacaagggcccttccctgctcttccaccagtaaaggctcctggcctctcatcaggatctgccccccagagacccccccagacactgcagggcctggtgatgctgtcctctgtaccggaaatggcaggcactgtcagatttccactcttctgcctttaggaaggctgggtgcttcttgctctgacagccagtctggggagatgactcttacgttgcttgagtcttggtggcaggctgctgtccacgggggagaagtctctgctctggactggacagaagagagacttttaccctggggcactcacacggccaagcttctgccaccacttcattagctgtattctccatagtatggtgaaatagcaggtgcgtcttctagtttattcctcctggggacatttcctcaaagcagttttgcgcccccgcaagggaatggtcagcctaagggtaatgtacagcccgtgcttggagaaccatggaagctacacccctacaggtgcatactgttctgcttttccaataaatacgagcggcgatttcaaccacaacagtgagatga

SEQ ID NO: 293987 - DNA, 1564 bp, Homo sapiens
  misc_feature (25)..(25): n is a, c, g, or t
tccggaattcccgggatggcggagnagcggtgcgctcagctcccgggagcggcccgagcagccgagcgcccagggctgcccttcccgggccggcgggctccccgggctccccgccgccgccccgtgcgccccgggagggcccggcatgctgcgccagctgctgctcgccgcgctctgcctggcgggtcccccagcgcccgcgcgcgcctgccagctgccctccgagtggaggcccctgagcgagggctgccgcgccgagctggccgagaccatcgtgtacgccagggtgctggcgctgcaccccgaggcgcccggcctctacaaccacctgccctggcagtaccacgccggccaggggggcctcttctactcggccgaggtcgagatgctgtgcgaccaggcgtggggcagcatgctggaggtgcccgccggctccaggctcaacctcaccggcctgggctacttctcgtgccactcccacaccgtggtccaggactactcctatttcttcttcctcaggatggatgaaaattataacctcttgcctcacggagtcaatttccaagatgccatcttcccagacactcaagagaacagaaggatgttttctagccttttccagttttcaaactgttcgcaagggcagcagctggcgactttctccagtgactgggaaatccaggaagacagtaggctcatgtgctcctcggtgcagaaggccttgtttgaggaggaggaccacgtcaagaaactgcagcagaaagtggccaccctggagaagcgcaaccggcagctccgggagcgagtgaagaaggtcaagaggtccttgcggcaggcgcgtaagaagggccgccacctggagctggcgaaccagaaactcagtgagaagctggcggcgggcgcgctgccgcacatcaacgcccgggggcccgtgcgccccccctacctgcgggggtaacgggcctgggggctgccaggtgtgcagggccaatcctggcggtaattgagaatgagtgaggtttcgtacatgcagctatttcaagggttgtaagagtttttgtttttaatcacgcatttggtagagtctaaatggataaaatgcaaggcttgctttccccttgggtgctggcctcaattgtcagatttccactcttctgcctttaggaaggctgggtgcttcttgctctgacagccagtctggggagatgactcttacgttgcttgagtcttggtggcaggctgctgtccacgggggagaagtctctgctctggactggacagaagagagacttttaccctggggcactcacacggccaagcttctgccaccacttcattagctgtattctccatagtatggtgaaatagcaggtgcgtcttctagtttattcctcctggggacatttcctcaaagcagttttgcgcccccgcaagggaatggtcagcctaagggtaatgtacagcccgtgcttggagaaccatggaagctacacccctacaggtgcatactgttctgcttttccaataaatacgagcggcgatttcaaccacaacagtgagatga

SEQ ID NO: 293988 - DNA, 4896 bp, Homo sapiens
ccaagatgcagatgtagcagaaactccacatcccatgtttacaaaatatggcaacagtttacttgaagaagccagaggagaaataagaaatttagaaaacgttattcagtcacaaagaggccagatagaggagttagagcacttggctgagatcctgaaaactcagttgaggagaaaagaaaatgaaattgagttatctcttcttcagcttcgagaacagcaagctacagatcaaaggtcaaatattcgggacaatgtagaaatgattaagcttcataaacagctagtagagaaaagcaatgctctttcagcaatggaaggaaaatttattcagcttcaagagaagcaaagaactctcaaaatcagccacgatgctttgatggcaaatggggatgaattaaacatgcaacttaaagagcagcgtttaaaatgctgcagtcttgagaaacaattacattctatgaagttttctgaaagaagaatagaagagctgcaggatagaattaatgatttagaaaaggaacgggaacttttaaaggaaaactatgataaactttatgacagtgccttcagtgctgcccatgaagagcaatggaagttaaaggagcaacagctgaaagtgcagattgctcagctcgagactgccttgaagtctgacttaacagacaaaactgaaatccttgacagattaaaaactgaaagagatcaaaatgaaaaactcgttcaagagaatagagaactacagttacagtatctggaacaaaagcaacaacttgatgaacttaaaaaacgcataaaattgtacaaccaggagaatgatattaatgctgatgaattgagtgaagctctcctacttataaaggctcaaaaagaacaaaaaaatggagacctttcctttttagtgaaagtagatagtgaaattaataaagatctagaacgctctatgagagagctgcaagcaactcatgcagaaacggtgcaagagctggaaaagacaagaaacatgctaattatgcaacacaaaattaataaagattatcagatggaggttgaggcagtgacccgtaagatggaaaatttgcagcaagattatgaactcaaagtggaacagtatgttcatcttcttgatatcagggctgcacgtatccataaactagaagcccaattaaaggatattgcctatggcaccaagcagtacaaatttaaaccagaaatcatgccagatgactctgttgatgaatttgatgaaaccatccacttagaacgaggcgaaaatctatttgaaatccatatcaacaaagtaaccttttcttctgaagttttacaggcatctggagataaagagcctgtcactttctgtacctatgctttctatgattttgaactacagacaactcccgtagtgcgaggccttcatcccgaatataacttcacttctcaatatcttgttcatgttaatgacttatttttgcaatatattcagaagaatactatcacccttgaggtccaccaggcttatagcacagaatatgaaacaattgcagcatgtcaattaaaatttcacgaaattcttgaaaaaagcggccgaatattttgtacagcaagtttgattggaacaaaaggagacatcccaaattttggcacagtggaatactggttccgattaagagttcccatggatcaagcaattcgactttatcgagaaagggcaaaggctttggggtatataacatcaaattttaaggggccagagcatatgcagtcgttaagtcagcaagcacccaaaactgctcaactcagttctacagattccacagatggcaacttaaatgaacttcacattacaataagatgttgcaaccacctgcagtcccgagcaagccacctgcagccacacccatatgttgtgtacaagttttttgattttgcagaccatgatacagctatcattcccagtagcaatgatccacagtttgatgatcatatgtatttcccagtgccaatgaatatggacttggatcgataccttaagtcagagtctctgagtttttatgtttttgatgatagtgatacccaggagaatatttacataggaaaagtcaatgtgcctctgatttcgttggcacatgacaggtgtatctcaggaatatttgagttaacagaccatcaaaagcatcctgctggcaccatccatgttatattgaaatggaaatttgcttaccttccaccaagtggatcaataacaactgaagacttaggaaatttcattcgcagcgaagagccagaagttgttcaaagacttcctccagcatcctctgttagcacactagttttagcaccaagacctaaaccaagacaacgtttaacacctgtagataagaaggtatctttcgtggatatcatgccacatcagagtgatgtttcacaagaaggcagtgtagatgaggtaaaagagaatactgagaaaatgcagcaaggaaaagatgatgtgtctttactatctgaaggtcagcttgcagaacaaagcttggcatcttctgaagatgaaacagaaataacagaggacttggaaccagaagttgaagaggacatgtcagcttctgacagtgatgactgtattattccaggtcctatctccaagaatatcaaacagccatcagaaaaaattcggattgagatcatagctctaagccttaatgattctcaagtaaccatggatgacactatccaacggctgtttgttgagtgtcgattctacagtcttcctgctgaagagacacccgtgtcacttccaaaacccaagagtgggcagtgggtctactataactatagcaatgtgatctacgtggataaagaaaacaacaaagcaaagagagacatcttaaaagctatactacaaaaacaagagatgcctaatagaagccttcgcttcaccgtggtcagtgaccctccagaggacgagcaggacctggagtgtgaggacattggcgtggctcacgtcgaccttgccgacatgtttcaggaagggagggacctcattgagcaaaatatcgatgtttttgatgcacgagcagatggtgaaggtattggcaagctcagggtaacagtcgaagctctccatgccctccagtctgtctacaagcaatacagagatgacttggaggcttgaaagcaaatgctccagaggcatctcctactcctcagtaaatgctcacatgaaagttcctacatgagatttttgtaattactctggtgtatataatctataattcatgggaagctgggagcggggagacctgggtttgaagtgttgaagttttgtatactttttcatttgtttatttctctattccctccttctcataactgccacccctcaggacttaagttctccataatgggcagtaccttctcaataatttatacctacgtgatagcgtgagaaagtctatttgcattttcaacattttcttaggaagaaccgaaatgcaattcccatttttatttttaataagcaaaagcataaatcttagaaaacctatgaaaaagaaatacttttatgttatccctaatcgtcccactaaatggaatgcctatgattagcttcattaagagttttatactgtgaagattttattagaagcaatatatgaaaattacttggattaatgtgttaatcttcctctttaaaatgctaatatccattttatgcacattaaagctcagtatgcattttctttgatgcatgcagtttctatcaattaaatataaagaatgaaacttagcaccaacttattcaatgactgcaagttttttgtctttctttcttaaaagttcattctatttgtattattttcatacatttgtaatggtgacccagggatgtatatataaaaaggagatagttatatagatagatgtgaaatttacacgttgaaaacttagtatatgacacagaaagaaattatgaaaagtataactcaaattctgatatgcttagttagacgtgaaaggagtatctttttatcattttttaaatttacatcaagccagtacagtgccagggtgtatctgggtaaccagatcctcgaaaagcagctctgaaagttaattttctagcttttacccaatctcactgaaggatttaattgatatttttaatggagctgtgaatcaatgctgcaaaggaattgtctctagaggtctaggatataatgcatttcattttttaatttacttttttatttgtcattttcttcaaaggatttttataggctgtgggttttcactgtttgcaaacaggctatgttccttcttaagcatatgtaaagtattcagggagataagtaatttattaaaatctacctaatttgccgtgatatattaaatctctgcttcagtgatcacagaccatttcatttagagaattaggcattccctctttgtgtgattaaagctctggaaaatgagttctttgctcctatttgtgaacattcaaagcctgctaatggcaagaagatggaatagattatgagacaattcattacagttcaatagaaaaaaaaagcagctataatgcaaaaatgcaagtatgaatatctgcatatagtttgaaccatctgtgctctaatggcttcaataatgactctcgtctttagaaggctttgaaatgacatccgtacaatattaatttgttgatgtacattgtgggaccagtagagtatgatctgaccacagaaatctataaattctgtctataccactgggcctccctgtcctggggcctgccatctccgagaagaatcttgctctcatccaactctgcaaatcttcataacaactcgttcctctggaaccttctggagaccacaaacatctgcagactaaacctctcca

SEQ ID NO: 293989 - DNA, 3897 bp, Homo sapiens
ccaagatgcagatgtagcagaaactccacatcccatgtttacaaaatatggcaacagtttacttgaagaagccagaggagaaataagaaatttagaaaacgttattcagtcacaaagaggccagatagaggagttagagcacttggctgagatcctgaaaactcagttgaggagaaaagaaaatgaaattgagttatctcttcttcagcttcgagaacagcaagctacagatcaaaggtcaaatattcgggacaatgtagaaatgattaagcttcataaacagctagtagagaaaagcaatgctctttcagcaatggaaggaaaatttattcagcttcaagagaagcaaagaactctcaaaatcagccacgatgctttgatggcaaatggggatgaattaaacatgcaacttaaagagcagcgtttaaaatgctgcagtcttgagaaacaattacattctatgaagttttctgaaagaagaatagaagagctgcaggatagaattaatgatttagaaaaggaacgggaacttttaaaggaaaactatgataaactttatgacagtgccttcagtgctgcccatgaagagcaatggaagttaaaggagcaacagctgaaagtgcagattgctcagctcgagactgccttgaagtctgacttaacagacaaaactgaaatccttgacagattaaaaactgaaagagatcaaaatgaaaaactcgttcaagagaatagagaactacagttacagtatctggaacaaaagcaacaacttgatgaacttaaaaaacgcataaaattgtacaaccaggagaatgatattaatgctgatgaattgagtgaagctctcctacttataaaggctcaaaaagaacaaaaaaatggagacctttcctttttagtgaaagtagatagtgaaattaataaagatctagaacgctctatgagagagctgcaagcaactcatgcagaaacggtgcaagagctggaaaagacaagaaacatgctaattatgcaacacaaaattaataaagattatcagatggaggttgaggcagtgacccgtaagatggaaaatttgcagcaagattatgaactcaaagtggaacagtatgttcatcttcttgatatcagggctgcacgtatccataaactagaagcccaattaaaggatattgcctatggcaccaagcagtacaaatttaaaccagaaatcatgccagatgactctgttgatgaatttgatgaaaccatccacttagaacgaggcgaaaatctatttgaaatccatatcaacaaagtaaccttttcttctgaagttttacaggcatctggagataaagagcctgtcactttctgtacctatgctttctatgattttgaactacagacaactcccgtagtgcgaggccttcatcccgaatataacttcacttctcaatatcttgttcatgttaatgacttatttttgcaatatattcagaagaatactatcacccttgaggtccaccaggcttatagcacagaatatgaaacaattgcagcatgtcaattaaaatttcacgaaattcttgaaaaaagcggccgaatattttgtacagcaagtttgattggaacaaaaggagacatcccaaattttggcacagtggaatactggttccgattaagagttcccatggatcaagcaattcgactttatcgagaaagggcaaaggctttggggtatataacatcaaattttaaggggccagagcatatgcagtcgttaagtcagcaagcacccaaaactgctcaactcagttctacagattccacagatggcaacttaaatgaacttcacattacaataagatgttgcaaccacctgcagtcccgagcaagccacctgcagccacacccatatgttgtgtacaagttttttgattttgcagaccatgatacagctatcattcccagtagcaatgatccacagtttgatgatcatatgtatttcccagtgccaatgaatatggacttggatcgataccttaagtcagagtctctgagtttttatgtttttgatgatagtgatacccaggagaatatttacataggaaaagtcaatgtgcctctgatttcgttggcacatgacaggtgtatctcaggaatatttgagttaacagaccatcaaaagcatcctgctggcaccatccatgttatattgaaatggaaatttgcttaccttccaccaagtggatcaataacaactgaagacttaggaaatttcattcgcagcgaagagccagaagttgttcaaagacttcctccagcatcctctgttagcacactagttttagcaccaagacctaaaccaagacaacgtttaacacctgtagataagaaggtatctttcgtggatatcatgccacatcagagtgatgagacttctcctcctcctgaagataggaaggaaatttcaccagaggtagagcatataccagaaatagaaattaatatgctgactgttccacatgttcccaaggtttcacaagaaggcagtgtagatgaggtaaaagagaatactgagaaaatgcagcaaggaaaagatgatgtgtctttactatctgaaggtcagcttgcagaacaaagcttggcatcttctgaagatgaaacagaaataacagaggacttggaaccagaagttgaagaggacatgtcagcttctgacagtgatgactgtattattccaggtcctatctccaagaatatcaaacagccatcagaaaaaattcggattgagatcatagctctaagccttaatgattctcaagtaaccatggatgacactatccaacggctgtttgttgagtgtcgattctacagtcttcctgctgaagagacacccgtgtcacttccaaaacccaagagtgggcagtgggtctactataactatagcaatgtgatctacgtggataaagaaaacaacaaagcaaagagagacatcttaaaagctatactacaaaaacaagagatgcctaatagaagccttcgcttcaccgtggtcagtgaccctccagaggacgagcaggacctggagtgtgaggacattggcgtggctcacgtcgaccttgccgacatgtttcaggaagggagggacctcattgagcaaaatatcgatgtttttgatgcacgagcagatggtgaaggtattggcaagctcagggtaacagtcgaagctctccatgccctccagtctgtctacaagcaatacagagatgacttggaggcttgaaagcaaatgctccagaggcatctcctactcctcagtaaatgctcacatgaaagttcctacatgagatttttgtaattactctggtgtatataatctataattcatgggaagctgggagcggggagacctgggtttgaagtgttgaagttttgtatactttttcatttgtttatttctctattccctccttctcataactgccacccctcaggacttaagttctccataatgggcagtaccttctcaataatttatacctacgtgatagcgtgagaaagtctatttgcattttcaacattttcttaggaagaaccgaaatgcaattcccatttttatttttaataagcaaaagcataaatcttagaaaacctatgaaaaagaaatacttttatgttatccctaatcgtcccactaaatggaatgcctatgattagcttcattaagagttttatactgtgaagattttattagaagcaatatatgaaaattacttggattaatgtgttaatcttcctctttaaaatgctaatatccattttatgcacattaaagctcagtatgcattttctttgatgcatgcagtttctatcaattaaatataaagaatgaaacttagcaccaactta

SEQ ID NO: 293990 - DNA, 1300 bp, Homo sapiens
ccaagatgcagatgtagcagaaactccacatcccatgtttacaaaatatggcaacagtttacttgaagaagccagaggagaaataagaaatttagaaaacgttattcagtcacaaagaggccagatagaggagttagagcacttggctgagatcctgaaaactcagttgaggagaaaagaaaatgaaattgagttatctcttcttcagcttcgagaacagcaagctacagatcaaaggtcaaatattcgggacaatgtagaaatgattaagcttcataaacagctagtagagaaaagcaatgctctttcagcaatggaaggaaaatttattcagcttcaagagaagcaaagaactctcaaaatcagccacgatgctttgatggcaaatggggatgaattaaacatgcaacttaaagagcagcgtttaaaatgctgcagtcttgagaaacaattacattctatgaagttttctgaaagaagaatagaagagctgcaggatagaattaatgatttagaaaaggaacgggaacttttaaaggaaaactatgataaactttatgacagtgccttcagtgctgcccatgaagagcaatggaagttaaaggagcaacagctgaaagtgcagattgctcagctcgagactgccttgaagtctgacttaacagacaaaactgaaatccttgacagattaaaaactgaaagagatcaaaatgaaaaactcgttcaagagaatagagaactacagttacagtatctggaacaaaagcaacaacttgatgaacttaaaaaacgcataaaattgtacaaccaggagaatgatattaatgctgatgaattgagtgaagctctcctacttataaaggctcaaaaagaacaaaaaaatggagacctttcctttttagtgaaagtagatagtgaaattaataaagatctagaacgctctatgagagagctgcaagcaactcatgcagaaacggtgcaagagctggaaaagacaagaaacatgctaattatgcaacacaaaattaataaagattatcagatggaggttgaggcagtgacccgtaagatggaaaatttgcagcaagattatgaactcaaagtggaacagtatgttcatcttcttgatatcagggctgcacgtatccataaactagaagaagctgtaagtttggggagcatataagtgttcttcagctgttggagttttgcatattctccataaccaaaattttcacagaaaagcaaggcagatattcacgttggtgatatttggttggcctctgtatataacggtgaa

SEQ ID NO: 293991 - DNA, 521 bp, Homo sapiens
caggaagtggctgagagggggagagagttggagagagacggccgcggaggacacggggacgggaaagtctgagagacggggagagcctgacccggcgggacacaggcaaaaagaaacacgcgagccagacagacgcagaagaaacgtgcctggtactggataggaacttcatggaatggagctaatgggccacggctagagttcccagtttggccttttggggcattcatcccatctactttattttcatctgcttgggcagtaatgtaaacaaattaaaggcaagtaaaagtatcaatgtccctctcctaagatttcccttaagctgaagaaaactgtgcccacatgtactgagggaaactaacctcaccccaacccagacttccttcctgaagcccttctttccacatcctctacagcacacaaaaatacaaaaaacaaacaaaatccactaaaaagttccatgtagggatatgccatcatgaaaagcaagctggaaataaagattatgacgctctgta

SEQ ID NO: 293992 - DNA, 449 bp, Homo sapiens
aactggaacggcgagtgtttccccaagtgctgggatcagagcggtgagcactgcgcccagcccctacataaatttcaaacaccacattcccgtgactacaacacatataaatgttagaaatcaacataacgaaaatataactagcaaaattctgtatgtttgaaaattttaaatattttcccagaaactataaaattacacattaatgtggataaatctcaaacaatgttaactgaaataattaaatcacagaagcctgaataatggattcatttacataattaaagaacacattcatagtggtaacactataatgaaatgacaaagattaacacaaaattcaccctagtgtgtacctatgggtaataaggggactgtgaggtagggtgggggaagccaggcgggaatgagtagggaggcactgggaggaggggagaggcaagagttag

SEQ ID NO: 293993 - DNA, 533 bp, Homo sapiens
tcatagggtaggtttcctagaaaagcagtgtagggtggcgatttgggaagacggctccggtcgatattgggttcccgagcagcccgtggagcagtgggaaggatggaacggtcaattggaggcgccctatacacatcgtcatcgttactgtgccaagtggtcgaaactaggatagaggaatgaataacttccgagaagtcaccaccaatcaagagctgattcagaagagcagagggactcagtgaagttccagaactggcctgatagcagccactacatgattaagaaaaaaacaagcagctttgttgtaaaaaagattggcttcatggtttctataatcatgaatttctcctccatgttccaattgtcacctgatttttaatccaagagtatcaaacttgatgtacccctttgtttaactgaaggttgctttctcacttggtatccctttctttcaaaatttaactttcaggaaataaaggtaaccagtttgctatgaatgttaacacatagccttctggacacaattagaa

SEQ ID NO: 293994 - DNA, 595 bp, Homo sapiens
caggaagtggctgagagggggagagagttggagagagacggccgcggaggacacggggacgggaaagtctgagagacggggagagcctgacccggcgggacacaggcaaaaagaaacacgcgagccagacagacgcagaagaaacgtgcctggtactggataggaacttcatggaatggagctaatgggccgtagggcaggtttgagtcgtgccaccctggagcagaaggtggagggtagggataagaacttccgagaagtcaccaccaatcaagagctgattcagaagagcagagggactcagtgaagttccagaactggcctgatagcagccactacatgattaagaaaaaaacaagcagctttgttgtaaaaaagattggcttcatggtttctataatcatgaatttctcctccatgttccaattgtcacctgatttttaatccaagagtatcaaacttgatgtacccctttgtttaactgaaggttgctttctcacttggtatccctttctttcaaaatttaactttcaggaaataaaggtaaccagtttgctatgaatgttaacacatagccttctggacacaattagaa

SEQ ID NO: 293995 - DNA, 817 bp, Homo sapiens
cgctgttcatcgggccgcgcggggaaggcggcggccaagatgcgctccgtcacgtaggatgagcaatacccacagcactccgttcaaggtcatctcctgggggccctctctggagccaccagacctctggacaccatggccaggttccttgccctccccaccccatcccagagcgcactcaccaactccacgggaggcaaggcctgacaggctgaagtcacctggaaggggaccgatgcctggtactggataggaacttcatggaatggagctaatgggccgtagggcaggtttgagtcgtgccaccctggagcagaaggtggagggtagggataagggggtggagcacctgattccaatcttgccacagggaagaagagtctgtgaagaagtgcgtgatgactcattccttagggtctttggctgggctctgggatggatgccatgggagtacctttacttaagctctaaagttaccaatggagagactgggactcaaagaggaacttgattggaccccagagaggtgagggggtggagagaaactaggagaaaagcacaggatgtagaggtctattcggcataatcttctccctcattttcatcttcaccatcaacagagagagcagcatacttgcttgcagaactgaacttctgtaacacaacgagagtgacaggataatgaaggccctgaattatcacatcaaaacccaagacacaggatactgatcctttggcaatgggggatgacagtcagatgacacccacttgcttgctcatcagcattgtccattggagaggagctagggaagagggt

SEQ ID NO: 293996 - DNA, 186 bp, Homo sapiens
gccttggggacaggggaagggaatgtcagtgtccttttgaaggctgtactggataaggggagaggagtcctacccccagcaggcccaagggcacaagatcagcagaggactcagacagttttttctttcctcataggatgagcaatacccacagcactccgttcaaggtcatctcctgggggccct

SEQ ID NO: 293997 - DNA, 501 bp, Homo sapiens
gggggaagccaggcgggaatgagtagggaggcactgggaggaggggagaggcaagagttaggggaataccgaggaaagtggcagggattggaggctcctggagaaagggcaaggctgaaggttgtcccatgtattttggccagatttgattatgtaatcgagaatcatgagataattaagtgtgttcatgtctctggagccttcaaccagctcttttaacatcttgctcttcccagcattccttagggtctttggctgggctctgggatggatgccatgggagtacctttacttaagctctaaagttaccaatggagagactgggactcaaagaggaacttgattggaccccagagaggtgaggggtaagggctagaacctcacacatgctggttttgctgctgcctggcaggcccatgggaagaactttagaggttccaaggaattggaaaagggtcacaagatgggtggccaaactcccagctcaggcttgattcctac

SEQ ID NO: 293998 - DNA, 354 bp, Homo sapiens
gagagttggagagagacggccgcggaggacacggggacgggaaagtctgagagacggggagagcctgacccggcgggacacaggcaaaaagaaacacgcgagccagacagacgcagaagaaacggtgggcgtaggtctagaagggactaggaacaaggggacagggaactgccgcgcagcgtcagcctcttaccctccccacaggagtgtgcctgggcttgggcctgacctgagaggaccacccgtggcttagcctggtggtgctagcgtcccctacccaggcgggcgcctgaatcaggtgaagacacctggtgttacttttggcccaagtcattggacacccttccctggtcc

SEQ ID NO: 293999 - DNA, 3372 bp, Homo sapiens
cgcggagtttgtcacgtgcccggatataggaagtgttgggggaacggccgcttcccgttcaacgctttattgaggggcgtatcctagtggcccccatccggtctccgttttggaagacccgcctcggcacagccaggctcagtccggccttgcgctgagaaaagatgacagcaatcaagcatgcattacaaagagacatttttacaccaaatgatgaacgcctgctgagcattgtgaatgtctgcaaagcaggaaaaaagaaaaagaactgttttttatgtgccacagtgacaactgaacgccctgtgcaggttaaggtggtcaaagtcaagaaatccgataagggagatttctacaaaaggcagattgcatgggcccttcgagatcttgctgtggtagatgccaaagatgctatcaaagaaaatcctgaatttgatttacactttgaaaaaatatataaatgggttgccagcagcactgctgaaaagaatgcatttatttcatgcatttggaaattgaatcagcgatatctccggaagaaaattgattttgtcaatgttagctcacagcttttggaagaatctgttccaagtggagaaaatcagagtgtgacaggaggtgatgaagaagtagtagatgaataccaagagttaaatgcaagagaagaacaggatatcgaaataatgatggaaggctgtgaatatgcaatctcgaatgcggaagcctttgcagaaaaattgtccagagagctgcaggtgctagatggggctaacatccagtcaatcatggcatctgaaaaacaagtcaacatcctgatgaaattgctagatgaggctctaaaggaggtagatcagattgaattgaaactgagcagttatgaggaaatgctccaaagtgtaaaagaacaaatggatcagatctctgaaagcaaccacctaattcatcttagtaacactaataatgtaaaactcctatctgagatagagttccttgtgaaccacatggacttggccaaaggtcatataaaggcccttcaggaaggagatcttgcttcttccagaggcattgaggcctgcaccaatgctgctgatgcccttctgcagtgcatgaatgtagctcttcgaccaggccatgacttgcttctggcagtcaaacagcaacagcagcgattcagtgatttgcgagagctttttgcccggagactggccagtcacctcaacaatgtttttgttcaacagggtcatgatcagagttcgactcttgcccaacactctgttgaactgactttacccaatcatcatccatttcatagagatttgctccgatatgccaagctgatggagtggctaaagagtacagattatggaaaatatgaaggactaacaaagaattacatggattatttatcccgactatatgaaagagaaatcaaagatttctttgaagttgcaaagatcaagatgactggcacaactaaagaaagcaagaagtttgctacactgcctcgaaaagaaagtgctgtcaaacaggaaacagagagtcttcatggaagttcggggaaattaactggatctacttctagtctaaataagctcagtgttcagagttcagggaatcgcagatctcagtcatcttccctgttggatatgggaaacatgtctgcctctgatctcgatgttgctgacaggaccaaatttgataagatctttgaacaggtactaagtgaactggagcccctatgtctggcagaacaggacttcataagtaaatttttcaaactacagcaacatcaaagtatgcctggaactatggctgaagcagaggacctggatggaggaacattatcacggcaacataattgtggcacaccactgcctgtttcatctgagaaagatatgatccgccaaatgatgattaaaatatttcgctgcattgagccagagctgaacaacctaattgcattaggagacaaaattgatagctttaactctctttatatgttagtcaaaatgagtcatcatgtgtggactgcacaaaatgtggaccctgcttctttcctaagtactacattgggaaatgttttggtgactgtcaaaaggaactttgacaaatgcattagtaaccaaataaggcaaatggaagaagtaaagatctcaaaaaagagtaaagttggaattcttccatttgttgctgaatttgaagaatttgctggacttgcagaatcaatcttcaaaaatgctgagcgtcgtggagacctggataaagcatacaccaaacttatcagaggagtatttgttaatgtggagaaagtagcaaatgaaagccagaagacccccagggatgtggttatgatggaaaactttcaccatatttttgcaactctttctcgattgaaaatctcatgtctagaagcagaaaaaaaagaagccaaacaaaaatacacagatcaccttcagtcttatgtcatttactctttaggacaacctcttgaaaaactaaatcatttctttgaaggtgttgaagctcgcgtggcacagggcataagggaggaggaagtaagttaccaacttgcatttaacaaacaagaacttcgtaaagtcattaaggagtaccctggaaaggaagtaaaaaaaggtctagataacctctacaagaaagttgataaacatttatgtgaagaagagaacttacttcaggtggtgtggcactccatgcaagatgaatttatacgccagtataagcactttgaaggtttgatagctcgctgttatcctggatctggtgttacaatggaattcactattcaggacattctggattattgttccagcattgcacagtcccactaaaccttgtgaaagaagaaaagataactgaatgaagcatttgagtataacagacactataccaaaataccaagcaactgttttgagaacccagacttaaaattttatgtattattaaatgttagataaatgggtagtaccatactacaaatatttaaatgcaaaattaccaacctatatagcagttttatttgccctataggttgcatactaacttaagcattcatgtcaccataaaatgcctttagcatttctcaatgactggatgggaaattttcctttattgcctagctgcttgtgtttgagtggttgtcctatgagcaatgcatttggagttcttcagctttcactacttctctgttgcttgctaatcatgtaactactaaaatactgtacaaaattgttttttcacactaacaaatgtgtatatggagaagagggctcatgtgatgatcatttgtgaacttagatttttgaggattatgtgactagtaataaatgtgaaataaattttcaaaaaagttga

SEQ ID NO: 294000 - DNA, 3327 bp, Homo sapiens
cgcggagtttgtcacgtgcccggatataggaagtgttgggggaacggccgcttcccgttcaacgctttattgaggggcgtatcctagtggcccccatccggtctccgttttggaagacccgcctcggcacagccaggctcagtccggccttgcgctgagaaaagatgacagcaatcaagcatgcattacaaagagacatttttacaccaaatgatgaacgcctgctgagcattgtgaatgtctgcaaagcaggaaaaaagaaaaagaactgttttttatgtgccacagtgacaactgaacgccctgtgcaggttaaggtggtcaaagtcaagaaatccgataagggagatttctacaaaaggcagattgcatgggcccttcgagatcttgctgtggtagatgccaaagatgctatcaaagaaaatcctgaatttgatttacactttgaaaaaatatataaatgggttgccagcagcactgctgaaaagaatgcatttatttcatgcatttggaaattgaatcagcgatatctccggaagaaaattgattttgtcaatgttagctcacagcttttggaagaatctgttccaagtggagaaaatcagagtgtgacaggaggtgatgaagaagtagtagatgaataccaagagttaaatgcaagagaagaacaggatatcgaaataatgatggaaggctgtgaatatgcaatctcgaatgcggaagcctttgcagaaaaattgtccagagagctgcaggtgctagatggggctaacatccagtcaatcatggcatctgaaaaacaagtcaacatcctgatgaaattgctagatgaggctctaaaggaggtagatcagattgaattgaaactgagcagttatgaggaaatgctccaaagtgtaaaagaacaaatggatcagatctctgaaagcaaccacctaattcatcttagtaacactaataatgtaaaactcctatctgagatagagttccttgtgaaccacatggacttggccaaaggtcatataaaggcccttcaggaaggagatcttgcttcttccagaggcattgaggcctgcaccaatgctgctgatgcccttctgcagtgcatgaatgtagctcttcgaccaggccatgacttgcttctggcagtcaaacagcaacagcagcgattcagtgatttgcgagagctttttgcccggagactggccagtcacctcaacaatgtttttgttcaacagggtcatgatcagagttcgactcttgcccaacactctgttgaactgactttacccaatcatcatccatttcatagagatttgctccgatatgccaagctgatggagtggctaaagagtacagattatggaaaatatgaaggactaacaaagaattacatggattatttatcccgactatatgaaagagaaatcaaagatttctttgaagttgcaaagatcaagatgactggcacaactaaagaaagcaagaagtttggtcttcatggaagttcggggaaattaactggatctacttctagtctaaataagctcagtgttcagagttcagggaatcgcagatctcagtcatcttccctgttggatatgggaaacatgtctgcctctgatctcgatgttgctgacaggaccaaatttgataagatctttgaacaggtactaagtgaactggagcccctatgtctggcagaacaggacttcataagtaaatttttcaaactacagcaacatcaaagtatgcctggaactatggctgaagcagaggacctggatggaggaacattatcacggcaacataattgtggcacaccactgcctgtttcatctgagaaagatatgatccgccaaatgatgattaaaatatttcgctgcattgagccagagctgaacaacctaattgcattaggagacaaaattgatagctttaactctctttatatgttagtcaaaatgagtcatcatgtgtggactgcacaaaatgtggaccctgcttctttcctaagtactacattgggaaatgttttggtgactgtcaaaaggaactttgacaaatgcattagtaaccaaataaggcaaatggaagaagtaaagatctcaaaaaagagtaaagttggaattcttccatttgttgctgaatttgaagaatttgctggacttgcagaatcaatcttcaaaaatgctgagcgtcgtggagacctggataaagcatacaccaaacttatcagaggagtatttgttaatgtggagaaagtagcaaatgaaagccagaagacccccagggatgtggttatgatggaaaactttcaccatatttttgcaactctttctcgattgaaaatctcatgtctagaagcagaaaaaaaagaagccaaacaaaaatacacagatcaccttcagtcttatgtcatttactctttaggacaacctcttgaaaaactaaatcatttctttgaaggtgttgaagctcgcgtggcacagggcataagggaggaggaagtaagttaccaacttgcatttaacaaacaagaacttcgtaaagtcattaaggagtaccctggaaaggaagtaaaaaaaggtctagataacctctacaagaaagttgataaacatttatgtgaagaagagaacttacttcaggtggtgtggcactccatgcaagatgaatttatacgccagtataagcactttgaaggtttgatagctcgctgttatcctggatctggtgttacaatggaattcactattcaggacattctggattattgttccagcattgcacagtcccactaaaccttgtgaaagaagaaaagataactgaatgaagcatttgagtataacagacactataccaaaataccaagcaactgttttgagaacccagacttaaaattttatgtattattaaatgttagataaatgggtagtaccatactacaaatatttaaatgcaaaattaccaacctatatagcagttttatttgccctataggttgcatactaacttaagcattcatgtcaccataaaatgcctttagcatttctcaatgactggatgggaaattttcctttattgcctagctgcttgtgtttgagtggttgtcctatgagcaatgcatttggagttcttcagctttcactacttctctgttgcttgctaatcatgtaactactaaaatactgtacaaaattgttttttcacactaacaaatgtgtatatggagaagagggctcatgtgatgatcatttgtgaacttagatttttgaggattatgtgactagtaataaatgtgaaataaattttcaaaaaagttga

SEQ ID NO: 294001 - DNA, 3214 bp, Homo sapiens
acaaatatttacacaacatgtaccttttggaaggtatacctgatctttaaagcaggtaaacatgttctaaaaattgacacattaatttgaaataatataggaaattgaagcttagattttatgataaacttaaaagaataggtacaacttttctgctttatttaaattttattttctggtttatttaaatttagtcaaattctgtttgtggcatttaacttcatacttggaaaaatatacagtctcccactgttgaggaactcttctggagagtatatttttatgtgataataagtagagatgatgaagaaatgatttttgtatgccaaaggatacaaaaatgtttttatttaagcgagaattaatcaaatctgttttaagaaaattaattacttgattttgaaaactgtaagatatactaatgaagttcttatggaaaataacctattttggagtaatatcccaagctggcagaggctcagtgaaactaaatattcttaagtgccattgacactatttattattggtctgtttttaaagcaacatgacaatatagaggaagagcaattaagattcccatacactttgaccctgttattccatccttaagaaattatttcaaagaaatagttcattagagatgaaaagcttattgtaacattgtctatcatagcaaaacatggaaaccacttcattgtcctgtgttaggggattggtttacttaatggtgctacaccaacaaaactgaatactgtgctgtcattaaaatgtgagactggagaaatgtatttgttctgatttagatattctgtatagtgtgattacagtgatatttaaaatatgcaaaaggtaatatagaaaaatgaaaatataaatatggttatgtttgacttcatatttttgtaaattgttaatgttatgatgcctattcaattgttttttaagacagaaagtaacctatttttatatcctgtgaaatacatcaaagttttggactatgaaatttaaaacaagcatgaaggacttggggaattgaaaaattgaaattgttatatgtgttttattaataagaagtacatgttacttttattttaagaattacatggattatttatcccgactatatgaaagagaaatcaaagatttctttgaagttgcaaagatcaagatgactggcacaactaaagaaagcaagaagtttgctacactgcctcgaaaagaaagtgctgtcaaacaggaaacagagagtcttcatggaagttcggggaaattaactggatctacttctagtctaaataagctcagtgttcagagttcagggaatcgcagatctcagtcatcttccctgttggatatgggaaacatgtctgcctctgatctcgatgttgctgacaggaccaaatttgataagatctttgaacaggtactaagtgaactggagcccctatgtctggcagaacaggacttcataagtaaatttttcaaactacagcaacatcaaagtatgcctggaactatggctgaagcagaggacctggatggaggaacattatcacggcaacataattgtggcacaccactgcctgtttcatctgagaaagatatgatccgccaaatgatgattaaaatatttcgctgcattgagccagagctgaacaacctaattgcattaggagacaaaattgatagctttaactctctttatatgttagtcaaaatgagtcatcatgtgtggactgcacaaaatgtggaccctgcttctttcctaagtactacattgggaaatgttttggtgactgtcaaaaggaactttgacaaatgcattagtaaccaaataaggcaaatggaagaagtaaagatctcaaaaaagagtaaagttggaattcttccatttgttgctgaatttgaagaatttgctggacttgcagaatcaatcttcaaaaatgctgagcgtcgtggagacctggataaagcatacaccaaacttatcagaggagtatttgttaatgtggagaaagtagcaaatgaaagccagaagacccccagggatgtggttatgatggaaaactttcaccatatttttgcaactctttctcgattgaaaatctcatgtctagaagcagaaaaaaaagaagccaaacaaaaatacacagatcaccttcagtcttatgtcatttactctttaggacaacctcttgaaaaactaaatttatcttttataagctcttaacttgaagttagagtaaaatagcgcggtgactcacacctgtaatcccagcactttgggaggccaaggcaggcggatcacgaggtcagaagatcgagaccatcctagctaacaagcatttctttgaaggtgttgaagctcgcgtggcacagggcataagggaggaggaagtaagttaccaacttgcatttaacaaacaagaacttcgtaaagtcattaaggagtaccctggaaaggaagtaaaaaaaggtctagataacctctacaagaaagttgataaacatttatgtgaagaagagaacttacttcaggtggtgtggcactccatgcaagatgaatttatacgccagtataagcactttgaaggtttgatagctcgctgttatcctggatctggtgttacaatggaattcactattcaggacattctggattattgttccagcattgcacagtcccactaaaccttgtgaaagaagaaaagataactgaatgaagcatttgagtataacagacactataccaaaataccaagcaactgttttgagaacccagacttaaaattttatgtattattaaatgttagataaatgggtagtaccatactacaaatatttaaatgcaaaattaccaacctatatagcagttttatttgccctataggttgcatactaacttaagcattcatgtcaccataaaatgcctttagcatttctcaatgactggatgggaaattttcctttattgcctagctgcttgtgtttgagtggttgtcctatgagcaatgcatttggagttcttcagctttcactacttctctgttgcttgctaatcatgtaactactaaaatactgtacaaaattgttttttcacactaacaaatgtgtatatggagaagagggctcatgtgatgatcatttgtgaacttagatttttgaggattatgtgactagtaataaatgtgaaataaattttcaaaaaagttga

SEQ ID NO: 294002 - DNA, 735 bp, Homo sapiens
tgggttcaagcagttcttctgcctccctcccaggtagctgggattacaggtgcctgccaccacacccagctaatttttgtatttttagtggagatggggtttcaccatgctggccaggctggtttcgaactcctgagctcaagtgatctgcccgctttggcctcccaaagtgctgggattacaggcatgagacatcatgcctggccataaataagttttaaaagttgatctttgtgctcctctttccagatgtgaagtgaataactgtgagttttattttaggtttattttgtggccttgttataccttgctaataccattgtcctgtagatcttggaagagtttgtttttgggattccattgagattataaattcatagattagtgagattatggatccatggtctgtgcagaaaagaaaattaaatgtggagtgttattttaagcatttggtgcagttctttcgttataggatcactttggttttcttcagatctttgaacaggtactaagtgaactggagcccctatgtctggcagaacaggacttcataagtaaatttttcaaactacagcaacatcaaagtatgcctggaactatggtatggctcacagtgtattttggatagtatttatgatctgtaatataattagcttaattaatatgtggtcacaattttatgatcagaagagaaaaggaaagaatttatcatgtaaggatttttttatgatgtaa

SEQ ID NO: 294003 - DNA, 791 bp, Homo sapiens
agccaagtgtgatcctgcttgctcatcgagaatatctgttctttaaagacagttttggcgaaccctgacatttcatttgatttctgcattttggcctctcttccatcatatttggatgctgcatatgaagttgtcaaaaacaggaattttaacgaagaagaaaggaatgaagaaaaaagaaggaaacagaccaatcagtgtttctttagtaagaaatcataattcagaaagctatttgcacttggttaggtttacacagctcacactttttggcaggaacaggaaaaacttgttcaaaattctttgggaataagaatcactagccactgcctctagctgtactgaggctgaatctaagcaaagccccattttttggtatacagaaaatagttgtagcttggactgcccagattccctcctcccgggactgctaccttcgtctgcaactctgggtcatacatgtagggtagttagtagagatggtccatccatgcttgggtaggaaaggagttttcctctcctaatagcctcctgagattggcagtctgacttgaagatgactcacatgtcttctctccacctcagttttacatttgtagaatttgtcttattgttgtgaaccccaaatgtctgagacaagatctcagtcaatttaggaagtttattttgccaaagttaaggatgcgcacccatgatacagcctcaggaggtcctgacgacatgtgcccaaggtggtccgagcacaccttggttttatacattttagggagacatgggacgtcaatcagtat

SEQ ID NO: 294004 - DNA, 311 bp, Homo sapiens
ctactactactaaattagcggccgctcgactggatctacttctagtctaaataagctcagtgttcagagttcagggaatcgcagatctcagtcatcttccctgttggatatgggaaacatgtctgcctctgatctcgatgttgctgacaggaccaaatttgataaggtaaactaaaataacaagtacttcttaaacattaacattagttttctaacagcagtttgtggttgctctaagtgtgttcaaagatttgggttcttctggctctcttaagcattaaccatgtctttccaactgaatcgaatctggg

SEQ ID NO: 294005 - DNA, 3528 bp, Homo sapiens
cgcggagtttgtcacgtgcccggatataggaagtgttgggggaacggccgcttcccgttcaacgctttattgaggggcgtatcctagtggcccccatccggtctccgttttggaagacccgcctcggcacagccaggctcagtccggccttgcggtaagccttcggccgcggctgcccggtagtcccggcggcggcggacagacgagctgacaggcaccagggtctaaggcggctcctcagtccggctgctgtctccacgcctggggtcgggcaccgctccttctgaccttcctttccccgtttgtcccgctgagaaaagatgacagcaatcaagcatgcattacaaagagacatttttacaccaaatgatgaacgcctgctgagcattgtgaatgtctgcaaagcaggaaaaaagaaaaagaactgttttttatgtgccacagtgacaactgaacgccctgtgcaggttaaggtggtcaaagtcaagaaatccgataagggagatttctacaaaaggcagattgcatgggcccttcgagatcttgctgtggtagatgccaaagatgctatcaaagaaaatcctgaatttgatttacactttgaaaaaatatataaatgggttgccagcagcactgctgaaaagaatgcatttatttcatgcatttggaaattgaatcagcgatatctccggaagaaaattgattttgtcaatgttagctcacagcttttggaagaatctgttccaagtggagaaaatcagagtgtgacaggaggtgatgaagaagtagtagatgaataccaagagttaaatgcaagagaagaacaggatatcgaaataatgatggaaggctgtgaatatgcaatctcgaatgcggaagcctttgcagaaaaattgtccagagagctgcaggtgctagatggggctaacatccagtcaatcatggcatctgaaaaacaagtcaacatcctgatgaaattgctagatgaggctctaaaggaggtagatcagattgaattgaaactgagcagttatgaggaaatgctccaaagtgtaaaagaacaaatggatcagatctctgaaagcaaccacctaattcatcttagtaacactaataatgtaaaactcctatctgagatagagttccttgtgaaccacatggacttggccaaaggtcatataaaggcccttcaggaaggagatcttgcttcttccagaggcattgaggcctgcaccaatgctgctgatgcccttctgcagtgcatgaatgtagctcttcgaccaggccatgacttgcttctggcagtcaaacagcaacagcagcgattcagtgatttgcgagagctttttgcccggagactggccagtcacctcaacaatgtttttgttcaacagggtcatgatcagagttcgactcttgcccaacactctgttgaactgactttacccaatcatcatccatttcatagagatttgctccgatatgccaagctgatggagtggctaaagagtacagattatggaaaatatgaaggactaacaaagaattacatggattatttatcccgactatatgaaagagaaatcaaagatttctttgaagttgcaaagatcaagatgactggcacaactaaagaaagcaagaagtttgctacactgcctcgaaaagaaagtgctgtcaaacaggaaacagagagtcttcatggaagttcggggaaattaactggatctacttctagtctaaataagctcagtgttcagagttcagggaatcgcagatctcagtcatcttccctgttggatatgggaaacatgtctgcctctgatctcgatgttgctgacaggaccaaatttgataagatctttgaacaggtactaagtgaactggagcccctatgtctggcagaacaggacttcataagtaaatttttcaaactacagcaacatcaaagtatgcctggaactatggctgaagcagaggacctggatggaggaacattatcacggcaacataattgtggcacaccactgcctgtttcatctgagaaagatatgatccgccaaatgatgattaaaatatttcgctgcattgagccagagctgaacaacctaattgcattaggagacaaaattgatagctttaactctctttatatgttagtcaaaatgagtcatcatgtgtggactgcacaaaatgtggaccctgcttctttcctaagtactacattgggaaatgttttggtgactgtcaaaaggaactttgacaaatgcattagtaaccaaataaggcaaatggaagaagtaaagatctcaaaaaagagtaaagttggaattcttccatttgttgctgaatttgaagaatttgctggacttgcagaatcaatcttcaaaaatgctgagcgtcgtggagacctggataaagcatacaccaaacttatcagaggagtatttgttaatgtggagaaagtagcaaatgaaagccagaagacccccagggatgtggttatgatggaaaactttcaccatatttttgcaactctttctcgattgaaaatctcatgtctagaagcagaaaaaaaagaagccaaacaaaaatacacagatcaccttcagtcttatgtcatttactctttaggacaacctcttgaaaaactaaatcatttctttgaaggtgttgaagctcgcgtggcacagggcataagggaggaggaagtaagttaccaacttgcatttaacaaacaagaacttcgtaaagtcattaaggagtaccctggaaaggaagtaaaaaaaggtctagataacctctacaagaaagttgataaacatttatgtgaagaagagaacttacttcaggtggtgtggcactccatgcaagatgaatttatacgccagtataagcactttgaaggtttgatagctcgctgttatcctggatctggtgttacaatggaattcactattcaggacattctggattattgttccagcattgcacagtcccactaaaccttgtgaaagaagaaaagataactgaatgaagcatttgagtataacagacactataccaaaataccaagcaactgttttgagaacccagacttaaaattttatgtattattaaatgttagataaatgggtagtaccatactacaaatatttaaatgcaaaattaccaacctatatagcagttttatttgccctataggttgcatactaacttaagcattcatgtcaccataaaatgcctttagcatttctcaatgactggatgggaaattttcctttattgcctagctgcttgtgtttgagtggttgtcctatgagcaatgcatttggagttcttcagctttcactacttctctgttgcttgctaatcatgtaactactaaaatactgtacaaaattgttttttcacactaacaaatgtgtatatggagaagagggctcatgtgatgatcatttgtgaacttagatttttgaggattatgtgactagtaataaatgtgaaataaattttcaaaaaagttga

SEQ ID NO: 294006 - DNA, 3537 bp, Homo sapiens
cgcggagtttgtcacgtgcccggatataggaagtgttgggggaacggccgcttcccgttcaacgctttattgaggggcgtatcctagtggcccccatccggtctccgttttggaagacccgcctcggcacagccaggctcagtccggccttgcggtaagccttcggccgcggctgcccggtagtcccggcggcggcggacagacgagctgacaggcaccagggtctaaggcggctcctcagtccggctgctgtctccacgcctggggtcgggcaccgctccttctgaccttcctttccccgtttgtcccgctgagaaaagatgacagcaatcaagcatgcattacaaagagacatttttacaccaaatgatgaacgcctgctgagcattgtgaatgtctgcaaagcaggaaaaaagaaaaagaactgttttttatgtgccacagtgacaactgaacgccctgtgcaggttaaggtggtcaaagtcaagaaatccgataagggagatttctacaaaaggcagattgcatgggcccttcgagatcttgctgtggtagatgccaaagatgctatcaaagaaaatcctgaatttgatttacactttgaaaaaatatataaatgggttgccagcagcactgctgaaaagaatgcatttatttcatgcatttggaaattgaatcagcgatatctccggaagaaaattgattttgtcaatgttagctcacagcttttggaagaatctgttccaagtggagaaaatcagagtgtgacaggaggtgatgaagaagtagtagatgaataccaagagttaaatgcaagagaagaacaggatatcgaaataatgatggaaggctgtgaatatgcaatctcgaatgcggaagcctttgcagaaaaattgtccagagagctgcaggtgctagatggggctaacatccagtcaatcatggcatctgaaaaacaagtcaacatcctgatgaaattgctagatgaggctctaaaggaggtagatcagattgaattgaaactgagcagttatgaggaaatgctccaaagtgtaaaagaacaaatggatcagatctctgaaagcaaccacctaattcatcttagtaacactaataatgtaaaactcctatctgagatagagttccttgtgaaccacatggacttggccaaaggtcatataaaggcccttcaggaaggagatcttgcttcttccagaggcattgaggcctgcaccaatgctgctgatgcccttctgcagtgcatgaatgtagctcttcgaccaggccatgacttgcttctggcagtcaaacagcaacagcagcgattcagtgatttgcgagagctttttgcccggagactggccagtcacctcaacaatgtttttgttcaacagtttactcaggccctccttcaactctataacaggtcctactttctttcggttcctggtcatgatcagagttcgactcttgcccaacactctgttgaactgactttacccaatcatcatccatttcatagagatttgctccgatatgccaagctgatggagtggctaaagagtacagattatggaaaatatgaaggactaacaaagaattacatggattatttatcccgactatatgaaagagaaatcaaagatttctttgaagttgcaaagatcaagatgactggcacaactaaagaaagcaagaagtttggtcttcatggaagttcggggaaattaactggatctacttctagtctaaataagctcagtgttcagagttcagggaatcgcagatctcagtcatcttccctgttggatatgggaaacatgtctgcctctgatctcgatgttgctgacaggaccaaatttgataagatctttgaacaggtactaagtgaactggagcccctatgtctggcagaacaggacttcataagtaaatttttcaaactacagcaacatcaaagtatgcctggaactatggctgaagcagaggacctggatggaggaacattatcacggcaacataattgtggcacaccactgcctgtttcatctgagaaagatatgatccgccaaatgatgattaaaatatttcgctgcattgagccagagctgaacaacctaattgcattaggagacaaaattgatagctttaactctctttatatgttagtcaaaatgagtcatcatgtgtggactgcacaaaatgtggaccctgcttctttcctaagtactacattgggaaatgttttggtgactgtcaaaaggaactttgacaaatgcattagtaaccaaataaggcaaatggaagaagtaaagatctcaaaaaagagtaaagttggaattcttccatttgttgctgaatttgaagaatttgctggacttgcagaatcaatcttcaaaaatgctgagcgtcgtggagacctggataaagcatacaccaaacttatcagaggagtatttgttaatgtggagaaagtagcaaatgaaagccagaagacccccagggatgtggttatgatggaaaactttcaccatatttttgcaactctttctcgattgaaaatctcatgtctagaagcagaaaaaaaagaagccaaacaaaaatacacagatcaccttcagtcttatgtcatttactctttaggacaacctcttgaaaaactaaatcatttctttgaaggtgttgaagctcgcgtggcacagggcataagggaggaggaagtaagttaccaacttgcatttaacaaacaagaacttcgtaaagtcattaaggagtaccctggaaaggaagtaaaaaaaggtctagataacctctacaagaaagttgataaacatttatgtgaagaagagaacttacttcaggtggtgtggcactccatgcaagatgaatttatacgccagtataagcactttgaaggtttgatagctcgctgttatcctggatctggtgttacaatggaattcactattcaggacattctggattattgttccagcattgcacagtcccactaaaccttgtgaaagaagaaaagataactgaatgaagcatttgagtataacagacactataccaaaataccaagcaactgttttgagaacccagacttaaaattttatgtattattaaatgttagataaatgggtagtaccatactacaaatatttaaatgcaaaattaccaacctatatagcagttttatttgccctataggttgcatactaacttaagcattcatgtcaccataaaatgcctttagcatttctcaatgactggatgggaaattttcctttattgcctagctgcttgtgtttgagtggttgtcctatgagcaatgcatttggagttcttcagctttcactacttctctgttgcttgctaatcatgtaactactaaaatactgtacaaaattgttttttcacactaacaaatgtgtatatggagaagagggctcatgtgatgatcatttgtgaacttagatttttgaggattatgtgactagtaataaatgtgaaataaattttcaaaaaagttga

SEQ ID NO: 294007 - DNA, 1644 bp, Homo sapiens
aagactgagcaggcttttgctatatcaatactagtcaaattgttggtcttttattatgtaaagtgcctgaataatttttgcaggctgaagcagaggacctggatggaggaacattatcacggcaacataattgtggcacaccactgcctgtttcatctgagaaagatatgatccgccaaatgatgattaaaatatttcgctgcattgagccagagctgaacaacctaattgcattaggagacaaaattgatagctttaactctctttatatgttagtcaaaatgagtcatcatgtgtggactgcacaaaatgtggaccctgcttctttcctaagtactacattgggaaatgttttggtgactgtcaaaaggaactttgacaaatgcattagtaaccaaataaggcaaatggaagaagtaaagatctcaaaaaagagtaaagttggaattcttccatttgttgctgaatttgaagaatttgctggacttgcagaatcaatcttcaaaaatgctgagcgtcgtggagacctggataaagcatacaccaaacttatcagaggagtatttgttaatgtggagaaagtagcaaatgaaagccagaagacccccagggatgtggttatgatggaaaactttcaccatatttttgcaactctttctcgattgaaaatctcatgtctagaagcagaaaaaaaagaagccaaacaaaaatacacagatcaccttcagtcttatgtcatttactctttaggacaacctcttgaaaaactaaatcatttctttgaaggtgttgaagctcgcgtggcacagggcataagggaggaggaagtaagttaccaacttgcatttaacaaacaagaacttcgtaaagtcattaaggagtaccctggaaaggaagtaaaaaaaggtctagataacctctacaagaaagttgataaacatttatgtgaagaagagaacttacttcaggtggtgtggcactccatgcaagatgaatttatacgccagtataagcactttgaaggtttgatagctcgctgttatcctggatctggtgttacaatggaattcactattcaggacattctggattattgttccagcattgcacagtcccactaaaccttgtgaaagaagaaaagataactgaatgaagcatttgagtataacagacactataccaaaataccaagcaactgttttgagaacccagacttaaaattttatgtattattaaatgttagataaatgggtagtaccatactacaaatatttaaatgcaaaattaccaacctatatagcagttttatttgccctataggttgcatactaacttaagcattcatgtcaccataaaatgcctttagcatttctcaatgactggatgggaaattttcctttattgcctagctgcttgtgtttgagtggttgtcctatgagcaatgcatttggagttcttcagctttcactacttctctgttgcttgctaatcatgtaactactaaaatactgtacaaaattgttttttcacactaacaaatgtgtatatggagaagagggctcatgtgatgatcatttgtgaacttagatttttgaggattatgtgactagtaataaatgtgaaataaattttcaaaaaagttga

SEQ ID NO: 294008 - DNA, 3543 bp, Homo sapiens
cgcggagtttgtcacgtgcccggatataggaagtgttgggggaacggccgcttcccgttcaacgctttattgaggggcgtatcctagtggcccccatccggtctccgttttggaagacccgcctcggcacagccaggctcagtccggccttgcggtaagccttcggccgcggctgcccggtagtcccggcggcggcggacagacgagctgacaggcaccagggtctaaggcggctcctcagtccggctgctgtctccacgcctggggtcgggcaccgctccttctgaccttcctttccccgtttgtcccgctgagaaaagatgacagcaatcaagcatgcattacaaagagacatttttacaccaaatgatgaacgcctgctgagcattgtgaatgtctgcaaagcaggaaaaaagaaaaagaactgttttttatgtgccacagtgacaactgaacgccctgtgcaggttaaggtggtcaaagtcaagaaatccgataagggagatttctacaaaaggcagattgcatgggcccttcgagatcttgctgtggtagatgccaaagatgctatcaaagaaaatcctgaatttgatttacactttgaaaaaatatataaatgggttgccagcagcactgctgaaaagaatgcatttatttcatgcatttggaaattgaatcagcgatatctccggaagaaaattgattttgtcaatgttagctcacagcttttggaagaatctgttccaagtggagaaaatcagagtgtgacaggaggtgatgaagaagtagtagatgaataccaagagttaaatgcaagagaagaacaggatatcgaaataatgatggaaggctgtgaatatgcaatctcgaatgcggaagcctttgcagaaaaattgtccagagagctgcaggtgctagatggggctaacatccagtcaatcatggcatctgaaaaacaagtcaacatcctgatgaaattgctagatgaggctctaaaggaggtagatcagattgaattgaaactgagcagttatgaggaaatgctccaaagtgtaaaagaacaaatggatcagatctctgaaagcaaccacctaattcatcttagtaacactaataatgtaaaactcctatctgagatagagttccttgtgaaccacatggacttggccaaaggtcatataaaggcccttcaggaaggagatcttgcttcttccagaggcattgaggcctgcaccaatgctgctgatgcccttctgcagtgcatgaatgtagctcttcgaccaggccatgacttgcttctggcagtcaaacagcaacagcagcgattcagtgatttgcgagagctttttgcccggagactggccagtcacctcaacaatgtttttgttcaacagggtcatgatcagagttcgactcttgcccaacactctgttgaactgactttacccaatcatcatccatttcatagagatttgctccgatatgccaagctgatggagtggctaaagagtacagattatggaaaatatgaaggactaacaaagaattacatggattatttatcccgactatatgaaagagaaatcaaagatttctttgaagttgcaaagatcaagatgactggcacaactaaagaaagcaagaagtttggtcttcatggaagttcggggaaattaactggatctacttctagtctaaataagctcagtgttcagagttcagggaatcgcagatctcagtcatcttccctgttggatatgggaaacatgtctgcctctgatctcgatgttgctgacaggaccaaatttgataagatctttgaacaggtactaagtgaactggagcccctatgtctggcagaacaggacttcataagtaaatttttcaaactacagcaacatcaaagtatgcctggaactatggctgaagcagaggacctggatggaggaacattatcacggcaacataattgtggcacaccactgcctgtttcatctgagaaagatatgatccgccaaatgatgattaaaatatttcgctgcattgagccagagctgaacaacctaattgcattaggagacaaaattgatagctttaactctctttatatgttagtcaaaatgagtcatcatgtgtggactgcacaaaatgtggaccctgcttctttcctaagtactacattgggaaatgttttggtgactgtcaaaaggaactttgacaaatgcattagtaaccaaataaggcaaatggaagaagtaaagatctcaaaaaagagtaaagttggaattcttccatttgttgctgaatttgaagaatttgctggacttgcagaatcaatcttcaaaaatgctgagcgtcgtggagacctggataaagcatacaccaaacttatcagaggagtatttgttaatgtggagaaagtagcaaatgaaagccagaagacccccagggatgtggttatgatggaaaactttcaccatatttttgcaactctttctcgattgaaaatctcatgtctagaagcagaaaaaaaagaagccaaacaaaaatacacagatcaccttcagtcttatgtcatttactctttaggacaacctcttgaaaaactaaatcatttctttgaaggtgttgaagctcgcgtggcacagggcataagggaggaggaagtaagttaccaacttgcatttaacaaacaagaacttcgtaaagtcattaaggagtaccctggaaaggaagtaaaaaaaggtctagataacctctacaagaaagttgataaacatttatgtgaagaagagaacttacttcaggtggtgtggcactccatgcaagatgaatttatacgccagtataagcactttgaaggtttgatagctcgctgttatcctggatctggtgttacaatggaattcactattcaggacattctggattattgttccagcattgcacagtcccactaaaccttgtgaaagaagaaaagataactgaatgaagcatttgagtataacagacactataccaaaataccaagcaactgttttgagaacccagacttaaaattttatgtattattaaatgttagataaatgggtagtaccatactacaaatatttaaatgcaaaattaccaacctatatagcagttttatttgccctataggttgcatactaacttaagcattcatgtcaccataaaatgcctttagcatttctcaatgactggatgggaaattttcctttattgcctagctgcttgtgtttgagtggttgtcctatgagcaatgcatttggagttcttcagctttcactacttctctgttgcttgctaatcatgtaactactaaaatactgtacaaaattgttttttcacactaacaaatgtgtatatggagaagagggctcatgtgatgatcatttgtgaacttagatttttgaggattatgtgactagtaataaatgtgaaataaattttcaaaaaagttgaaatttgataatatttttaggtctatcatatgctgtcttctgtattaaagcaagttcttac

SEQ ID NO: 294009 - DNA, 2661 bp, Homo sapiens
cgcggagtttgtcacgtgcccggatataggaagtgttgggggaacggccgcttcccgttcaacgctttattgaggggcgtatcctagtggcccccatccggtctccgttttggaagacccgcctcggcacagccaggctcagtccggccttgcggtaagccttcggccgcggctgcccggtagtcccggcggcggcggacagacgagctgacaggcaccagggtctaaggcggctcctcagtccggctgctgtctccacgcctggggtcgggcaccgctccttctgaccttcctttccccgtttgtcccgctgagaaaagatgacagcaatcaagcatgcattacaaagagacatttttacaccaaatgatgaacgcctgctgagcattgtgaatgtctgcaaagcaggaaaaaagaaaaagaactgttttttatgtgccacagtgacaactgaacgccctgtgcaggttaaggtggtcaaagtcaagaaatccgataagggagatttctacaaaaggcagattgcatgggcccttcgagatcttgctgtggtagatgccaaagatgctatcaaagaaaatcctgaatttgatttacactttgaaaaaatatataaatgggttgccagcagcactgctgaaaagaatgcatttatttcatgcatttggaaattgaatcagcgatatctccggaagaaaattgattttgtcaatgttagctcacagcttttggaagaatctgttccaagtggagaaaatcagagtgtgacaggaggtgatgaagaagtagtagatgaataccaagagttaaatgcaagagaagaacaggatatcgaaataatgatggaaggctgtgaatatgcaatctcgaatgcggaagcctttgcagaaaaattgtccagagagctgcaggtgctagatggggctaacatccagtcaatcatggcatctgaaaaacaagtcaacatcctgatgaaattgctagatgaggctctaaaggaggtagatcagattgaattgaaactgagcagttatgaggaaatgctccaaagtgtaaaagaacaaatggatcagatctctgaaagcaaccacctaattcatcttagtaacactaataatgtaaaactcctatctgagatagagttccttgtgaaccacatggacttggccaaaggtcatataaaggcccttcaggaaggagatcttgcttcttccagaggcattgaggcctgcaccaatgctgctgatgcccttctgcagtgcatgaatgtagctcttcgaccaggccatgacttgcttctggcagtcaaacagcaacagcagcgattcagtgatttgcgagagctttttgcccggagactggccagtcacctcaacaatgtttttgttcaacagggtcatgatcagagttcgactcttgcccaacactctgttgaactgactttacccaatcatcatccatttcatagagatttgctccgatatgccaagctgatggagtggctaaagagtacagattatggaaaatatgaaggactaacaaagaattacatggattatttatcccgactatatgaaagagaaatcaaagatttctttgaagttgcaaagatcaagatgactggcacaactaaagaaagcaagaagtttggtcttcatggaagttcggggaaattaactggatctacttctagtctaaataagctcagtgttcagagttcagggaatcgcagatctcagtcatcttccctgttggatatgggaaacatgtctgcctctgatctcgatgttgctgacaggaccaaatttgataagatctttgaacaggtactaagtgaactggagcccctatgtctggcagaacaggacttcataagtaaatttttcaaactacagcaacatcaaagtatgcctggaactatggctgaagcagaggacctggatggaggaacattatcacggcaacataattgtggcacaccactgcctgtttcatctgagaaagatatgatccgccaaatgatgattaaaatatttcgctgcattgagccagagctgaacaacctaattgcattaggagacaaaattgatagctttaactctctttatatgttagtcaaaatgagtcatcatgtgtggactgcacaaaatgtggaccctgcttctttcctaagtactacattgggaaatgttttggtgactgtcaaaaggaactttgacaaatgcattagtaaccaaataaggcaaatggaagaagtaaagatctcaaaaaagagtaaagttggaattcttccatttgttgctgaatttgaagaatttgctggacttgcagaatcaatcttcaaaaatgctgagcgtcgtggagacctggataaagcatacaccaaacttatcagaggagtatttgttaatgtggagaaagtagcaaatgaaagccagaagacccccagggatgtggttatgatggaaaactttcaccatatttttgcaactctttctcgattgaaaatctcatgtctagaagcagaaaaaaaagaagccaaacaaaaatacacagatcaccttcagtcttatgtcatttactctttaggacaacctcttgaaaaactaaatcttctttgaagctgttgaagctcgcgtgcatcgataacaccggacggcg

SEQ ID NO: 294010 - DNA, 2660 bp, Homo sapiens
cgcggagtttgtcacgtgcccggatataggaagtgttgggggaacggccgcttcccgttcaacgctttattgaggggcgtatcctagtggcccccatccggtctccgttttggaagacccgcctcggcacagccaggctcagtccggccttgcggtaagccttcggccgcggctgcccggtagtcccggcggcggcggacagacgagctgacaggcaccagggtctaaggcggctcctcagtccggctgctgtctccacgcctggggtcgggcaccgctccttctgaccttcctttccccgtttgtcccgctgagaaaagatgacagcaatcaagcatgcattacaaagagacatttttacaccaaatgatgaacgcctgctgagcattgtgaatgtctgcaaagcaggaaaaaagaaaaagaactgttttttatgtgccacagtgacaactgaacgccctgtgcaggttaaggtggtcaaagtcaagaaatccgataagggagatttctacaaaaggcagattgcatgggcccttcgagatcttgctgtggtagatgccaaagatgctatcaaagaaaatcctgaatttgatttacactttgaaaaaatatataaatgggttgccagcagcactgctgaaaagaatgcatttatttcatgcatttggaaattgaatcagcgatatctccggaagaaaattgattttgtcaatgttagctcacagcttttggaagaatctgttccaagtggagaaaatcagagtgtgacaggaggtgatgaagaagtagtagatgaataccaagagttaaatgcaagagaagaacaggatatcgaaataatgatggaaggctgtgaatatgcaatctcgaatgcggaagcctttgcagaaaaattgtccagagagctgcaggtgctagatggggctaacatccagtcaatcatggcatctgaaaaacaagtcaacatcctgatgaaattgctagatgaggctctaaaggaggtagatcagattgaattgaaactgagcagttatgaggaaatgctccaaagtgtaaaagaacaaatggatcagatctctgaaagcaaccacctaattcatcttagtaacactaataatgtaaaactcctatctgagatagagttccttgtgaaccacatggacttggccaaaggtcatataaaggcccttcaggaaggagatcttgcttcttccagaggcattgaggcctgcaccaatgctgctgatgcccttctgcagtgcatgaatgtagctcttcgaccaggccatgacttgcttctggcagtcaaacagcaacagcagcgattcagtgatttgcgagagctttttgcccggagactggccagtcacctcaacaatgtttttgttcaacagggtcatgatcagagttcgactcttgcccaacactctgttgaactgactttacccaatcatcatccatttcatagagatttgctccgatatgccaagctgatggagtggctaaagagtacagattatggaaaatatgaaggactaacaaagaattcagatttggagatatcttaaggaaaaaatttacattactggaattctttgccttttgaagttttaggaggattaatattctgaataattaaacataaattatatttccttaaaagatttgtgccaacaagtgctttgtcccctagtgaatattcaaataagtaatcaataagctttttgcctaattgtgttcccagtgagtattattgccctatctttatatataatgcagtattcatgaatgtaatttaaagtgaagaaacaagattagagccaacctagtaatgatttatggaatcattctctgctcagagtatatttttgattgacaatattaatgagcttttttaaatgaaattgactttttcccaggaatgttgcgtcatcctgtgatttgagcttttcacagattatgtatttttacctcatcatctaatttggttgctgaagagttgtcaaaaacaggaattttaacgaagaagaaaggaatgaagaaaaaagaaggaaacagaccaatcagtgtttctttagtaagaaatcataattcagaaagctatttgcacttggttaggtttacacagctcacactttttggcaggaacaggaaaaacttgttcaaaattctttgggaataagaatcactagccactgcctctagctgtactgaggctgaatctaagcaaagccccattttttggtatacagaaaatagttgtagcttggactgcccagattccctcctcccgggactgctaccttcgtctgcaactctgggtcatacatgtagggtagttagtagagatggtccatccatgcttgggtaggaaaggagttttcctctcctaatagcctcctgagattggcagtctgacttgaagatgactcacatgtcttctctccacctcagttttacatttgtagaatttgtcttattgttgtgaaccccaaatgtctgagacaagatctcagtcaatttaggaagtttattttgccaaagttaaggatgcgcacccatgatacagcctcaggaggtcctgacgacatgtgcccaaggtggtccgagcacaccttggttttatacattttagggagacatgggacgtcaatcagtat

SEQ ID NO: 294011 - DNA, 1621 bp, Homo sapiens
cgcggagtttgtcacgtgcccggatataggaagtgttgggggaacggccgcttcccgttcaacgctttattgaggggcgtatcctagtggcccccatccggtctccgttttggaagacccgcctcggcacagccaggctcagtccggccttgcggtaagccttcggccgcggctgcccggtagtcccggcggcggcggacagacgagctgacaggcaccagggtctaaggcggctcctcagtccggctgctgtctccacgcctggggtcgggcaccgctccttctgaccttcctttccccgtttgtcccgctgagaaaagatgacagcaatcaagcatgcattacaaagagacatttttacaccaaatgatgaacgcctgctgagcattgtgaatgtctgcaaagcaggaaaaaagaaaaagaactgttttttatgtgccacagtgacaactgaacgccctgtgcaggttaaggtggtcaaagtcaagaaatccgataagggagatttctacaaaaggcagattgcatgggcccttcgagatcttgctgtggtagatgccaaagatgctatcaaagaaaatcctgaatttgatttacactttgaaaaaatatataaatgggttgccagcagcactgctgaaaagaatgcatttatttcatgcatttggaaattgaatcagcgatatctccggaagaaaattgattttgtcaatgttagctcacagcttttggaagaatctgttccaagtggagaaaatcagagtgtgacaggaggtgatgaagaagtagtagatgaataccaagagttaaatgcaagagaagaacaggatatcgaaataatgatggaaggctgtgaatatgcaatctcgaatgcggaagcctttgcagaaaaattgtccagagagctgcaggtgctagatggggctaacatccagtcaatcatggcatctgaaaaacaagtcaacatcctgatgaaattgctagatgaggctctaaaggaggtagatcagattgaattgaaactgagcagttatgaggaaatgctccaaagtgtaaaagaacaaatggatcagatctctgaaagcaaccacctaattcatcttagtaacactaataatgtaaaactcctatctgagatagagttccttgtgaaccacatggacttggccaaaggtcatataaaggcccttcaggaaggagatcttgcttcttccagaggcattgaggcctgcaccaatgctgctgatgcccttctgcagtgcatgaatgtagctcttcgaccaggccatgacttgcttctggcagtcaaacagcaacagcagcgattcagtgatttgcgagagctttttgcccggagactggccagtcacctcaacaatgtttttgttcaacagagacctcatgattctatctacttttgcctttagcaacatgatgagactgattatgtacataacttagagaaaatgaaaataaactgaaatgcactgaactaaaagtacaaccaggaaaaaactgaagttgtggaactttttaccatatgcttaagtttagaaatttttctctcaacatacatatacagaaacaagctataataaaataaaacctgtattgcagacca

SEQ ID NO: 294012 - DNA, 1565 bp, Homo sapiens
cgcggagtttgtcacgtgcccggatataggaagtgttgggggaacggccgcttcccgttcaacgctttattgaggggcgtatcctagtggcccccatccggtctccgttttggaagacccgcctcggcacagccaggctcagtccggccttgcggtaagccttcggccgcggctgcccggtagtcccggcggcggcggacagacgagctgacaggcaccagggtctaaggcggctcctcagtccggctgctgtctccacgcctggggtcgggcaccgctccttctgaccttcctttccccgtttgtcccgctgagaaaagatgacagcaatcaagcatgcattacaaagagacatttttacaccaaatgatgaacgcctgctgagcattgtgaatgtctgcaaagcaggaaaaaagaaaaagaactgttttttatgtgccacagtgacaactgaacgccctgtgcaggttaaggtggtcaaagtcaagaaatccgataagggagatttctacaaaaggcagattgcatgggcccttcgagatcttgctgtggtagatgccaaagatgctatcaaagaaaatcctgaatttgatttacactttgaaaaaatatataaatgggttgccagcagcactgctgaaaagaatgcatttatttcatgcatttggaaattgaatcagcgatatctccggaagaaaattgattttgtcaatgttagctcacagcttttggaagaatctgttccaagtggagaaaatcagagtgtgacaggaggtgatgaagaagtagtagatgaataccaagagttaaatgcaagagaagaacaggatatcgaaataatgatggaaggctgtgaatatgcaatctcgaatgcggaagcctttgcagaaaaattgtccagagagctgcaggtgctagatggggctaacatccagtcaatcatggcatctgaaaaacaagtcaacatcctgatgaaattgctagatgaggctctaaaggaggtagatcagattgaattgaaactgagcagttatgaggaaatgctccaaagtgtaaaagaacaaatggatcagatctctgaaagcaaccacctaattcatcttagtaacactaataatgtaaaactcctatctgagatagagttccttgtgaaccacatggacttggccaaaggtcatataaaggcccttcaggaaggagatcttgcttcttccagaggcattgaggcctgcaccaatgctgctgatgcccttctgcagtgcatgaatgtagctcttcgaccaggccatgacttgcttctggcagtcaaacagcaacagcagcgattcagtgatttgcgagagctttttgcccggagactggccagtcacctcaacaatgtttttgttcaacagggtcatgatcagagttcgactcttgcccaacactctgttgaactgactttacccaatcatcatccatttcatagagatttgctccgatatgccaagctgatggagtggctaaagagtacagattatggaaaatatgaaggactaacaaaggtatggatttgacgtcattta

SEQ ID NO: 294013 - DNA, 1492 bp, Homo sapiens
tcttgcgtatttatgattatcttatggtggtaatgttcatttgatatacacaggatataaaagttgtgtaagtatttggtttttatttttctgtgttctattcttaattatttttctatgtcttattggtttggcttggccacattttggtcattgtttagactttttattgtaacgtttctttgtactgttgattacatttatttacttattttactcactttagggtcatgatcagagttcgactcttgcccaacactctgttgaactgactttacccaatcatcatccatttcatagagatttgctccgatatgccaagctgatggagtggctaaagagtacagattatggaaaatatgaaggactaacaaagaattcagatttggagatatcttaaggaaaaaatttacattactggaattctttgccttttgaagttttaggaggattaatattctgaataattaaacataaattatatttccttaaaagatttgtgccaacaagtgctttgtcccctagtgaatattcaaataagtaatcaataagctttttgcctaattgtgttcccagtgagtattattgccctatctttatatataatgcagtattcatgaatgtaatttaaagtgaagaaacaagattagagccaacctagtaatgatttatggaatcattctctgctcagagtatatttttgattgacaatattaatgagcttttttaaatgaaattgactttttcccaggaatgttgcgtcatcctgtgatttgagcttttcacagattatgtatttttacctcatcatctaatttggttgctgaagagttgtcaaaaacaggaattttaacgaagaagaaaggaatgaagaaaaaagaaggaaacagaccaatcagtgtttctttagtaagaaatcataattcagaaagctatttgcacttggttaggtttacacagctcacactttttggcaggaacaggaaaaacttgttcaaaattctttgggaataagaatcactagccactgcctctagctgtactgaggctgaatctaagcaaagccccattttttggtatacagaaaatagttgtagcttggactgcccagattccctcctcccgggactgctaccttcgtctgcaactctgggtcatacatgtagggtagttagtagagatggtccatccatgcttgggtaggaaaggagttttcctctcctaatagcctcctgagattggcagtctgacttgaagatgactcacatgtcttctctccacctcagttttacatttgtagaatttgtcttattgttgtgaaccccaaatgtctgagacaagatctcagtcaatttaggaagtttattttgccaaagttaaggatgcgcacccatgatacagcctcaggaggtcctgacgacatgtgcccaaggtggtccgagcacaccttggttttatacattttagggagacatgggacgtcaatcagtat

SEQ ID NO: 294014 - DNA, 238 bp, Homo sapiens
tatgagccctggaagatcaagccagtagaagatagaagatctatccctgctttatactttggatcatttatttgtgaagatcacaactttcaaagttttattatttcttaggtcttcatggaagttcggggaaattaactggatctacttctagtctaaataagctcagtgttcagagttcagggaatcgcagatctcagtcatcttccctgttggatatgggaaacatgtctgcctc

SEQ ID NO: 294015 - DNA, 539 bp, Homo sapiens
ggtagatagatatacaaatgagcaataatttcattcttaagtcatagtttggcattgcttaaaaagttgtacattaggccaagcacagtaggtcacacctgagaagctgaggcaggcagatcacttgaggtcagttcataacaagcctggccagcatggtgaaaccccattgctaatagaaataaaaaaaaaagttatccaggcatggtggtgcacaccggtaatccctgctactcgggaggctgaggcagaagaatcagttgaacttgggaggcagaggttcaagcaattctcctgcctcagcctcctgagtagctgggattacaggtctaatttttgtatttttggtagagagggggtttcaccatgctggtcagtttggtctcgaactcctgacctcaggtgatccacccacctcggcctcccaaagtgctgggattacaggcgtgaaccaccacacccggcggcaattcagtcttttaatgtgctcagggaagtaagtgttacccttgcctcctttcttctctcacaccctacat

SEQ ID NO: 294016 - DNA, 445 bp, Homo sapiens
agtgcaacctgagctcttaccgccatcttggctcctgtggaggcctgctgggaacgggacttctaaaaggaactatgtctggaaggctgtggtccaaggccatttttgctggctataagcggggtctccggaaccaaagggagcacacagctcttcttaaaattgaaggtgtttacgcccgagatgaaacagaattctatttgggcaagagatgcgcttatgtatataaagcaaagaacaacacagtcactcctggcggcaaaccaaacaaaaccagagtcatctggggaaaagtaactcgggcccatggaaacagtggcatggttcgtgccaaattccgaagcaatcttcctgctaaggccattggacacagattccgagtgatgctgtacccctcaaggatttaaactaacgaaaattcattaaataatgtggatttgtgctc

SEQ ID NO: 294017 - DNA, 479 bp, Homo sapiens
ggagtgaagggtctgctgctgaaatttgggggcaaataaccggagtaggtttgttcctgtgccttgcgagtcgccggcctgctgggaacgggacttctaaaaggaactatgtctggaaggctgtggtccaaggccatttttgctggctataagcggggtctccggaaccaaagggagcacacagctcttcttaaaattgaaggtgtttacgcccgagatgaaacagaattctatttgggcaagagatgcgcttatgtatataaagcaaagaacaacacagtcactcctggcggcaaaccaaacaaaaccagagtcatctggggaaaagtaactcgggcccatggaaacagtggcatggttcgtgccaaattccgaagcaatcttcctgctaaggccattggacacagattccgagtgatgctgtacccctcaaggatttaaactaacgaaaattcattaaataatgtggatttgtgctc

SEQ ID NO: 294018 - DNA, 416 bp, Homo sapiens
gtgggcgctatggcttggaccacagccttccagacatagttccttttagaagtcccgttcccagcaaaggccatttttgctggctataagcggggtctccggaaccaaagggagcacacagctcttcttaaaattgaaggtgtttacgcccgagatgaaacagaattctatttgggcaagagatgcgcttatgtatataaagcaaagaacaacacagtcactcctggcggcaaaccaaacaaaaccagagtcatctggggaaaagtaactcgggcccatggaaacagtggcatggttcgtgccaaattccgaagcaatcttcctgctaaggccattggacacagattccgagtgatgctgtacccctcaaggatttaaactaacgaaaattcattaaataatgtggatttgtgctc

SEQ ID NO: 294019 - DNA, 4539 bp, Homo sapiens
ctaaatgaagagcgcttgggacctgaacaaccagcagcgatacccaggtacaaaggacctccagaccagagccagccagcagcaaaaagagcatggagctgaggagtacagcagcccccagagctgagggctacagcaacgtgggcttccagaatgaagaaaactttcttgagaacgagaacacatcaggaaacaactcaataagaagcagagctgtgcaaagcagggagcacacaaacaccaaacaggatgaagaacaggtcacagttgagcaggattctccaagaaacagagaacacatggaggatgatgatgaggagatgcaacaaaaagggtgtttggaaaggaggtatgacacagtatgtggtttctgtaggaaacacaaaacaactcttcggcacatcatctggggcattttattagcaggttatctggttatggtgatttcggcctgtgtgctgaactttcacagagcccttcctctttttgtgatcaccgtggctgccatcttctttgttgtctgggatcacctgatggccaaatacgaacatcgaattgatgagatgctgtctcctggcagaaggcttctaaacagccattggttctggctgaagtgggtgatctggagctccctggtcctagcagttattttctggttggcctttgacactgccaaattgggtcaacagcagctggtgtccttcggtgggctcataatgtacattgtcctgttatttctattttccaagtacccaaccagagtttactggagacctgtcttatggggaatcgggctacagtttcttcttgggctcttgattctaaggactgaccctggatttatagcttttgattggttgggcagacaagttcagacttttctggagtacacagatgctggtgcttcatttgtctttggtgagaaatacaaagaccacttctttgcatttaaggtcctgccgatcgtggttttcttcagcactgtgatgtccatgctgtactacctgggactgatgcagtggattattagaaaggttggatggatcatgctagttactacgggatcatctcctattgaatctgtagttgcttctggcaatatatttgttggacaaacggagtctccactgctggtccgaccatatttaccttacatcaccaagtctgaactccacgccatcatgaccgccgggttctctaccattgctggaagcgtgctaggtgcatacatttcttttggggttccatcctcccacttgttaacagcgtcagttatgtcagcacctgcgtcattggctgctgctaaactcttttggcctgagacagaaaaacctaaaataaccctcaagaatgccatgaaaatggaaagtggtgattcagggaatcttctagaagctgcaacacagggagcatcctcctccatctccctggtggccaacatcgctgtgaatctgattgccttcctggccctgctgtcttttatgaattcagccctgtcctggtttggaaacatgtttgactacccacagctgagttttgagctaatctgctcctacatcttcatgcccttttccttcatgatgggagtggaatggcaggacagctttatggttgccagactcataggttataagaccttcttcaatgaatttgtggcttatgagcacctctcaaaatggatccacttgaggaaagaaggtggacccaaatttgtaaacggtgtgcagcaatatatatcaattcgttctgagataatcgccacttacgctctctgtggttttgccaatatcgggtccctaggaatcgtgatcggcggactcacatccatggctccttccagaaagcgtgatatcgcctcgggggcagtgagagctctgattgcggggaccgtggcctgcttcatgacagcctgcatcgcaggcatactctccagcactcctgtggacatcaactgccatcacgttttagagaatgccttcaactccactttccctggaaacacaaccaaggtgatagcttgttgccaaagtctgttgagcagcactgttgccaagggtcctggtgaagtcatcccaggaggaaaccacagtctgtattctttgaagggctgctgcacattgttgaatccatcgacctttaactgcaatgggatctctaatacattttgaggtcagccacttctccagtggaactctgaagtacagatgctgaattttctgctttggaaagaaaaaaaaaagaagctattgtccacagattgatgcttccataatggaatcagctttaattgcaaggaatgaagaaaaacaagagtggaccttcaaagctacaacattttcctcctcccctccctccccaccagccccttccccaccaagaactgctatgatgtcccaaagtgaggtgttgttgattccagtctcaatgggattttctgactttaatgtttgcaaggcatttcaccagaatacagctataaacggccgctcccaacaactgggctctgactcacccacacccacttagtgtccactaagtagtccagggtgactcagtttaagcacatctcaggtgaggtcactctgcatataccttggcttacctgaaatagcctgaacttgaatctcacataagggaaaactagtcatcaatcaccaactcattgactaccctcaggaagtcctgcagaaatcaagagtccttgaggagaacacgtggatcataccaaaaccagggtttaaatccattctgcttaagagttctatcagtcagtttaaccataaattacgctacagaaacaaacaacccaaaaacctcagtggcttacagatttatttttcactcacatgtttgtaatgatccatcttggttgtaatccatattgcttcagcacccagtctaaaggagcagcctctaaggggggcatgttggtcttaagagggaaaagaaaggtgggaaccacatgatggctctttcatcttccgctaggaaatgataccctttacttccatgacattccattagccaaaacaagtcctgtgacaggcacgatgtcagtcaccacagttaaattatcctgtcatagggagggatagtgaatattttgcagaagtaatatgatacaccataagggtacataatatccatgtctcccttcaaggagccatcctgttgtaggccataacggtaggcctattcatctgcacatttggtaatgtattcctggtgacaaagcagctactcttcaatcaaaagccgtgtaagaagcagttgaggaaaaaaagtcctggttgagctctgaaaaccttgcgttgataatttcattgaccaggatggcatcagtatcaaacttgaagaatgggtgtcagtgtctaagaaaaagattccagagacaatggtggtgtgctctttaacgaaatgcccatcaccactgctcttaatagcatgaagaccacatgctgtgagaaaacacaaacatcaattaccaagtcaagaaacagacactgaatgtgaaaaaggttttgaaataccttaagtaatttattttgtttctatttttccttctgtttgtgtacaagagtaatttaaaagaaaaagctatgtgaaaatagttggggttttttgtgtgttttgttttttgtggtggtgaaggaggaggcctaatgtccagaggactgtttatccctgaagtatgatatactaaaatatttcttattatttgtatcaattttccttggagctcaatgtgcccttgcagtcttcagactttattttaggaaaatatatttgcatgttttccccccattctcaatgtttggtgtcctggttcatcataccccacagaatgttatgtttatgtatcataccattcctctgtggacatgcatttactttgtttacaggttttggtttgggggttctctttttcctactctggacagtgcatgtacatttactttgcatgctggtgcttttttttctatagcaatagtgtctgatagacatatgcaagtcacatgtaatttaagatctagtagccacgctaaaaaacaagtaaaattaattttaatatatttaactcaatacattggagatattatttcagtaagatatttttcattcttatgaaactaagtctgtctggtttgcatatctcagttgagacactaaagttttactgataatacttaatccatgtttagatttcataaaatctaaatttgcaaagtaaatttacatacccatgttggtctaaatgtgcttaaaagttttccaataactgaaatgagtatcagttttaaatttaaaaatttgttacttggttactccatatttcaggtattagtggctaccatattggtcagagcagattcataggatgatttcccaggtttgaagtgtgtgtatatttctggtattataagatgtcagactggtttttggagaaatatgttgtcttaatttttacctgctttgatatgacctttctgtgtgtacgtgtgacatttctttataaatgcaacatgttcacataggtcc

SEQ ID NO: 294020 - DNA, 4715 bp, Homo sapiens
ctaaatgaagagcgcttgggacctgaacaaccagcagcgatacccaggtacaaaggacctccagaccagagccagccagcagcaaaaagagcatggagctgaggagtacagcagcccccagagctgagggctacagcaacgtgggcttccagaatgaagaaaactttcttgagaacgagaacacatcaggaaacaactcaataagaagcagagctgtgcaaagcagggagcacacaaacaccaaacagagaatcaaaggccacattggatatgacagaagacaagtgctgagatttgacattatacttcttagagcacactcaaactgctccacctccatctatttcctcccccaccagcttctgtaccattggttacaagagccaggcttattatttgagacattattggagactggagacaggatgaagaacaggtcacagttgagcaggattctccaagaaacagagaacacatggaggatgatgatgaggagatgcaacaaaaagggtgtttggaaaggaggtatgacacagtatgtggtttctgtaggaaacacaaaacaactcttcggcacatcatctggggcattttattagcaggttatctggttatggtgatttcggcctgtgtgctgaactttcacagagcccttcctctttttgtgatcaccgtggctgccatcttctttgttgtctgggatcacctgatggccaaatacgaacatcgaattgatgagatgctgtctcctggcagaaggcttctaaacagccattggttctggctgaagtgggtgatctggagctccctggtcctagcagttattttctggttggcctttgacactgccaaattgggtcaacagcagctggtgtccttcggtgggctcataatgtacattgtcctgttatttctattttccaagtacccaaccagagtttactggagacctgtcttatggggaatcgggctacagtttcttcttgggctcttgattctaaggactgaccctggatttatagcttttgattggttgggcagacaagttcagacttttctggagtacacagatgctggtgcttcatttgtctttggtgagaaatacaaagaccacttctttgcatttaaggtcctgccgatcgtggttttcttcagcactgtgatgtccatgctgtactacctgggactgatgcagtggattattagaaaggttggatggatcatgctagttactacgggatcatctcctattgaatctgtagttgcttctggcaatatatttgttggacaaacggagtctccactgctggtccgaccatatttaccttacatcaccaagtctgaactccacgccatcatgaccgccgggttctctaccattgctggaagcgtgctaggtgcatacatttcttttggggttccatcctcccacttgttaacagcgtcagttatgtcagcacctgcgtcattggctgctgctaaactcttttggcctgagacagaaaaacctaaaataaccctcaagaatgccatgaaaatggaaagtggtgattcagggaatcttctagaagctgcaacacagggagcatcctcctccatctccctggtggccaacatcgctgtgaatctgattgccttcctggccctgctgtcttttatgaattcagccctgtcctggtttggaaacatgtttgactacccacagctgagttttgagctaatctgctcctacatcttcatgcccttttccttcatgatgggagtggaatggcaggacagctttatggttgccagactcataggttataagaccttcttcaatgaatttgtggcttatgagcacctctcaaaatggatccacttgaggaaagaaggtggacccaaatttgtaaacggtgtgcagcaatatatatcaattcgttctgagataatcgccacttacgctctctgtggttttgccaatatcgggtccctaggaatcgtgatcggcggactcacatccatggctccttccagaaagcgtgatatcgcctcgggggcagtgagagctctgattgcggggaccgtggcctgcttcatgacagcctgcatcgcaggcatactctccagcactcctgtggacatcaactgccatcacgttttagagaatgccttcaactccactttccctggaaacacaaccaaggtgatagcttgttgccaaagtctgttgagcagcactgttgccaagggtcctggtgaagtcatcccaggaggaaaccacagtctgtattctttgaagggctgctgcacattgttgaatccatcgacctttaactgcaatgggatctctaatacattttgaggtcagccacttctccagtggaactctgaagtacagatgctgaattttctgctttggaaagaaaaaaaaaagaagctattgtccacagattgatgcttccataatggaatcagctttaattgcaaggaatgaagaaaaacaagagtggaccttcaaagctacaacattttcctcctcccctccctccccaccagccccttccccaccaagaactgctatgatgtcccaaagtgaggtgttgttgattccagtctcaatgggattttctgactttaatgtttgcaaggcatttcaccagaatacagctataaacggccgctcccaacaactgggctctgactcacccacacccacttagtgtccactaagtagtccagggtgactcagtttaagcacatctcaggtgaggtcactctgcatataccttggcttacctgaaatagcctgaacttgaatctcacataagggaaaactagtcatcaatcaccaactcattgactaccctcaggaagtcctgcagaaatcaagagtccttgaggagaacacgtggatcataccaaaaccagggtttaaatccattctgcttaagagttctatcagtcagtttaaccataaattacgctacagaaacaaacaacccaaaaacctcagtggcttacagatttatttttcactcacatgtttgtaatgatccatcttggttgtaatccatattgcttcagcacccagtctaaaggagcagcctctaaggggggcatgttggtcttaagagggaaaagaaaggtgggaaccacatgatggctctttcatcttccgctaggaaatgataccctttacttccatgacattccattagccaaaacaagtcctgtgacaggcacgatgtcagtcaccacagttaaattatcctgtcatagggagggatagtgaatattttgcagaagtaatatgatacaccataagggtacataatatccatgtctcccttcaaggagccatcctgttgtaggccataacggtaggcctattcatctgcacatttggtaatgtattcctggtgacaaagcagctactcttcaatcaaaagccgtgtaagaagcagttgaggaaaaaaagtcctggttgagctctgaaaaccttgcgttgataatttcattgaccaggatggcatcagtatcaaacttgaagaatgggtgtcagtgtctaagaaaaagattccagagacaatggtggtgtgctctttaacgaaatgcccatcaccactgctcttaatagcatgaagaccacatgctgtgagaaaacacaaacatcaattaccaagtcaagaaacagacactgaatgtgaaaaaggttttgaaataccttaagtaatttattttgtttctatttttccttctgtttgtgtacaagagtaatttaaaagaaaaagctatgtgaaaatagttggggttttttgtgtgttttgttttttgtggtggtgaaggaggaggcctaatgtccagaggactgtttatccctgaagtatgatatactaaaatatttcttattatttgtatcaattttccttggagctcaatgtgcccttgcagtcttcagactttattttaggaaaatatatttgcatgttttccccccattctcaatgtttggtgtcctggttcatcataccccacagaatgttatgtttatgtatcataccattcctctgtggacatgcatttactttgtttacaggttttggtttgggggttctctttttcctactctggacagtgcatgtacatttactttgcatgctggtgcttttttttctatagcaatagtgtctgatagacatatgcaagtcacatgtaatttaagatctagtagccacgctaaaaaacaagtaaaattaattttaatatatttaactcaatacattggagatattatttcagtaagatatttttcattcttatgaaactaagtctgtctggtttgcatatctcagttgagacactaaagttttactgataatacttaatccatgtttagatttcataaaatctaaatttgcaaagtaaatttacatacccatgttggtctaaatgtgcttaaaagttttccaataactgaaatgagtatcagttttaaatttaaaaatttgttacttggttactccatatttcaggtattagtggctaccatattggtcagagcagattcataggatgatttcccaggtttgaagtgtgtgtatatttctggtattataagatgtcagactggtttttggagaaatatgttgtcttaatttttacctgctttgatatgacctttctgtgtgtacgtgtgacatttctttataaatgcaacatgttcacataggtcc

SEQ ID NO: 294021 - DNA, 415 bp, Homo sapiens
acatagtgaaaccccatctctactaaaaatacaaaaattagccaggggtggtggcagatgcctataatcccagctactggggaggctgaggcaggagaattgcttgaacccgggaagtggaggttgcagtgagccaagatcgctccattctactccagcctgggcaacagagcaagactccatctctcaaaaaaaaaaaaaattaagcctgattatgattctcaagttagcacaacaaatgatgccaatgcctcctttccccttctcttagggtgatctggagctccctggtcctagcagttattttctggttggcctttgacactgccaaattgggtcaacagcagctggtgtccttcggtgggctcataatgtacattgtcctgttatttctattttccaagtacccaaccag

SEQ ID NO: 294022 - DNA, 2751 bp, Homo sapiens
agcggagcggggggggcacgaggggccggggcggggccgcaagcggcatggaggaggcggaggccgcggcgagccgggccgagcagtgagggccctagcggggcccgagcggggcccggggcccctaagccattcctgaagtcatgggctggccaggacattggtgacccgccaatccggtatggacgactggaagcccagccccctcatcaagccctttggggctcggaagaagcggagctggtaccttacctggaagtataaactgacaaaccagcgggccctgcggagattctgtcagacaggggccgtgcttttcctgctggtgactgtcattgtcaatatcaagttgatcctggacactcggcgagccatcagtgaagccaatgaagacccagagccagagcaagactatgatgaggccctaggccgcctggagcccccacggcgcagaggcagtggtccccggcgggtcctggacgtagaggtgtattcaagtcgcagcaaagtatatgtggcagtggatggcaccacggtgctggaggatgaggcccgggagcagggccggggcatccatgtcattgtcctcaaccaggccacgggccacgtgatggcaaaacgtgtgtttgacacgtactcacctcatgaggatgaggccatggtgctattcctcaacatggtagcgcccggccgagtgctcatctgcactgtcaaggatgagggctccttccacctcaaggacacagccaaggctctgctgaggagcctgggcagccaggctggccctgccctgggctggagggacacatgggccttcgtgggacgaaaaggaggtcctgtcttcggggagaaacattctaaatcacctgccctctcttcctggggggacccagtcctgctgaagacagatgtgccattgagctcagcagaagaggcagagtgccactgggcagacacagagctgaaccgtcgccgccggcgcttctgcagcaaagttgagggctatggaagtgtatgcagctgcaaggaccccacacccatcgagttcagccctgacccactcccagacaacaaggtcctcaatgtgcctgtggctgtcattgcagggaaccgacccaattacctgtacaggatgctgcgctctctgctttcagcccagggggtgtctcctcagatgataacagttttcattgacggctactatgaggaacccatggatgtggtggcactgtttggtctgaggggcatccagcatactcccatcagcatcaagaatgcccgcgtgtctcagcactacaaggccagcctcactgccactttcaacctgtttccggaggccaagtttgctgtggttctggaagaggacctggacattgctgtggattttttcagtttcctgagccaatccatccacctactggaggaggatgacagcctgtactgcatctctgcctggaatgaccaggggtatgaacacacggctgaggacccagcactactgtaccgtgtggagaccatgcctgggctgggctgggtgctcaggaggtccttgtacaaggaggagcttgagcccaagtggcctacaccggaaaagctctgggattgggacatgtggatgcggatgcctgaacaacgccggggccgagagtgcatcatccctgacgtttcccgatcctaccactttggcatcgtcggcctcaacatgaatggctactttcacgaggcctacttcaagaagcacaagttcaacacggttccaggtgtccagctcaggaatgtggacagtctgaagaaagaagcttatgaagtggaagttcacaggctgctcagtgaggctgaggttctggaccacagcaagaacccttgtgaagactctttcctgccagacacagagggccacacctacgtggcctttattcgaatggagaaagatgatgacttcaccacctggacccagcttgccaagtgcctccatatctgggacctggatgtgcgtggcaaccatcggggcctgtggagattgtttcggaagaagaaccacttcctggtggtgggggtcccggcttccccctactcagtgaagaagccaccctcagtcaccccaattttcctggagccacccccaaaggaggagggagccccaggagccccagaacagacatgagacctcctccaggaccctgcggggctgggtactgtgtacccccaggctggctagcccttccctccatcctgtaggattttgtagatgctggtaggggctggggctaccttgtttttaacatgagacttaattactaactccaaggggagggttcccctgctccaacaccccgttcctgagttaaaagtctatttatttacttccttgttggagaagggcaggagagtacctgggaatcattacgatccctagcagctcatcctgccctttgaataccctcactttccaggcctggctcagaatctaacctatttattgactgtcctgagggccttgaaaacaggccgaacctggagggcctggatttctttttgggctggaatgctgccctgagggtggggctggctcttactcaggaaactgctgtgcccaacccatggacaggcccagctggggcccacatgctgacacagactcactcagagacccttagacactggaccaggcctcctctcagccttctctttgtccagatttccaaagctggataagttggtcattgattaaaaaaggagaagccctctggg

SEQ ID NO: 294023 - DNA, 334 bp, Homo sapiens
cggcacgaggggtattcaaagggcaggatgagctgctaggggctcagaatctaacctatttattgactgtcctgagggccttgaaaacaggccgaacctggagggcctggatttctttttgggctggaatgctgccctgagggtggggctggctcttactcaggaaactgctgtgcccaacccatggacaggcccagctggggcccacatgctgacacagactcactcagagacccttagacactggaccaggcctcctctcagccttctctttgtccagatttccaaagctggataagttggtcattgattaaaaaaggagaagccctctggg

SEQ ID NO: 294024 - DNA, 466 bp, Homo sapiens
  misc_feature (438)..(438): n is a, c, g, or t
  misc_feature (462)..(462): n is a, c, g, or t
ctgcccactcccctgacccatttctccctcctcttcagtctgaagaaagaagcttatgaagtggaagttcacaggctgctcaggtatggcctaggacaattggggtgtagcagggagcaaagagtcaaatactggggatcttggccccataatttacagggtcctgtgcaaaatgaaaatcagggccctcatctcaaacattaggattacaggtgtgagccaccacactgggccaatgcttaatattttaatgtatctcaacaataaaaccaagaagaaacaaagccttttgacttgttagaatgtattaagtagtattttaaagaaactttatagttgtgacattgaaagactgttggggtggggggaggaaaatttttactttccatcttaatgtaaccttatgctattctgtatttttactgtatattgcttttncaataaatataaaatgaaatgttnaaaa

SEQ ID NO: 294025 - DNA, 657 bp, Homo sapiens
agcggggggcggggccgcaagcggcatggaggaggcggaggccgcggcgagccgggccgagcagtgagggccctagcggggcccgagcggggcccggggcccctaagccattcctgaagtcatgggctggccaggacattggtgacccgccaatccggtatggacgactggaagcccagccccctcatcaagccctttggggctcggaagaagcggagctggtaccttacctggaagtataaactgacaaaccagcgggccctgcggagattctgtcagacaggggccgtgcttttcctgctggtgactgtcattgtcaatatcaagttgatcctggacactcggcgagccatcagtgaagccaatgaagacccagagccagagcaagactatgatgaggccctaggccgcctggagcccccacggcgcagaggcagtggtccccggcgggtcctggacgtagaggtgtattcaagtcgcagcaaagtatatgtggcagtggatggcaccacggtcagtgggccagggtctggtgtacagtcactctattctgctcagggcatggtccactggcagcagggtctactgcctaagtgggaactgcaactctgccagtttctagctgtgtgactttggagtcctcgattccttatctat

SEQ ID NO: 294026 - DNA, 426 bp, Homo sapiens
aggccaaattaaagctagtaagagcttgctgaggatgctgcaaagaggatggagaagacggtgggaaattagagggctctttacaggtctaggacttcatttgtgtgtcttatagatgtctggctggtcagcaagtgggtgtgggccagacaatgtgaggtgctgattttcactctcatacccactccaggaggcctacttcaagaagcacaagttcaacacggttccaggtgtccagctcaggaatgtggacaggaaactgctgtgcccaacccatggacaggcccagctggggcccacatgctgacacagactcactcagagacccttagacactggaccaggcctcctctcagccttctctttgtccagatttccaaagctggataagttggtcattgattaaaaaaggagaagccctctggg

SEQ ID NO: 294027 - DNA, 2736 bp, Homo sapiens
gctggtactggcccgaattttatggatgcggcatggaggaggcggaggccgcggcgagccgggccgagcagtgagggccctagcggggcccgagcggggcccggggcccctaagccattcctgaagtcatgggctggccaggacattggtgacccgccaatccggtatggacgactggaagcccagccccctcatcaagccctttggggctcggaagaagcggagctggtaccttacctggaagtataaactgacaaaccagcgggccctgcggagattctgtcagacaggggccgtgcttttcctgctggtgactgtcattgtcaatatcaagttgatcctggacactcggcgagccatcagtgaagccaatgaagacccagagccagagcaagactatgatgaggccctaggccgcctggagcccccacggcgcagaggcagtggtccccggcgggtcctggacgtagaggtgtattcaagtcgcagcaaagtatatgtggcagtggatggcaccacggtgctggaggatgaggcccgggagcagggccggggcatccatgtcattgtcctcaaccaggccacgggccacgtgatggcaaaacgtgtgtttgacacgtactcacctcatgaggatgaggccatggtgctattcctcaacatggtagcgcccggccgagtgctcatctgcactgtcaaggatgagggctccttccacctcaaggacacagccaaggctctgctgaggagcctgggcagccaggctggccctgccctgggctggagggacacatgggccttcgtgggacgaaaaggaggtcctgtcttcggggagaaacattctaaatcacctgccctctcttcctggggggacccagtcctgctgaagacagatgtgccattgagctcagcagaagaggcagagtgccactgggcagacacagagctgaaccgtcgccgccggcgcttctgcagcaaagttgagggctatggaagtgtatgcagctgcaaggaccccacacccatcgagttcagccctgacccactcccagacaacaaggtcctcaatgtgcctgtggctgtcattgcagggaaccgacccaattacctgtacaggatgctgcgctctctgctttcagcccagggggtgtctcctcagatgataacagttttcattgacggctactatgaggaacccatggatgtggtggcactgtttggtctgaggggcatccagcatactcccatcagcatcaagaatgcccgcgtgtctcagcactacaaggccagcctcactgccactttcaacctgtttccggaggccaagtttgctgtggttctggaagaggacctggacattgctgtggattttttcagtttcctgagccaatccatccacctactggaggaggatgacagcctgtactgcatctctgcctggaatgaccaggggtatgaacacacggctgaggacccagcactactgtaccgtgtggagaccatgcctgggctgggctgggtgctcaggaggtccttgtacaaggaggagcttgagcccaagtggcctacaccggaaaagctctgggattgggacatgtggatgcggatgcctgaacaacgccggggccgagagtgcatcatccctgacgtttcccgatcctaccactttggcatcgtcggcctcaacatgaatggctactttcacgaggcctacttcaagaagcacaagttcaacacggttccaggtgtccagctcaggaatgtggacagtctgaagaaagaagcttatgaagtggaagttcacaggctgctcagtgaggctgaggttctggaccacagcaagaacccttgtgaagactctttcctgccagacacagagggccacacctacgtggcctttattcgaatggagaaagatgatgacttcaccacctggacccagcttgccaagtgcctccatatctgggacctggatgtgcgtggcaaccatcggggcctgtggagattgtttcggaagaagaaccacttcctggtggtgggggtcccggcttccccctactcagtgaagaagccaccctcagtcaccccaattttcctggagccacccccaaaggaggagggagccccaggagccccagaacagacatgagacctcctccaggaccctgcggggctgggtactgtgtacccccaggctggctagcccttccctccatcctgtaggattttgtagatgctggtaggggctggggctaccttgtttttaacatgagacttaattactaactccaaggggagggttcccctgctccaacaccccgttcctgagttaaaagtctatttatttacttccttgttggagaagggcaggagagtacctgggaatcattacgatccctagcagctcatcctgccctttgaataccctcactttccaggcctggctcagaatctaacctatttattgactgtcctgagggccttgaaaacaggccgaacctggagggcctggatttctttttgggctggaatgctgccctgagggtggggctggctcttactcaggaaactgctgtgcccaacccatggacaggcccagctggggcccacatgctgacacagactcactcagagacccttagacactggaccaggcctcctctcagccttctctttgtccagatttccaaagctggataagttggtcattgattaaaaaaggagaagccctctggg

SEQ ID NO: 294028 - DNA, 2860 bp, Homo sapiens
ggctgtacggctcggagttacgggatactgtcagccggtcggtggtgctggtgtctggcaggctgtccagctgctcgccttgagcggctgggctccgcctgtcaggctatattgactgctggtgaggctgctgcaatgactggtcaacgtcccccgctcctccaacagccagcgcactgcctcgatgccctcattcaaggtcaccagctgctgcaggatcttcacatcgatggctcgcagattcctgaagtcatgggctggccaggacattggtgacccgccaatccggtatggacgactggaagcccagccccctcatcaagccctttggggctcggaagaagcggagctggtaccttacctggaagtataaactgacaaaccagcgggccctgcggagattctgtcagacaggggccgtgcttttcctgctggtgactgtcattgtcaatatcaagttgatcctggacactcggcgagccatcagtgaagccaatgaagacccagagccagagcaagactatgatgaggccctaggccgcctggagcccccacggcgcagaggcagtggtccccggcgggtcctggacgtagaggtgtattcaagtcgcagcaaagtatatgtggcagtggatggcaccacggtgctggaggatgaggcccgggagcagggccggggcatccatgtcattgtcctcaaccaggccacgggccacgtgatggcaaaacgtgtgtttgacacgtactcacctcatgaggatgaggccatggtgctattcctcaacatggtagcgcccggccgagtgctcatctgcactgtcaaggatgagggctccttccacctcaaggacacagccaaggctctgctgaggagcctgggcagccaggctggccctgccctgggctggagggacacatgggccttcgtgggacgaaaaggaggtcctgtcttcggggagaaacattctaaatcacctgccctctcttcctggggggacccagtcctgctgaagacagatgtgccattgagctcagcagaagaggcagagtgccactgggcagacacagagctgaaccgtcgccgccggcgcttctgcagcaaagttgagggctatggaagtgtatgcagctgcaaggaccccacacccatcgagttcagccctgacccactcccagacaacaaggtcctcaatgtgcctgtggctgtcattgcagggaaccgacccaattacctgtacaggatgctgcgctctctgctttcagcccagggggtgtctcctcagatgataacagttttcattgacggctactatgaggaacccatggatgtggtggcactgtttggtctgaggggcatccagcatactcccatcagcatcaagaatgcccgcgtgtctcagcactacaaggccagcctcactgccactttcaacctgtttccggaggccaagtttgctgtggttctggaagaggacctggacattgctgtggattttttcagtttcctgagccaatccatccacctactggaggaggatgacagcctgtactgcatctctgcctggaatgaccaggggtatgaacacacggctgaggacccagcactactgtaccgtgtggagaccatgcctgggctgggctgggtgctcaggaggtccttgtacaaggaggagcttgagcccaagtggcctacaccggaaaagctctgggattgggacatgtggatgcggatgcctgaacaacgccggggccgagagtgcatcatccctgacgtttcccgatcctaccactttggcatcgtcggcctcaacatgaatggctactttcacgaggcctacttcaagaagcacaagttcaacacggttccaggtgtccagctcaggaatgtggacagtctgaagaaagaagcttatgaagtggaagttcacaggctgctcagtgaggctgaggttctggaccacagcaagaacccttgtgaagactctttcctgccagacacagagggccacacctacgtggcctttattcgaatggagaaagatgatgacttcaccacctggacccagcttgccaagtgcctccatatctgggacctggatgtgcgtggcaaccatcggggcctgtggagattgtttcggaagaagaaccacttcctggtggtgggggtcccggcttccccctactcagtgaagaagccaccctcagtcaccccaattttcctggagccacccccaaaggaggagggagccccaggagccccagaacagacatgagacctcctccaggaccctgcggggctgggtactgtgtacccccaggctggctagcccttccctccatcctgtaggattttgtagatgctggtaggggctggggctaccttgtttttaacatgagacttaattactaactccaaggggagggttcccctgctccaacaccccgttcctgagttaaaagtctatttatttacttccttgttggagaagggcaggagagtacctgggaatcattacgatccctagcagctcatcctgccctttgaataccctcactttccaggcctggctcagaatctaacctatttattgactgtcctgagggccttgaaaacaggccgaacctggagggcctggatttctttttgggctggaatgctgccctgagggtggggctggctcttactcaggaaactgctgtgcccaacccatggacaggcccagctggggcccacatgctgacacagactcactcagagacccttagacactggaccaggcctcctctcagccttctctttgtccagatttccaaagctggataagttggtcattgattaaaaaaggagaagccctctggg

SEQ ID NO: 294029 - DNA, 2832 bp, Homo sapiens
agcggagcggggggggcacgaggggccggggcggggccgcaagcggcatggaggaggcggaggccgcggcgagccgggccgagcagtgagggccctagcggggcccgagcggggcccggggcccctaagccattcctgaagtcatgggctggccaggacattggtgacccgccaatccggtatggacgactggaagcccagccccctcatcaagccctttggggctcggaagaagcggagctggtaccttacctggaagtataaactgacaaaccagcgggccctgcggagattctgtcagacaggggccgtgcttttcctgctggtgactgtcattgtcaatatcaagttgatcctggacactcggcgagccatcagtgaagccaatgaagacccagagccagagcaagactatgatgaggccctaggccgcctggagcccccacggcgcagaggcagtggtccccggcgggtcctggacgtagaggtgtattcaagtcgcagcaaagtatatgtggcagtggatggcaccacggtgctggaggatgaggcccgggagcagggccggggcatccatgtcattgtcctcaaccaggccacgggccacgtgatggcaaaacgtgtgtttgacacgtactcacctcatgaggatgaggccatggtgctattcctcaacatggtagcgcccggccgagtgctcatctgcactgtcaaggatgagggctccttccacctcaaggacacagccaaggctctgctgaggagcctgggcagccaggctggccctgccctgggctggagggacacatgggccttcgtgggacgaaaaggaggtcctgtcttcggggagaaacattctaaatcacctgccctctcttcctggggggacccagtcctgctgaagacagatgtgccattgagctcagcagaagaggcagagtgccactgggcagacacagagctgaaccgtcgccgccggcgcttctgcagcaaagttgagggctatggaagtgtatgcagctgcaaggaccccacacccatcgagttcagccctgacccactcccagacaacaaggtcctcaatgtgcctgtggctgtcattgcagggaaccgacccaattacctgtacaggatgctgcgctctctgctttcagcccagggggtgtctcctcagatgataacagttttcattgacggctactatgaggaacccatggatgtggtggcactgtttggtctgaggggcatccagcatactcccatcagcatcaagaatgcccgcgtgtctcagcactacaaggccagcctcactgccactttcaacctgtttccggaggccaagtttgctgtggttctggaagaggacctggacattgctgtggattttttcagtttcctgagccaatccatccacctactggaggaggatgacagcctgtactgcatctctgcctggaatgaccaggtaggctggaatgaccagggtttagcaggcgagtttatgaggcctcagctaatacctcccactatggcaccctgtccccaggggtatgaacacacggctgaggacccagcactactgtaccgtgtggagaccatgcctgggctgggctgggtgctcaggaggtccttgtacaaggaggagcttgagcccaagtggcctacaccggaaaagctctgggattgggacatgtggatgcggatgcctgaacaacgccggggccgagagtgcatcatccctgacgtttcccgatcctaccactttggcatcgtcggcctcaacatgaatggctactttcacgaggcctacttcaagaagcacaagttcaacacggttccaggtgtccagctcaggaatgtggacagtctgaagaaagaagcttatgaagtggaagttcacaggctgctcagtgaggctgaggttctggaccacagcaagaacccttgtgaagactctttcctgccagacacagagggccacacctacgtggcctttattcgaatggagaaagatgatgacttcaccacctggacccagcttgccaagtgcctccatatctgggacctggatgtgcgtggcaaccatcggggcctgtggagattgtttcggaagaagaaccacttcctggtggtgggggtcccggcttccccctactcagtgaagaagccaccctcagtcaccccaattttcctggagccacccccaaaggaggagggagccccaggagccccagaacagacatgagacctcctccaggaccctgcggggctgggtactgtgtacccccaggctggctagcccttccctccatcctgtaggattttgtagatgctggtaggggctggggctaccttgtttttaacatgagacttaattactaactccaaggggagggttcccctgctccaacaccccgttcctgagttaaaagtctatttatttacttccttgttggagaagggcaggagagtacctgggaatcattacgatccctagcagctcatcctgccctttgaataccctcactttccaggcctggctcagaatctaacctatttattgactgtcctgagggccttgaaaacaggccgaacctggagggcctggatttctttttgggctggaatgctgccctgagggtggggctggctcttactcaggaaactgctgtgcccaacccatggacaggcccagctggggcccacatgctgacacagactcactcagagacccttagacactggaccaggcctcctctcagccttctctttgtccagatttccaaagctggataagttggtcattgattaaaaaaggagaagccctctggg

SEQ ID NO: 294030 - DNA, 2966 bp, Homo sapiens
agcggagcggggggggcacgaggggccggggcggggccgcaagcggcatggaggaggcggaggccgcggcgagccgggccgagcagtgagggccctagcggggcccgagcggggcccggggcccctaagccattcctgaagtcatgggctggccaggacattggtgacccgccaatccggtatggacgactggaagcccagccccctcatcaagccctttggggctcggaagaagcggagctggtaccttacctggaagtataaactgacaaaccagcgggccctgcggagattctgtcagacaggggccgtgcttttcctgctggtgactgtcattgtcaatatcaagttgatcctggacactcggcgagccatcagtgaagccaatgaagacccagagccagagcaagactatgatgaggccctaggccgcctggagcccccacggcgcagaggcagtggtccccggcgggtcctggacgtagaggtgtattcaagtcgcagcaaagtatatgtggcagtggatggcaccacggtgctggaggatgaggcccgggagcagggccggggcatccatgtcattgtcctcaaccaggccacgggccacgtgatggcaaaacgtgtgtttgacacgtactcacctcatgaggatgaggccatggtgctattcctcaacatggtagcgcccggccgagtgctcatctgcactgtcaaggatgagggctccttccacctcaaggacacagccaaggctctgctgaggagcctgggcagccaggctggccctgccctgggctggagggacacatgggccttcgtgggacgaaaaggaggtcctgtcttcggggagaaacattctaaatcacctgccctctcttcctggggggacccagtcctgctgaagacagatgtgccattgagctcagcagaagaggcagagtgccactgggcagacacagagctgaaccgtcgccgccggcgcttctgcagcaaagttgagggctatggaagtgtatgcagctgcaaggaccccacacccatcgagttcagccctgacccactcccagacaacaaggtcctcaatgtgcctgtggctgtcattgcagggaaccgacccaattacctgtacaggtaagcctgggaatgggctatacccagcactgaacaggagggtgcttaggtcatctacctccaggaggaactcttgaggtgggcagaaaggcaatagattctagacgcattcacctctgtgggtaagcatagggactctgggcccagctgtaaacacaggggaacctgagttgaggggtgatgaagtgaccctaacctatccctgggctccccaggatgctgcgctctctgctttcagcccagggggtgtctcctcagatgataacagttttcattgacggctactatgaggaacccatggatgtggtggcactgtttggtctgaggggcatccagcatactcccatcagcatcaagaatgcccgcgtgtctcagcactacaaggccagcctcactgccactttcaacctgtttccggaggccaagtttgctgtggttctggaagaggacctggacattgctgtggattttttcagtttcctgagccaatccatccacctactggaggaggatgacagcctgtactgcatctctgcctggaatgaccaggggtatgaacacacggctgaggacccagcactactgtaccgtgtggagaccatgcctgggctgggctgggtgctcaggaggtccttgtacaaggaggagcttgagcccaagtggcctacaccggaaaagctctgggattgggacatgtggatgcggatgcctgaacaacgccggggccgagagtgcatcatccctgacgtttcccgatcctaccactttggcatcgtcggcctcaacatgaatggctactttcacgaggcctacttcaagaagcacaagttcaacacggttccaggtgtccagctcaggaatgtggacagtctgaagaaagaagcttatgaagtggaagttcacaggctgctcagtgaggctgaggttctggaccacagcaagaacccttgtgaagactctttcctgccagacacagagggccacacctacgtggcctttattcgaatggagaaagatgatgacttcaccacctggacccagcttgccaagtgcctccatatctgggacctggatgtgcgtggcaaccatcggggcctgtggagattgtttcggaagaagaaccacttcctggtggtgggggtcccggcttccccctactcagtgaagaagccaccctcagtcaccccaattttcctggagccacccccaaaggaggagggagccccaggagccccagaacagacatgagacctcctccaggaccctgcggggctgggtactgtgtacccccaggctggctagcccttccctccatcctgtaggattttgtagatgctggtaggggctggggctaccttgtttttaacatgagacttaattactaactccaaggggagggttcccctgctccaacaccccgttcctgagttaaaagtctatttatttacttccttgttggagaagggcaggagagtacctgggaatcattacgatccctagcagctcatcctgccctttgaataccctcactttccaggcctggctcagaatctaacctatttattgactgtcctgagggccttgaaaacaggccgaacctggagggcctggatttctttttgggctggaatgctgccctgagggtggggctggctcttactcaggaaactgctgtgcccaacccatggacaggcccagctggggcccacatgctgacacagactcactcagagacccttagacactggaccaggcctcctctcagccttctctttgtccagatttccaaagctggataagttggtcattgattaaaaaaggagaagccctctggg

SEQ ID NO: 294031 - DNA, 2835 bp, Homo sapiens
agcggagcggggggggcacgaggggccggggcggggccgcaagcggcatggaggaggcggaggccgcggcgagccgggccgagcagtgagggccctagcggggcccgagcggggcccggggcccctaagccattcctgaagtcatgggctggccaggacattggtgacccgccaatccggtatggacgactggaagcccagccccctcatcaagccctttggggctcggaagaagcggagctggtaccttacctggaagtataaactgacaaaccagcgggccctgcggagattctgtcagacaggggccgtgcttttcctgctggtgactgtcattgtcaatatcaagttgatcctggacactcggcgagccatcagtgaagccaatgaagacccagagccagagcaagactatgatgaggccctaggccgcctggagcccccacggcgcagaggcagtggtccccggcgggtcctggacgtagaggtgtattcaagtcgcagcaaagtatatgtggcagtggatggcaccacggtgctggaggatgaggcccgggagcagggccggggcatccatgtcattgtcctcaaccaggccacgggccacgtgatggcaaaacgtgtgtttgacacgtactcacctcatgaggatgaggccatggtgctattcctcaacatggtagcgcccggccgagtgctcatctgcactgtcaaggatgagggctccttccacctcaaggacacagccaaggctctgctgaggagcctgggcagccaggctggccctgccctgggctggagggacacatgggccttcgtgggacgaaaaggaggtcctgtcttcggggagaaacattctaaatcacctgccctctcttcctggggggacccagtcctgctgaagacagatgtgccattgagctcagcagaagaggcagagtgccactgggcagacacagagctgaaccgtcgccgccggcgcttctgcagcaaagttgagggctatggaagtgtatgcagctgcaaggaccccacacccatcgagttcagccctgacccactcccagacaacaaggtcctcaatgtgcctgtggctgtcattgcagggaaccgacccaattacctgtacaggatgctgcgctctctgctttcagcccagggggtgtctcctcagatgataacagttttcattgacggctactatgaggaacccatggatgtggtggcactgtttggtctgaggggcatccagcatactcccatcagcatcaagaatgcccgcgtgtctcagcactacaaggccagcctcactgccactttcaacctgtttccggaggccaagtttgctgtggttctggaagaggacctggacattgctgtggattttttcagtttcctgagccaatccatccacctactggaggaggatgacagcctgtactgcatctctgcctggaatgaccaggggtatgaacacacggctgaggacccagcactactgtaccgtgtggagaccatgcctgggctgggctgggtgctcaggaggtccttgtacaaggaggagcttgagcccaagtggcctacaccggaaaaggtaactgtcagggtagggtgagggggctggagtcccctaccaactcgaaacatcttaaccttcatcgtggtccatgtctgccagctctgggattgggacatgtggatgcggatgcctgaacaacgccggggccgagagtgcatcatccctgacgtttcccgatcctaccactttggcatcgtcggcctcaacatgaatggctactttcacgaggcctacttcaagaagcacaagttcaacacggttccaggtgtccagctcaggaatgtggacagtctgaagaaagaagcttatgaagtggaagttcacaggctgctcagtgaggctgaggttctggaccacagcaagaacccttgtgaagactctttcctgccagacacagagggccacacctacgtggcctttattcgaatggagaaagatgatgacttcaccacctggacccagcttgccaagtgcctccatatctgggacctggatgtgcgtggcaaccatcggggcctgtggagattgtttcggaagaagaaccacttcctggtggtgggggtcccggcttccccctactcagtgaagaagccaccctcagtcaccccaattttcctggagccacccccaaaggaggagggagccccaggagccccagaacagacatgagacctcctccaggaccctgcggggctgggtactgtgtacccccaggctggctagcccttccctccatcctgtaggattttgtagatgctggtaggggctggggctaccttgtttttaacatgagacttaattactaactccaaggggagggttcccctgctccaacaccccgttcctgagttaaaagtctatttatttacttccttgttggagaagggcaggagagtacctgggaatcattacgatccctagcagctcatcctgccctttgaataccctcactttccaggcctggctcagaatctaacctatttattgactgtcctgagggccttgaaaacaggccgaacctggagggcctggatttctttttgggctggaatgctgccctgagggtggggctggctcttactcaggaaactgctgtgcccaacccatggacaggcccagctggggcccacatgctgacacagactcactcagagacccttagacactggaccaggcctcctctcagccttctctttgtccagatttccaaagctggataagttggtcattgattaaaaaaggagaagccctctggg

SEQ ID NO: 294032 - DNA, 3141 bp, Homo sapiens
agcggagcggggggggcacgaggggccggggcggggccgcaagcggcatggaggaggcggaggccgcggcgagccgggccgagcagtgagggccctagcggggcccgagcggggcccggggcccctaagccattcctgaagtcatgggctggccaggacattggtgacccgccaatccggtatggacgactggaagcccagccccctcatcaagccctttggggctcggaagaagcggagctggtaccttacctggaagtataaactgacaaaccagcgggccctgcggagattctgtcagacaggggccgtgcttttcctgctggtgactgtcattgtcaatatcaagttgatcctggacactcggcgagccatcagtgaagccaatgaagacccagagccagagcaagactatgatgaggccctaggccgcctggagcccccacggcgcagaggcagtggtccccggcgggtcctggacgtagaggtgtattcaagtcgcagcaaagtatatgtggcagtggatggcaccacggtgctggaggatgaggcccgggagcagggccggggcatccatgtcattgtcctcaaccaggccacgggccacgtgatggcaaaacgtgtgtttgacacgtactcacctcatgaggatgaggccatggtgctattcctcaacatggtagcgcccggccgagtgctcatctgcactgtcaaggatgagggctccttccacctcaaggacacagccaaggctctgctgaggagcctgggcagccaggctggccctgccctgggctggagggacacatgggccttcgtgggacgaaaaggaggtcctgtcttcggggagaaacattctaaatcacctgccctctcttcctggggggacccagtcctgctgaagacagatgtgccattgagctcagcagaagaggcagagtgccactgggcagacacagagctgaaccgtcgccgccggcgcttctgcagcaaagttgagggctatggaagtgtatgcagctgcaaggaccccacacccatcgagttcagccctgacccactcccagacaacaaggtcctcaatgtgcctgtggctgtcattgcagggaaccgacccaattacctgtacaggtaagcctgggaatgggctatacccagcactgaacaggagggtgcttaggtcatctacctccaggaggaactcttgaggtgggcagaaaggcaatagattctagacgcattcacctctgtgggtaagcatagggactctgggcccagctgtaaacacaggggaacctgagttgaggggtgatgaagtgaccctaacctatccctgggctccccaggatgctgcgctctctgctttcagcccagggggtgtctcctcagatgataacagttttcattgacggctactatgaggtgagcaggacttggggggtgcctcgggtggagtacaacatggagcagcagtgattgccagggacgggcaagggagaccgcccaggcaagggctgtgaaatgtgaaggccttggattgcagaggtgggcagagggaaagtgacctcacatggtgagcagtggccatgtcccccaggaacccatggatgtggtggcactgtttggtctgaggggcatccagcatactcccatcagcatcaagaatgcccgcgtgtctcagcactacaaggccagcctcactgccactttcaacctgtttccggaggccaagtttgctgtggttctggaagaggacctggacattgctgtggattttttcagtttcctgagccaatccatccacctactggaggaggatgacagcctgtactgcatctctgcctggaatgaccaggggtatgaacacacggctgaggacccagcactactgtaccgtgtggagaccatgcctgggctgggctgggtgctcaggaggtccttgtacaaggaggagcttgagcccaagtggcctacaccggaaaagctctgggattgggacatgtggatgcggatgcctgaacaacgccggggccgagagtgcatcatccctgacgtttcccgatcctaccactttggcatcgtcggcctcaacatgaatggctactttcacgaggcctacttcaagaagcacaagttcaacacggttccaggtgtccagctcaggaatgtggacagtctgaagaaagaagcttatgaagtggaagttcacaggctgctcagtgaggctgaggttctggaccacagcaagaacccttgtgaagactctttcctgccagacacagagggccacacctacgtggcctttattcgaatggagaaagatgatgacttcaccacctggacccagcttgccaagtgcctccatatctgggacctggatgtgcgtggcaaccatcggggcctgtggagattgtttcggaagaagaaccacttcctggtggtgggggtcccggcttccccctactcagtgaagaagccaccctcagtcaccccaattttcctggagccacccccaaaggaggagggagccccaggagccccagaacagacatgagacctcctccaggaccctgcggggctgggtactgtgtacccccaggctggctagcccttccctccatcctgtaggattttgtagatgctggtaggggctggggctaccttgtttttaacatgagacttaattactaactccaaggggagggttcccctgctccaacaccccgttcctgagttaaaagtctatttatttacttccttgttggagaagggcaggagagtacctgggaatcattacgatccctagcagctcatcctgccctttgaataccctcactttccaggcctggctcagaatctaacctatttattgactgtcctgagggccttgaaaacaggccgaacctggagggcctggatttctttttgggctggaatgctgccctgagggtggggctggctcttactcaggaaactgctgtgcccaacccatggacaggcccagctggggcccacatgctgacacagactcactcagagacccttagacactggaccaggcctcctctcagccttctctttgtccagatttccaaagctggataagttggtcattgattaaaaaaggagaagccctctggg

SEQ ID NO: 294033 - DNA, 3234 bp, Homo sapiens
agcggagcggggggggcacgaggggccggggcggggccgcaagcggcatggaggaggcggaggccgcggcgagccgggccgagcagtgagggccctagcggggcccgagcggggcccggggcccctaagccattcctgaagtcatgggctggccaggacattggtgacccgccaatccggtatggacgactggaagcccagccccctcatcaagccctttggggctcggaagaagcggagctggtaccttacctggaagtataaactgacaaaccagcgggccctgcggagattctgtcagacaggggccgtgcttttcctgctggtgactgtcattgtcaatatcaagttgatcctggacactcggcgagccatcagtgaagccaatgaagacccagagccagagcaagactatgatgaggccctaggccgcctggagcccccacggcgcagaggcagtggtccccggcgggtcctggacgtagaggtgtattcaagtcgcagcaaagtatatgtggcagtggatggcaccacggtgctggaggatgaggcccgggagcagggccggggcatccatgtcattgtcctcaaccaggccacgggccacgtgatggcaaaacgtgtgtttgacacgtactcacctcatgaggatgaggccatggtgctattcctcaacatggtagcgcccggccgagtgctcatctgcactgtcaaggatgagggctccttccacctcaaggacacagccaaggctctgctgaggagcctgggcagccaggctggccctgccctgggctggagggacacatgggccttcgtgggacgaaaaggaggtcctgtcttcggggagaaacattctaaatcacctgccctctcttcctggggggacccagtcctgctgaagacagatgtgccattgagctcagcagaagaggcagagtgccactgggcagacacagagctgaaccgtcgccgccggcgcttctgcagcaaagttgagggctatggaagtgtatgcagctgcaaggaccccacacccatcgagttcagccctgacccactcccagacaacaaggtcctcaatgtgcctgtggctgtcattgcagggaaccgacccaattacctgtacaggatgctgcgctctctgctttcagcccagggggtgtctcctcagatgataacagttttcattgacggctactatgaggaacccatggatgtggtggcactgtttggtctgaggggcatccagcatactcccatcagcatcaagaatgcccgcgtgtctcagcactacaaggccagcctcactgccactttcaacctgtttccggaggccaagtttgctgtggttctggaagaggacctggacattgctgtggattttttcagtttcctgagccaatccatccacctactggaggaggatgacagcctgtactgcatctctgcctggaatgaccaggggtatgaacacacggctgaggacccagcactactgtaccgtgtggagaccatgcctgggctgggctgggtgctcaggaggtccttgtacaaggaggagcttgagcccaagtggcctacaccggaaaagctctgggattgggacatgtggatgcggatgcctgaacaacgccggggccgagagtgcatcatccctgacgtttcccgatcctaccactttggcatcgtcggcctcaacatgaatggctactttcacgaggcctacttcaagaagcacaagttcaacacggttccaggtgtccagctcaggaatgtggacagtctgaagaaagaagcttatgaagtggaagttcacaggctgctcaggtatggcctaggacaattggggtgtagcagggagcaaagagtcaaatactggggatcttggccccataatttacagggtcctgtgcaaaatgaaaatcagggccctcatctcaaacattaggaacttcaggccgggcgcggtggctcacgcctgtaatcccagcactttgggaggccgaggtgggtggatcatgaggtcaggagatcgagaccatcctggctaacacggtgaaaccctgtctctactaaaaatacaaaaaattagccgggcgtggtggcaggcgcctgtagtcccagctacttgggaggctgaggcaggagactccagcctgggcgacagagcaagactccatctcaaaaaaaaaaaaaaaaaaagaacttcaaggtggcaacagcagagcattcaaccaagtacagggtcctgtgggacacacccatgaagtgggccctgtcttggctatattctcccaccctctactgcagtgaggctgaggttctggaccacagcaagaacccttgtgaagactctttcctgccagacacagagggccacacctacgtggcctttattcgaatggagaaagatgatgacttcaccacctggacccagcttgccaagtgcctccatatctgggacctggatgtgcgtggcaaccatcggggcctgtggagattgtttcggaagaagaaccacttcctggtggtgggggtcccggcttccccctactcagtgaagaagccaccctcagtcaccccaattttcctggagccacccccaaaggaggagggagccccaggagccccagaacagacatgagacctcctccaggaccctgcggggctgggtactgtgtacccccaggctggctagcccttccctccatcctgtaggattttgtagatgctggtaggggctggggctaccttgtttttaacatgagacttaattactaactccaaggggagggttcccctgctccaacaccccgttcctgagttaaaagtctatttatttacttccttgttggagaagggcaggagagtacctgggaatcattacgatccctagcagctcatcctgccctttgaataccctcactttccaggcctggctcagaatctaacctatttattgactgtcctgagggccttgaaaacaggccgaacctggagggcctggatttctttttgggctggaatgctgccctgagggtggggctggctcttactcaggaaactgctgtgcccaacccatggacaggcccagctggggcccacatgctgacacagactcactcagagacccttagacactggaccaggcctcctctcagccttctctttgtccagatttccaaagctggataagttggtcattgattaaaaaaggagaagccctctggg

SEQ ID NO: 294034 - DNA, 2697 bp, Homo sapiens
agcggagcggggggggcacgaggggccggggcggggccgcaagcggcatggaggaggcggaggccgcggcgagccgggccgagcagtgagggccctagcggggcccgagcggggcccggggcccctaagccattcctgaagtcatgggctggccaggacattggtgacccgccaatccggtatggacgactggaagcccagccccctcatcaagccctttggggctcggaagaagcggagctggtaccttacctggaagtataaactgacaaaccagcgggccctgcggagattctgtcagacaggggccgtgcttttcctgctggtgactgtcattgtcaatatcaagttgatcctggacactcggcgagccatcagtgaagccaatgaagacccagagccagagcaagactatgatgaggccctaggccgcctggagcccccacggcgcagaggcagtggtccccggcgggtcctggacgtagaggtgtattcaagtcgcagcaaagtatatgtggcagtggatggcaccacggtgctggaggatgaggcccgggagcagggccggggcatccatgtcattgtcctcaaccaggccacgggccacgtgatggcaaaacgtgtgtttgacacgtactcacctcatgaggatgaggccatggtgctattcctcaacatggtagcgcccggccgagtgctcatctgcactgtcaaggatgagggctccttccacctcaaggacacagccaaggctctgctgaggagcctgggcagccaggctggccctgccctgggctggagggacacatgggccttcgtgggacgaaaaggaggtcctgtcttcggggagaaacattctaaatcacctgccctctcttcctggggggacccagtcctgctgaagacagatgtgccattgagctcagcagaagaggcagagtgccactgggcagacacagagctgaaccgtcgccgccggcgcttctgcagcaaagttgagggctatggaagtgtatgcagctgcaaggaccccacacccatcgagttcagccctgacccactcccagacaacaaggtcctcaatgtgcctgtggctgtcattgcagggaaccgacccaattacctgtacaggatgctgcgctctctgctttcagcccagggggtgtctcctcagatgataacagttttcattgacggctactatgaggaacccatggatgtggtggcactgtttggtctgaggggcatccagcatactcccatcagcatcaagaatgcccgcgtgtctcagcactacaaggccagcctcactgccactttcaacctgtttccggaggccaagtttgctgtggttctggaagaggacctggacattgctgtggattttttcagtttcctgagccaatccatccacctactggaggaggatgacagcctgtactgcatctctgcctggaatgaccaggggtatgaacacacggctgaggacccagcactactgtaccgtgtggagaccatgcctgggctgggctgggtgctcaggaggtccttgtacaaggaggagcttgagcccaagtggcctacaccggaaaagtgcatcatccctgacgtttcccgatcctaccactttggcatcgtcggcctcaacatgaatggctactttcacgaggcctacttcaagaagcacaagttcaacacggttccaggtgtccagctcaggaatgtggacagtctgaagaaagaagcttatgaagtggaagttcacaggctgctcagtgaggctgaggttctggaccacagcaagaacccttgtgaagactctttcctgccagacacagagggccacacctacgtggcctttattcgaatggagaaagatgatgacttcaccacctggacccagcttgccaagtgcctccatatctgggacctggatgtgcgtggcaaccatcggggcctgtggagattgtttcggaagaagaaccacttcctggtggtgggggtcccggcttccccctactcagtgaagaagccaccctcagtcaccccaattttcctggagccacccccaaaggaggagggagccccaggagccccagaacagacatgagacctcctccaggaccctgcggggctgggtactgtgtacccccaggctggctagcccttccctccatcctgtaggattttgtagatgctggtaggggctggggctaccttgtttttaacatgagacttaattactaactccaaggggagggttcccctgctccaacaccccgttcctgagttaaaagtctatttatttacttccttgttggagaagggcaggagagtacctgggaatcattacgatccctagcagctcatcctgccctttgaataccctcactttccaggcctggctcagaatctaacctatttattgactgtcctgagggccttgaaaacaggccgaacctggagggcctggatttctttttgggctggaatgctgccctgagggtggggctggctcttactcaggaaactgctgtgcccaacccatggacaggcccagctggggcccacatgctgacacagactcactcagagacccttagacactggaccaggcctcctctcagccttctctttgtccagatttccaaagctggataagttggtcattgattaaaaaaggagaagccctctggg

SEQ ID NO: 294035 - DNA, 3252 bp, Homo sapiens
  misc_feature (2782)..(2782): n is a, c, g, or t
agcggagcggggggggcacgaggggccggggcggggccgcaagcggcatggaggaggcggaggccgcggcgagccgggccgagcagtgagggccctagcggggcccgagcggggcccggggcccctaagccattcctgaagtcatgggctggccaggacattggtgacccgccaatccggtatggacgactggaagcccagccccctcatcaagccctttggggctcggaagaagcggagctggtaccttacctggaagtataaactgacaaaccagcgggccctgcggagattctgtcagacaggggccgtgcttttcctgctggtgactgtcattgtcaatatcaagttgatcctggacactcggcgagccatcagtgaagccaatgaagacccagagccagagcaagactatgatgaggccctaggccgcctggagcccccacggcgcagaggcagtggtccccggcgggtcctggacgtagaggtgtattcaagtcgcagcaaagtatatgtggcagtggatggcaccacggtgctggaggatgaggcccgggagcagggccggggcatccatgtcattgtcctcaaccaggccacgggccacgtgatggcaaaacgtgtgtttgacacgtactcacctcatgaggatgaggccatggtgctattcctcaacatggtagcgcccggccgagtgctcatctgcactgtcaaggatgagggctccttccacctcaaggacacagccaaggctctgctgaggagcctgggcagccaggctggccctgccctgggctggagggacacatgggccttcgtgggacgaaaaggaggtcctgtcttcggggagaaacattctaaatcacctgccctctcttcctggggggacccagtcctgctgaagacagatgtgccattgagctcagcagaagaggcagagtgccactgggcagacacagagctgaaccgtcgccgccggcgcttctgcagcaaagttgagggctatggaagtgtatgcagctgcaaggaccccacacccatcgagttcagccctgacccactcccagacaacaaggtcctcaatgtgcctgtggctgtcattgcagggaaccgacccaattacctgtacaggatgctgcgctctctgctttcagcccagggggtgtctcctcagatgataacagttttcattgacggctactatgaggaacccatggatgtggtggcactgtttggtctgaggggcatccagcatactcccatcagcatcaagaatgcccgcgtgtctcagcactacaaggccagcctcactgccactttcaacctgtttccggaggccaagtttgctgtggttctggaagaggacctggacattgctgtggattttttcagtttcctgagccaatccatccacctactggaggaggatgacagcctgtactgcatctctgcctggaatgaccaggggtatgaacacacggctgaggacccagcactactgtaccgtgtggagaccatgcctgggctgggctgggtgctcaggaggtccttgtacaaggaggagcttgagcccaagtggcctacaccggaaaagctctgggattgggacatgtggatgcggatgcctgaacaacgccggggccgagagtgcatcatccctgacgtttcccgatcctaccactttggcatcgtcggcctcaacatgaatggctactttcacgaggcctacttcaagaagcacaagttcaacacggttccaggtgtccagctcaggaatgtggacagtctgaagaaagaagcttatgaagtggaagttcacaggctgctcagtgaggctgaggttctggaccacagcaagaacccttgtgaagactctttcctgccagacacagagggccacacctacgtggcctttattcgaatggagaaagatgatgacttcaccacctggacccagcttgccaagtgcctccatatctgggacctggatgtgcgtggcaaccatcggggcctgtggagattgtttcggaagaagaaccacttcctggtggtgggggtcccggcttccccctactcagtgaagaagccaccctcagtcaccccaattttcctggagccacccccaaaggaggagggagccccaggagccccagaacagacatgagacctcctccaggaccctgcggggctgggtactgtgtacccccaggctggctagcccttccctccatcctgtaggattttgtagatgctggtaggggctggggctaccttgtttttaacatgagacttaattactaactccaaggggagggttcccctgctccaacaccccgttcctgagttaaaagtctatttatttacttccttgttggagaagggcaggagagtacctgggaatcattacgatccctagcagctcatcctgccctttgaataccctcactttccaggcctggctcagaatctaacctatttattgactgtcctgagggccttgaaaacaggccgaacctggagggcctggatttctttttgggctggaatgctgccctgagggtggggctggctcttactcaggaaactgctgtgcccaacccatggacaggcccagctggggcccacatgctgacacagactcactcagagacccttagacactggaccaggcctcctctcagccttctctttgtccagatttccaaagctggataagttggtcattgattaaaaaaggagaagccctctgggaaaaaaaaaaaaaaaaaaaaaaaaaaaaaanaaaaaaaaaaaaaaaaaacaaaaaaaaacctatacacaaaaaacaaaaaaaatacaataaaaactcttaggggggcctcgagcccccataagccttaaagggggtctaattaaaaatccctggccgtcttttacaaacttggaggctggggaaacccctggggggcccaaactcatacgccttgggaaaaattcccctttccccacttggcaaattcgcaaaggggcccttacgattggccctacctaagcgtggacactccgtagtggcaatggcctacttgaacgcttatatttttttcgaaaaatcccctttaaactttatgtaaaacaactgattttttaaaccactggtccacacatgtggaactcctttttaattcaaagaaataccctcttaaaggctaaaggttttcccccttagatccagatgttcccttctaaaatagggctctccccctaaaagtgtca

SEQ ID NO: 294036 - DNA, 2767 bp, Homo sapiens
  misc_feature (2767)..(2767): n is a, c, g, or t
agcggagcggggggggcacgaggggccggggcggggccgcaagcggcatggaggaggcggaggccgcggcgagccgggccgagcagtgagggccctagcggggcccgagcggggcccggggcccctaagccattcctgaagtcatgggctggccaggacattggtgacccgccaatccggtatggacgactggaagcccagccccctcatcaagccctttggggctcggaagaagcggagctggtaccttacctggaagtataaactgacaaaccagcgggccctgcggagattctgtcagacaggggccgtgcttttcctgctggtgactgtcattgtcaatatcaagttgatcctggacactcggcgagccatcagtgaagccaatgaagacccagagccagagcaagactatgatgaggccctaggccgcctggagcccccacggcgcagaggcagtggtccccggcgggtcctggacgtagaggtgtattcaagtcgcagcaaagtatatgtggcagtggatggcaccacggtgctggaggatgaggcccgggagcagggccggggcatccatgtcattgtcctcaaccaggccacgggccacgtgatggcaaaacgtgtgtttgacacgtactcacctcatgaggatgaggccatggtgctattcctcaacatggtagcgcccggccgagtgctcatctgcactgtcaaggatgagggctccttccacctcaaggacacagccaaggctctgctgaggagcctgggcagccaggctggccctgccctgggctggagggacacatgggccttcgtgggacgaaaaggaggtcctgtcttcggggagaaacattctaaatcacctgccctctcttcctggggggacccagtcctgctgaagacagatgtgccattgagctcagcagaagaggcagagtgccactgggcagacacagagctgaaccgtcgccgccggcgcttctgcagcaaagttgagggctatggaagtgtatgcagctgcaaggaccccacacccatcgagttcagccctgacccactcccagacaacaaggtcctcaatgtgcctgtggctgtcattgcagggaaccgacccaattacctgtacaggatgctgcgctctctgctttcagcccagggggtgtctcctcagatgataacagttttcattgacggctactatgaggaacccatggatgtggtggcactgtttggtctgaggggcatccagcatactcccatcagcatcaagaatgcccgcgtgtctcagcactacaaggccagcctcactgccactttcaacctgtttccggaggccaagtttgctgtggttctggaagaggacctggacattgctgtggattttttcagtttcctgagccaatccatccacctactggaggaggatgacagcctgtactgcatctctgcctggaatgaccaggggtatgaacacacggctgaggacccagcactactgtaccgtgtggagaccatgcctgggctgggctgggtgctcaggaggtccttgtacaaggaggagcttgagcccaagtggcctacaccggaaaagctctgggattgggacatgtggatgcggatgcctgaacaacgccggggccgagagtgcatcatccctgacgtttcccgatcctaccactttggcatcgtcggcctcaacatgaatggctactttcacgaggcctacttcaagaagcacaagttcaacacggttccaggtgtccagctcaggaatgtggacagtctgaagaaagaagcttatgaagtggaagttcacaggctgctcagtgaggctgaggttctggaccacagcaagaacccttgtgaagactctttcctgccagacacagagggccacacctacgtggcctttattcgaatggagaaagatgatgacttcaccacctggacccagcttgccaagtgcctccatatctgggacctggatgtgcgtggcaaccatcggggcctgtggagattgtttcggaagaagaaccacttcctggtggtgggggtcccggcttccccctactcagtgaagaagccaccctcagtcaccccaattttcctggagccacccccaaaggaggagggagccccaggagccccagaacagacatgagacctcctccaggaccctgcggggctgggtactgtgtacccccaggctggctagcccttccctccatcctgtaggattttgtagatgctggtaggggctggggctaccttgtttttaacatgagacttaattactaactccaaggggagggttcccctgctccaacaccccgttcctgagttaaaagtctatttatttacttccttgttggagaagggcaggagagtacctgggaatcattacgatccctagcagctcatcctgccctttgaataccctcactttccaggcctggctcagaatctaacctatttattgactgtcctgagggccttgaaaacaggccgaacctggagggcctggatttctttttgggctggaatgctgccctgagggtggggctggctcttactcaggaaactgctgtgcccaacccatggacaggcccagctggggcccacatgctgacacagactcactcagagacccttagacactggaccaggcctcctctcagccttctctttgtccagatgttcgcgataagttttacaactccacagggtgggttcaattttgaatttataaaggagaacctccagn

SEQ ID NO: 294037 - DNA, 2069 bp, Homo sapiens
gtcttgccacgtgtgcaaggggattggaagcgtgatgagggctccttccacctcaaggacacagccaaggctctgctgaggagcctgggcagccaggctggccctgccctgggctggagggacacatgggccttcgtgggacgaaaaggaggtcctgtcttcggggagaaacattctaaatcacctgccctctcttcctggggggacccagtcctgctgaagacagatgtgccattgagctcagcagaagaggcagagtgccactgggcagacacagagctgaaccgtcgccgccggcgcttctgcagcaaagttgagggctatggaagtgtatgcagctgcaaggaccccacacccatcgagttcagccctgacccactcccagacaacaaggtcctcaatgtgcctgtggctgtcattgcagggaaccgacccaattacctgtacaggatgctgcgctctctgctttcagcccagggggtgtctcctcagatgataacagttttcattgacggctactatgaggaacccatggatgtggtggcactgtttggtctgaggggcatccagcatactcccatcagcatcaagaatgcccgcgtgtctcagcactacaaggccagcctcactgccactttcaacctgtttccggaggccaagtttgctgtggttctggaagaggacctggacattgctgtggattttttcagtttcctgagccaatccatccacctactggaggaggatgacagcctgtactgcatctctgcctggaatgaccaggggtatgaacacacggctgaggacccagcactactgtaccgtgtggagaccatgcctgggctgggctgggtgctcaggaggtccttgtacaaggaggagcttgagcccaagtggcctacaccggaaaagctctgggattgggacatgtggatgcggatgcctgaacaacgccggggccgagagtgcatcatccctgacgtttcccgatcctaccactttggcatcgtcggcctcaacatgaatggctactttcacgaggcctacttcaagaagcacaagttcaacacggttccaggtgtccagctcaggaatgtggacagtctgaagaaagaagcttatgaagtggaagttcacaggctgctcagtgaggctgaggttctggaccacagcaagaacccttgtgaagactctttcctgccagacacagagggccacacctacgtggcctttattcgaatggagaaagatgatgacttcaccacctggacccagcttgccaagtgcctccatatctgggacctggatgtgcgtggcaaccatcggggcctgtggagattgtttcggaagaagaaccacttcctggtggtgggggtcccggcttccccctactcagtgaagaagccaccctcagtcaccccaattttcctggagccacccccaaaggaggagggagccccaggagccccagaacagacatgagacctcctccaggaccctgcggggctgggtactgtgtacccccaggctggctagcccttccctccatcctgtaggattttgtagatgctggtaggggctggggctaccttgtttttaacatgagacttaattactaactccaaggggagggttcccctgctccaacaccccgttcctgagttaaaagtctatttatttacttccttgttggagaagggcaggagagtacctgggaatcattacgatccctagcagctcatcctgccctttgaataccctcactttccaggcctggctcagaatctaacctatttattgactgtcctgagggccttgaaaacaggccgaacctggagggcctggatttctttttgggctggaatgctgccctgagggtggggctggctcttactcaggaaactgctgtgcccaacccatggacaggcccagctggggcccacatgctgacacagactcactcagagacccttagacactggaccaggcctcctctcagccttctctttgtccagatttccaaagctggataagttggtcattgattaaaaaaggagaagccctctggg

SEQ ID NO: 294038 - DNA, 2370 bp, Homo sapiens
agcggagcggggggggcacgaggggccggggcggggccgcaagcggcatggaggaggcggaggccgcggcgagccgggccgagcagtgagggccctagcggggcccgagcggggcccggggcccctaagccattcctgaagtcatgggctggccaggacattggtgacccgccaatccggtatggacgactggaagcccagccccctcatcaagccctttggggctcggaagaagcggagctggtaccttacctggaagtataaactgacaaaccagcgggccctgcggagattctgtcagacaggggccgtgcttttcctgctggtgactgtcattgtcaatatcaagttgatcctggacactcggcgagccatcagtgaagccaatgaagacccagagccagagcaagactatgatgaggccctaggccgcctggagcccccacggcgcagaggcagtggtccccggcgggtcctggacgtagaggtgtattcaagtcgcagcaaagtatatgtggcagtggatggcaccacggtgctggaggatgaggcccgggagcagggccggggcatccatgtcattgtcctcaaccaggccacgggccacgtgatggcaaaacgtgtgtttgacacgtactcacctcatgaggatgaggccatggtgctattcctcaacatggtagcgcccggccgagtgctcatctgcactgtcaaggtcattgcagggaaccgacccaattacctgtacaggatgctgcgctctctgctttcagcccagggggtgtctcctcagatgataacagttttcattgacggctactatgaggaacccatggatgtggtggcactgtttggtctgaggggcatccagcatactcccatcagcatcaagaatgcccgcgtgtctcagcactacaaggccagcctcactgccactttcaacctgtttccggaggccaagtttgctgtggttctggaagaggacctggacattgctgtggattttttcagtttcctgagccaatccatccacctactggaggaggatgacagcctgtactgcatctctgcctggaatgaccaggggtatgaacacacggctgaggacccagcactactgtaccgtgtggagaccatgcctgggctgggctgggtgctcaggaggtccttgtacaaggaggagcttgagcccaagtggcctacaccggaaaagctctgggattgggacatgtggatgcggatgcctgaacaacgccggggccgagagtgcatcatccctgacgtttcccgatcctaccactttggcatcgtcggcctcaacatgaatggctactttcacgaggcctacttcaagaagcacaagttcaacacggttccaggtgtccagctcaggaatgtggacagtctgaagaaagaagcttatgaagtggaagttcacaggctgctcagtgaggctgaggttctggaccacagcaagaacccttgtgaagactctttcctgccagacacagagggccacacctacgtggcctttattcgaatggagaaagatgatgacttcaccacctggacccagcttgccaagtgcctccatatctgggacctggatgtgcgtggcaaccatcggggcctgtggagattgtttcggaagaagaaccacttcctggtggtgggggtcccggcttccccctactcagtgaagaagccaccctcagtcaccccaattttcctggagccacccccaaaggaggagggagccccaggagccccagaacagacatgagacctcctccaggaccctgcggggctgggtactgtgtacccccaggctggctagcccttccctccatcctgtaggattttgtagatgctggtaggggctggggctaccttgtttttaacatgagacttaattactaactccaaggggagggttcccctgctccaacaccccgttcctgagttaaaagtctatttatttacttccttgttggagaagggcaggagagtacctgggaatcattacgatccctagcagctcatcctgccctttgaataccctcactttccaggcctggctcagaatctaacctatttattgactgtcctgagggccttgaaaacaggccgaacctggagggcctggatttctttttgggctggaatgctgccctgagggtggggctggctcttactcaggaaactgctgtgcccaacccatggacaggcccagctggggcccacatgctgacacagactcactcagagacccttagacactggaccaggcctcctctcagccttctctttgtccagatttccaaagctggataagttggtcattgattaaaaaaggagaagccctctggg

SEQ ID NO: 294039 - DNA, 2528 bp, Homo sapiens
agcggagcggggggggcacgaggggccggggcggggccgcaagcggcatggaggaggcggaggccgcggcgagccgggccgagcagtgagggccctagcggggcccgagcggggcccggggcccctaagccattcctgaagtcatgggctggccaggacattggtgacccgccaatccggtatggacgactggaagcccagccccctcatcaagccctttggggctcggaagaagcggagctggtaccttacctggaagtataaactgacaaaccagcgggccctgcggagattctgtcagacaggggccgtgcttttcctgctggtgactgtcattgtcaatatcaagttgatcctggacactcggcgagccatcagtgaagccaatgaagacccagagccagagcaagactatgatgaggccctaggccgcctggagcccccacggcgcagaggcagtggtccccggcgggtcctggacgtagaggtgtattcaagtcgcagcaaagtatatgtggcagtggatggcaccacggtgctggaggatgaggcccgggagcagggccggggcatccatgtcattgtcctcaaccaggccacgggccacgtgatggcaaaacgtgtgtttgacacgtactcacctcatgaggatgaggccatggtgctattcctcaacatggtagcgcccggccgagtgctcatctgcactgtcaaggatgagggctccttccacctcaaggacacagccaaggctctgctgaggagcctgggcagccaggctggccctgccctgggctggagggacacatgggccttcgtgggacgaaaaggaggtcctgtcttcggggagaaacattctaaatcacctgccctctcttcctggggggacccagtcctgctgaagacagatgtgccattgagctcagcagaagaggcagagtgccactgggcagacacagagctgaaccgtcgccgccggcgcttctgcagcaaagttgagggctatggaagtgtatgcagctgcaaggaccccacacccatcgagttcagccctgacccactcccagacaacaaggtcctcaatgtgcctgtggctgtcattgcagggaaccgacccaattacctgtacaggatgctgcgctctctgctttcagcccagggggtgtctcctcagatgataacagttttcattgacggctactatgaggaacccatggatgtggtggcactgtttggtctgaggggcatccagcatactcccatcagcatcaagaatgcccgcgtgtctcagcactacaaggccagcctcactgccactttcaacctgtttccggaggccaagtttgctgtggttctggaagaggacctggacattgctgtggattttttcagtttcctgagccaatccatccacctactggaggaggatgacagcctgtactgcatctctgcctggaatgaccaggggtatgaacacacggctgaggacccagcactactgtaccgtgtggagaccatgcctgggctgggctgggtgctcaggaggtccttgtacaaggaggagcttgagcccaagtggcctacaccggaaaagctctgggattgggacatgtggatgcggatgcctgaacaacgccggggccgagagtgcatcatccctgacgtttcccgatcctaccactttggcatcgtcggcctcaacatgaatggctactttcacgaggcctacttcaagaagcacaagttcaacacggttccaggtgtccagctcaggaatgtggacagtctgaagaaagaagcttatgaagtggaagttcacaggctgctcagtgaggctgaggttctggaccacagcaagaacccttgtgaagactctttcctgccagacacagagggccacacctacgtggcctttattcgaatggagaaagatgatgacttcaccacctggacccagcttgccaagtgcctccatatctgggacctggatgtgcgtggcaaccatcggggcctgtggagattgtttcggaagaagaaccacttcctggtggtgggggtcccggcttccccctactcagtgaagaagccaccctcagtcaccccaattttcctggagccacccccaaaggaggagggagccccaggagccccagaacagacatgagacctcctccaggaccctgcggggctgggtactgtgtacccccaggctggctagcccttccctccatcctggctcagaatctaacctatttattgactgtcctgagggccttgaaaacaggccgaacctggagggcctggatttctttttgggctggaatgctgccctgagggtggggctggctcttactcaggaaactgctgtgcccaacccatggacaggcccagctggggcccacatgctgacacagactcactcagagacccttagacactggaccaggcctcctctcagccttctctttgtccagatttccaaagctggataagttggtcattgattaaaaaaggagaagccctctggg

SEQ ID NO: 294040 - DNA, 2486 bp, Homo sapiens
agcggagcggggggggcacgaggggccggggcggggccgcaagcggcatggaggaggcggaggccgcggcgagccgggccgagcagtgagggccctagcggggcccgagcggggcccggggcccctaagccattcctgaagtcatgggctggccaggacattggtgacccgccaatccggtatggacgactggaagcccagccccctcatcaagccctttggggctcggaagaagcggagctggtaccttacctggaagtataaactgacaaaccagcgggccctgcggagattctgtcagacaggggccgtgcttttcctgctggtgactgtcattgtcaatatcaagttgatcctggacactcggcgagccatcagtgaagccaatgaagacccagagccagagcaagactatgatgaggccctaggccgcctggagcccccacggcgcagaggcagtggtccccggcgggtcctggacgtagaggtgtattcaagtcgcagcaaagtatatgtggcagtggatggcaccacggtgctggaggatgaggcccgggagcagggccggggcatccatgtcattgtcctcaaccaggccacgggccacgtgatggcaaaacgtgtgtttgacacgtactcacctcatgaggatgaggccatggtgctattcctcaacatggtagcgcccggccgagtgctcatctgcactgtcaaggatgagggctccttccacctcaaggacacagccaaggctctgctgaggagcctgggcagccaggctggccctgccctgggctggagggacacatgggccttcgtgggacgaaaaggaggtcctgtcttcggggagaaacattctaaatcacctgccctctcttcctggggggacccagtcctgctgaagacagatgtgccattgagctcagcagaagaggcagagtgccactgggcagacacagagctgaaccgtcgccgccggcgcttctgcagcaaagttgagggctatggaagtgtatgcagctgcaaggaccccacacccatcgagttcagccctgacccactcccagacaacaaggtcctcaatgtgcctgtggctgtcattgcagggaaccgacccaattacctgtacaggatgctgcgctctctgctttcagcccagggggtgtctcctcagatgataacagttttcattgacggctactatgaggaacccatggatgtggtggcactgtttggtctgaggggcatccagcatactcccatcagcatcaagaatgcccgcgtgtctcagcactacaaggccagcctcactgccactttcaacctgtttccggaggccaagtttgctgtggttctggaagaggacctggacattgctgtggattttttcagtttcctgagccaatccatccacctactggaggaggatgacagcctgtactgcatctctgcctggaatgaccaggggtatgaacacacggctgaggacccagcactactgtaccgtgtggagaccatgcctgggctgggctgggtgctcaggaggtccttgtacaaggaggagcttgagcccaagtggcctacaccggaaaagctctgggattgggacatgtggatgcggatgcctgaacaacgccggggccgagagtgcatcatccctgacgtttcccgatcctaccactttggcatcgtcggcctcaacatgaatggctactttcacgaggcctacttcaagaagcacaagttcaacacggttccaggtgtccagctcaggaatgtggacagtctgaagaaagaagcttatgaagtggaagttcacaggctgctcagtgaggctgaggttctggaccacagcaagaacccttgtgaagactctttcctgccagacacagagggccacacctacgtggcctttattcgaatggagaaagatgatgacttcaccacctggacccagcttgccaagtgcctccatatctgggacctggatgtgcgtggcaaccatcggggcctgtggagattgtttcggaagaagaaccacttcctggtggtgggggtcccggcttccccctactcagtgaagaagccaccctcagtcaccccaattttcctggagccacccccaaaggaggagggagccccaggagccccagaacagacatgagacctcctccaggaccctgcggggctggggctcagaatctaacctatttattgactgtcctgagggccttgaaaacaggccgaacctggagggcctggatttctttttgggctggaatgctgccctgagggtggggctggctcttactcaggaaactgctgtgcccaacccatggacaggcccagctggggcccacatgctgacacagactcactcagagacccttagacactggaccaggcctcctctcagccttctctttgtccagatttccaaagctggataagttggtcattgattaaaaaaggagaagccctctggg

SEQ ID NO: 294041 - DNA, 2370 bp, Homo sapiens
agcggagcggggggggcacgaggggccggggcggggccgcaagcggcatggaggaggcggaggccgcggcgagccgggccgagcagtgagggccctagcggggcccgagcggggcccggggcccctaagccattcctgaagtcatgggctggccaggacattggtgacccgccaatccggtatggacgactggaagcccagccccctcatcaagccctttggggctcggaagaagcggagctggtaccttacctggaagtataaactgacaaaccagcgggccctgcggagattctgtcagacaggggccgtgcttttcctgctggtgactgtcattgtcaatatcaagttgatcctggacactcggcgagccatcagtgaagccaatgaagacccagagccagagcaagactatgatgaggccctaggccgcctggagcccccacggcgcagaggcagtggtccccggcgggtcctggacgtagaggtgtattcaagtcgcagcaaagtatatgtggcagtggatggcaccacggtgctggaggatgaggcccgggagcagggccggggcatccatgtcattgtcctcaaccaggccacgggccacgtgatggcaaaacgtgtgtttgacacgtactcacctcatgaggatgaggccatggtgctattcctcaacatggtagcgcccggccgagtgctcatctgcactgtcaaggatgagggctccttccacctcaaggacacagccaaggctctgctgaggagcctgggcagccaggctggccctgccctgggctggagggacacatgggccttcgtgggacgaaaaggaggtcctgtcttcggggagaaacattctaaatcacctgccctctcttcctggggggacccagtcctgctgaagacagatgtgccattgagctcagcagaagaggcagagtgccactgggcagacacagagctgaaccgtcgccgccggcgcttctgcagcaaagttgagggctatggaagtgtatgcagctgcaaggaccccacacccatcgagttcagccctgacccactcccagacaacaaggtcctcaatgtgcctgtggctgtcattgcagggaaccgacccaattacctgtacaggatgctgcgctctctgctttcagcccagggggtgtctcctcagatgataacagttttcattgacggctactatgaggaacccatggatgtggtggcactgtttggtctgaggggcatccagcatactcccatcagcatcaagaatgcccgcgtgtctcagcactacaaggccagcctcactgccactttcaacctgtttccggaggccaagtttgctgtggttctggaagaggacctggacattgctgtggattttttcagtttcctgagccaatccatccacctactggaggaggatgacagcctgtactgcatctctgcctggaatgaccaggggtatgaacacacggctgaggacccagcactactgtaccgtgtggagaccatgcctgggctgggctgggtgctcaggaggtccttgtacaaggaggagcttgagcccaagtggcctacaccggaaaagctctgggattgggacatgtggatgcggatgcctgaacaacgccggggccgagagtgcatcatccctgacgtttcccgatcctaccactttggcatcgtcggcctcaacatgaatggctactttcacgaggcctacttcaagaagcacaagttcaacacggttccaggtgtccagctcaggaatgtggacagtctgaagaaagaagcttatgaagtggaagttcacaggctgctcagtgaggctgaggttctggaccacagcaagaacccttgtgaagactctttcctgccagacacagagggccacacctacgtggcctttattcgaatggagaaagatgatgacttcaccacctggacccagcttgccaagtgcctccatatctgggacctggatgtgcgtggcaaccatcggggcctgtggagattgtttcggaagaagaaccacttcctggtggtgggggtcccggcttccccctactcggctcagaatctaacctatttattgactgtcctgagggccttgaaaacaggccgaacctggagggcctggatttctttttgggctggaatgctgccctgagggtggggctggctcttactcaggaaactgctgtgcccaacccatggacaggcccagctggggcccacatgctgacacagactcactcagagacccttagacactggaccaggcctcctctcagccttctctttgtccagatttccaaagctggataagttggtcattgattaaaaaaggagaagccctctggg

SEQ ID NO: 294042 - DNA, 1742 bp, Homo sapiens
gctggttgatctcctagaggtataccctactgccgttcctctactctcgggtggagtacaacatggagcagcagtgattgccagggacgggcaagggagaccgcccaggcaagggctgtgaaatgtgaaggccttggattgcagaggtgggcagagggaaagtgacctcacatggtgagcagtggccatgtcccccaggaacccatggatgtggtggcactgtttggtctgaggggcatccagcatactcccatcagcatcaagaatgcccgcgtgtctcagcactacaaggccagcctcactgccactttcaacctgtttccggaggccaagtttgctgtggttctggaagaggacctggacattgctgtggattttttcagtttcctgagccaatccatccacctactggaggaggatgacagcctgtactgcatctctgcctggaatgaccaggggtatgaacacacggctgaggacccagcactactgtaccgtgtggagaccatgcctgggctgggctgggtgctcaggaggtccttgtacaaggaggagcttgagcccaagtggcctacaccggaaaagctctgggattgggacatgtggatgcggatgcctgaacaacgccggggccgagagtgcatcatccctgacgtttcccgatcctaccactttggcatcgtcggcctcaacatgaatggctactttcacgaggcctacttcaagaagcacaagttcaacacggttccaggtgtccagctcaggaatgtggacagtctgaagaaagaagcttatgaagtggaagttcacaggctgctcagtgaggctgaggttctggaccacagcaagaacccttgtgaagactctttcctgccagacacagagggccacacctacgtggcctttattcgaatggagaaagatgatgacttcaccacctggacccagcttgccaagtgcctccatatctgggacctggatgtgcgtggcaaccatcggggcctgtggagattgtttcggaagaagaaccacttcctggtggtgggggtcccggcttccccctactcagtgaagaagccaccctcagtcaccccaattttcctggagccacccccaaaggaggagggagccccaggagccccagaacagacatgagacctcctccaggaccctgcggggctgggtactgtgtacccccaggctggctagcccttccctccatcctgtaggattttgtagatgctggtaggggctggggctaccttgtttttaacatgagacttaattactaactccaaggggagggttcccctgctccaacaccccgttcctgagttaaaagtctatttatttacttccttgttggagaagggcaggagagtacctgggaatcattacgatccctagcagctcatcctgccctttgaataccctcactttccaggcctggctcagaatctaacctatttattgactgtcctgagggccttgaaaacaggccgaacctggagggcctggatttctttttgggctggaatgctgccctgagggtggggctggctcttactcaggaaactgctgtgcccaacccatggacaggcccagctggggcccacatgctgacacagactcactcagagacccttagacactggaccaggcctcctctcagccttctctttgtccagatttccaaagctggataagttggtcattgattaaaaaaggagaagccctctggg

SEQ ID NO: 294043 - DNA, 4005 bp, Homo sapiens
  misc_feature (2351)..(2351): n is a, c, g, or t
agcggagcggggggggcacgaggggccggggcggggccgcaagcggcatggaggaggcggaggccgcggcgagccgggccgagcagtgagggccctagcggggcccgagcggggcccggggcccctaagccattcctgaagtcatgggctggccaggacattggtgacccgccaatccggtatggacgactggaagcccagccccctcatcaagccctttggggctcggaagaagcggagctggtaccttacctggaagtataaactgacaaaccagcgggccctgcggagattctgtcagacaggggccgtgcttttcctgctggtgactgtcattgtcaatatcaagttgatcctggacactcggcgagccatcagtgaagccaatgaagacccagagccagagcaagactatgatgaggccctaggccgcctggagcccccacggcgcagaggcagtggtccccggcgggtcctggacgtagaggtgtattcaagtcgcagcaaagtatatgtggcagtggatggcaccacggtgctggaggatgaggcccgggagcagggccggggcatccatgtcattgtcctcaaccaggccacgggccacgtgatggcaaaacgtgtgtttgacacgtactcacctcatgaggatgaggccatggtgctattcctcaacatggtagcgcccggccgagtgctcatctgcactgtcaaggatgagggctccttccacctcaaggacacagccaaggctctgctgaggagcctgggcagccaggctggccctgccctgggctggagggacacatgggccttcgtgggacgaaaaggaggtcctgtcttcggggagaaacattctaaatcacctgccctctcttcctggggggacccagtcctgctgaagacagatgtgccattgagctcagcagaagaggcagagtgccactgggcagacacagagctgaaccgtcgccgccggcgcttctgcagcaaagttgagggctatggaagtgtatgcagctgcaaggaccccacacccatcgagttcagccctgacccactcccagacaacaaggtcctcaatgtgcctgtggctgtcattgcagggaaccgacccaattacctgtacaggatgctgcgctctctgctttcagcccagggggtgtctcctcagatgataacagttttcattgacggctactatgaggaacccatggatgtggtggcactgtttggtctgaggggcatccagcatactcccatcagcatcaagaatgcccgcgtgtctcagcactacaaggccagcctcactgccactttcaacctgtttccggaggccaagtttgctgtggttctggaagaggacctggacattgctgtggattttttcagtttcctgagccaatccatccacctactggaggaggatgacagcctgtactgcatctctgcctggaatgaccaggtaggctggaatgaccagggtttagcaggcgagtttatgaggcctcagctaatacctcccactatggcaccctgtccccaggggtatgaacacacggctgaggacccagcactactgtaccgtgtggagaccatgcctgggctgggctgggtgctcaggaggtccttgtacaaggaggagcttgagcccaagtggcctacaccggaaaagctctgggattgggacatgtggatgcggatgcctgaacaacgccggggccgagagtgcatcatccctgacgtttcccgatcctaccactttggcatcgtcggcctcaacatgaatggctactttcacgtgagtgggaggcagggagcagggcacagtgtggcatgacagtcaagaacaagaacatggactctgaagcaatcttagctctgctacttgctagccatgtaaccttggggaaagagctatcctatttttgcctcagtttctttatctgaaaaatgaggataaagggctgggcgcggtggctcacgcctgtaatcccagcactttgggaggccgatgcgggtggatcacaaggtcaggagatcgagaccatcctggctaacatggtgaaaccccatctctactaaaaatacaaaaaattagccgggcctggtgatgggcgcctgtagtcccagctacttgggaggctgaggcaggagaatggcgtgaacccaggaggcgaagcttgctgtgagccaagatcacgccactgcactccagcctaggtgacagagcgagactccatctcaaaaaaaaagaggataaaatactactacctcactgggttacgatattttgaggtttaaatgagtcaatatatgtaaagtgctttgaattataaacatatataagngtcagctggtattgtttttatttttactatttttagcactagactgtgggtgtctggggagagtatttctgcctctaagtactggtccagccctgcaatctctgccctttcctgttttggcaagtgctggagcctatgcttcagcctgaggagaacagggaagtccttaggtaccgccaacccacctggctgcattcagaggaccattccccagttacagcaagggaggccttgagccagcccagcccaaaggaatgaatagcgtccagcttggaacctcctagaagccagaggtccctcagaggctgactaatacgcgagccccattcctctcccagagaggggcaggcgcttccctcaggtcactctcagtaccagagtcaaagtagttttttccttcccagcccagcccgtccctttgcccaccacctcctgcagggcctgtttctgacatctgtggctctagaacagcaggcccagggagaactacaagaggcagggactgctagttcatgggtctgtggtgcagtagtgtgagctgccgtgacagcatgagctctccacccttggacagccttgattcagagagttactccagtctcagggaatttccaggtgatccaaccccactgaagggtttcctgccagcccagagaagttgagccactttccccatgtcacacagtatgggtgcttgcagggaagagttgctgggaggtcctccctcatctccccagaaggcatcagactttgggaggagcatcttaccccatgtggccctctggtcccttcagattcctgaagtcatgggctggccaggacattggtgacccgccaatccggtatggacgactggaagcccagccccctcatcgagccctttggggctcggaagaagcggagctggtaccttacctggaagtataaactgacaaaccagcgggccctgcggagattctgtcagacaggggccgtgcttttcctgctggtgactgccattgtcaatatcaagttgatcctggacactcggcgagccatcagtgaagccaatgaagacccagagccagagcaagactatgatgaggccctaggccgcctggagcccccacggcgcagaggcagtggtccccggcgggtcctggacgtagaggtgctggaggatgaggcccgggagcagggccggggcatccatgtcattgtcctcaaccaggccacgggccacgtgatggcaaaacgtgtgtttgacacgtactcacctcatgaggatgaggccatggtgctattcctcaacatggtagcgcccggccgagtgctcatctgcactgtcaaggtcagttattctgtcctgaccctgacccctactccctagctccaaccctgcttctagccccggcttctctgcccctcatataacatagtgggaagattctctgaaggaaggttactcaggttccaatctcagccttaacatttgtattaattcagcaaatagttattgagcaacagctgtatgccaggtacttctctgggtgctgaagatacaatgggaaacaagacagagtccccaccctcatggagcttatattccagcagtgggaggtcaacagaaacagccaagtaaatgtggataatgctagtaaatgataacttgtat

SEQ ID NO: 294044 - DNA, 1181 bp, Homo sapiens
cctacgctggaagctccggaaaagctctgggattgggacatgtggatgcggatgcctgaacaacgccggggccgagagtgcatcatccctgacgtttcccgatcctaccactttggcatcgtcggcctcaacatgaatggctactttcacgaggcctacttcaagaagcacaagttcaacacggttccaggtgtccagctcaggaatgtggacagtctgaagaaagaagcttatgaagtggaagttcacaggctgctcagtgaggctgaggttctggaccacagcaagaacccttgtgaagactctttcctgccagacacagagggccacacctacgtggcctttattcgaatggagaaagatgatgacttcaccacctggacccagcttgccaagtgcctccatatctgggacctggatgtgcgtggcaaccatcggggcctgtggagattgtttcggaagaagaaccacttcctggtggtgggggtcccggcttccccctactcagtgaagaagccaccctcagtcaccccaattttcctggagccacccccaaaggaggagggagccccaggagccccagaacagacatgagacctcctccaggaccctgcggggctgggtactgtgtacccccaggctggctagcccttccctccatcctgtaggattttgtagatgctggtaggggctggggctaccttgtttttaacatgagacttaattactaactccaaggggagggttcccctgctccaacaccccgttcctgagttaaaagtctatttatttacttccttgttggagaagggcaggagagtacctgggaatcattacgatccctagcagctcatcctgccctttgaataccctcactttccaggcctggctcagaatctaacctatttattgactgtcctgagggccttgaaaacaggccgaacctggagggcctggatttctttttgggctggaatgctgccctgagggtggggctggctcttactcaggaaactgctgtgcccaacccatggacaggcccagctggggcccacatgctgacacagactcactcagagacccttagacactggaccaggcctcctctcagccttctctttgtccagatttccaaagctggataagttggtcattgattaaaaaaggagaagccctctggg

SEQ ID NO: 294045 - DNA, 977 bp, Homo sapiens
caaatagtctaggtcgaggccgggtggtgatgaagtggaagtcacaggctgctcagtgaggctgaggttctggaccacagcaagaacccttgtgaagactctttcctgccagacacagagggccacacctacgtggcctttattcgaatggagaaagatgatgacttcaccacctggacccagcttgccaagtgcctccatatctgggacctggatgtgcgtggcaaccatcggggcctgtggagattgtttcggaagaagaaccacttcctggtggtgggggtcccggcttccccctactcagtgaagaagccaccctcagtcaccccaattttcctggagccacccccaaaggaggagggagccccaggagccccagaacagacatgagacctcctccaggaccctgcggggctgggtactgtgtacccccaggctggctagcccttccctccatcctgtaggattttgtagatgctggtaggggctggggctaccttgtttttaacatgagacttaattactaactccaaggggagggttcccctgctccaacaccccgttcctgagttaaaagtctatttatttacttccttgttggagaagggcaggagagtacctgggaatcattacgatccctagcagctcatcctgccctttgaataccctcactttccaggcctggctcagaatctaacctatttattgactgtcctgagggccttgaaaacaggccgaacctggagggcctggatttctttttgggctggaatgctgccctgagggtggggctggctcttactcaggaaactgctgtgcccaacccatggacaggcccagctggggcccacatgctgacacagactcactcagagacccttagacactggaccaggcctcctctcagccttctctttgtccagatttccaaagctggataagttggtcattgattaaaaaaggagaagccctctggg

SEQ ID NO: 294046 - DNA, 1468 bp, Homo sapiens
agcggagcggggggggcacgaggggccggggcggggccgcaagcggcatggaggaggcggaggccgcggcgagccgggccgagcagtgagggccctagcggggcccgagcggggcccggggcccctaagccattcctgaagtcatgggctggccaggacattggtgacccgccaatccggtatggacgactggaagcccagccccctcatcaagccctttggggctcggaagaagcggagctggtaccttacctggaagtataaactgacaaaccagcgggccctgcggagattctgtcagacaggggccgtgcttttcctgctggtgactgtcattgtcaatatcaagttgatcctggacactcggcgagccatcagtgaagccaatgaagacccagagccagagcaagactatgatgaggccctaggccgcctggagcccccacggcgcagaggcagtggtccccggcgggtcctggacgtagaggtgtattcaagtcgcagcaaagtatatgtggcagtggatggcaccacggtgctggaggatgaggcccgggagcagggccggggcatccatgtcattgtcctcaaccaggccacgggccacgtgatggcaaaacgtgtgtttgacacgtactcacctcatgaggatgaggccatggtgctattcctcaacatggtagcgcccggccgagtgctcatctgcactgtcaaggatgagggctccttccacctcaaggacacagccaaggctctgctgaggagcctgggcagccaggctggccctgccctgggctggagggacacatgggccttcgtgggacgaaaaggaggtcctgtcttcggggagaaacattctaaatcacctgccctctcttcctggggggacccagtcctgctgaagacagatgtgccattgagctcagcagaagaggcagagtgccactgggcagacacagagctgaaccgtcgccgccggcgcttctgcagcaaagttgagggctatggaagtgtatgcagctgcaaggaccccacacccatcgagttcagccctgacccactcccagacaacaaggtcctcaatgtgcctgtggctgtcattgcagggaaccgacccaattacctgtacaggatgctgcgctctctgctttcagcccagggggtgtctcctcagggctcagaatctaacctatttattgactgtcctgagggccttgaaaacaggccgaacctggagggcctggatttctttttgggctggaatgctgccctgagggtggggctggctcttactcaggaaactgctgtgcccaacccatggacaggcccagctggggcccacatgctgacacagactcactcagagacccttagacactggaccaggcctcctctcagccttctctttgtccagatttccaaagctggataagttggtcattgattaaaaaaggagaagccctctggg

SEQ ID NO: 294047 - DNA, 751 bp, Homo sapiens
cctagttttagaagtttcaatagcagggatatagctaatggcttcttctctatacattcttgtattattttcccagagtgaagaagccaccctcagtcaccccaattttcctggagccacccccaaaggaggagggagccccaggagccccagaacagacatgagacctcctccaggaccctgcggggctgggtactgtgtacccccaggctggctagcccttccctccatcctgtaggattttgtagatgctggtaggggctggggctaccttgtttttaacatgagacttaattactaactccaaggggagggttcccctgctccaacaccccgttcctgagttaaaagtctatttatttacttccttgttggagaagggcaggagagtacctgggaatcattacgatccctagcagctcatcctgccctttgaataccctcactttccaggcctggctcagaatctaacctatttattgactgtcctgagggccttgaaaacaggccgaacctggagggcctggatttctttttgggctggaatgctgccctgagggtggggctggctcttactcaggaaactgctgtgcccaacccatggacaggcccagctggggcccacatgctgacacagactcactcagagacccttagacactggaccaggcctcctctcagccttctctttgtccagatttccaaagctggataagttggtcattgattaaaaaaggagaagccctctggg

SEQ ID NO: 294048 - DNA, 1096 bp, Homo sapiens
agcggagcggggggggcacgaggggccggggcggggccgcaagcggcatggaggaggcggaggccgcggcgagccgggccgagcagtgagggccctagcggggcccgagcggggcccggggcccctaagccattcctgaagtcatgggctggccaggacattggtgacccgccaatccggtatggacgactggaagcccagccccctcatcaagccctttggggctcggaagaagcggagctggtaccttacctggaagtataaactgacaaaccagcgggccctgcggagattctgtcagacaggggccgtgcttttcctgctggtgactgtcattgtcaatatcaagttgatcctggacactcggcgagccatcagtgaagccaatgaagacccagagccagagcaagactatgatgaggccctaggccgcctggagcccccacggcgcagaggcagtggtccccggcgggtcctggacgtagaggtgtattcaagtcgcagcaaagtatatgtggcagtggatggcaccacggtgctggaggatgaggcccgggagcagggccggggcatccatgtcattgtcctcaaccaggccacgggccacgtgatggcaaaacgtgtgtttgacacgtactcacctcatgaggatgaggccatggtgctattcctcaacatggtagcgcccggccgagtgctcatctgcactgtcaaggatgagggctccttccacctcaaggacacagccaaggctctgctgaggagcctgggcagccaggctggccctgccctgggctggagggacacatgggccttcgtgggacgaaaaggaggtcctgtcttcggggagaaacattctaaatcacctgccctctcttcctggggggacccagtcctgctgaagacagatgtgccattgagctcagcagaagaggcagagtgccactgggcagacacagagctgaaccgtcgccgccggcgcttctgcagcaaagttgagggctatggaagtgtatgcagctgcaaggaccccacacccatcgagttcagccctgacccaccaccatgaaccccacgagccggggatactctagag

SEQ ID NO: 294049 - DNA, 296 bp, Homo sapiens
aaaaaaaaaaaaaagaacttcaaggtggcaacagcagagcattcaaccaagtacagggtcctgtgggacacacccatgaagtgggccctgtcttggctatattctcccaccctctactgcagtgaggctgaggttctggaccacagcaagaacccttgtgaagactctttcctgccagacacagagggccacacctacgtggcctttattcgaatggagaaagatgatgacttcaccacctggacccagcttgccaaggtgctccaataccatgcccaccctggagaacccctccc

SEQ ID NO: 294050 - DNA, 334 bp, Homo sapiens
ccctagcagctcatcctgccctttgaataccctcactttccaggcctggctcagaatctaacctatttattgactgtcctgagggccttgaaaacaggccgaacctggagggcctggatttctttttgggctggaatgctgccctgagggtggggctggctcttactcaggaaactgctgtgcccaacccatggacaggcccagctggggcccacatgctgacacagactcactcagagacccttagacactggaccaggcctcctctcagccttctctttgtccagatttccaaagctggataagttggtcattgattaaaaaaggagaagcc

SEQ ID NO: 294051 - DNA, 537 bp, Homo sapiens
agaagaaccacttcctggtggtgggggtcccggcttccccctactctcgtgagtgacccttttctgccctgggaaacaggaggcctagtgagatccagggatatagctaatggcttcttctctatacattcttgtattattttcccagagtgaagaagccaccctcagtcaccccaattttcctggagccacccccaaaggaggagggagccccaggagccccagaacagacatgagacctcctccaggaccctgcggggctgggtactgtgtacccccaggctggctagcccttccctccatcctgtaggattttgtagatgctggtaggggctggggctaccttgtttttaacatgagacttaattactaactccaaggggagggttcccctgctccaacaccccgttcctgagttaaaagtctatttatttacttccttgttggagaagggcaggagagtacctgggaatcattacgatccctagcagctcatcctgccctttgaataccctcactttccaggcctggctcaga

SEQ ID NO: 294052 - DNA, 2773 bp, Homo sapiens
gagtcgccgcttccgccttgaccaggtggagctggagacctggtctctctagggcctaccctgagctcaccatctgaaggagagtgccatcatccttaggaactccttctccagacatgcttcctgaggctggctccctgtggctactgaagctgctccgggacatccagttggcccagttttactggcccatcctagaggagcttaatgtcacccggccagggcacttcgactttgtaaagcctgaggacctggacggcattggcatgggccggcctgcccaacgcagactgtccgaagctctgaaaagcctacgttctgggcctaagtctaagaactgggtctacaagatccttggaggttttgcccctgagcacaaggagcccaccctgcccacggacagcccacggcacctccctgagccagaggggggcctcaagtgtctgatcccagagggtgctgtttgcagaggggagctgctgggttcaggctgcttcggtgtggtgcaccgagggctgtggacgctgcccagtggcaagagtgtcccagtggctgtcaagtccctccgggtaggtcccgaaggcccgatgggcacagaactgggggacttcctgcgagaggtatcggtcatgatgaacttggagcacccacacgtgctgcgtctgcacggccttgtactgggccagcctctgcagatggtgatggagctggcgccactgggctccctgcacgcgcgcttaacggccccggccccgacacccccgctgctcgtggccctgctctgcctcttcctgcggcagctggcgggagccatggcgtacctgggggcccgcgggctggtgcaccgagacctcgctacgcgcaacctacagctggcgtcgccgcgcaccatcaaggtggctgacttcgggctggtgcggcctctgggcggtgcccggggccgctacgtcatgggcgggccccgccctatcccctacacctggtgtgccccagagagcctgcgccacggagccttctcgtctgcctcggacgtgtggatgtttggggtgacgctgtgggagatgttctccgggggcgaggaaccctggcccggggtcccaccgtacctcatcctgcagcggctggaggacagagcccggctgcctaggcctcccccctcctccagggccctctactccctcgccttgcgctgctgggccccccaccctgccgaccggcctagcttttcccacctggaggggctgctgcaagaggccgggccttcggaagcatgttgtgtgagggatgccacagaaccaggcgccctgaggatggagactggtgaccccatcacagtcatcgagggcagctcctctttccacagccccgactccacaatctggaaggaccagaatggtcgcaccttcaaagtgggcagcttcccagcctcggcagtgacgctgacagatgcggggggcttgccagccacccgtccagtccacagaggcacccctgcccggggagatcaacacccaggaagcatagatggagacagaaagaaggcaaatctttgggatgcgcccccagcacggggccagaggaggaacatgcccctggagaggatgaaaggcatttccaggagtctggagtcagttctgtccctcggtcctcgtcccacagggggtggttcaagcccccctgaaattcgacaagccagagctgtgccccagggacctccaggcctgcctccacgcccacctttatcctctagctctcctcagcccagccagccctctagggagaggcttccctggcccaaaagaaaacccccacacaatcaccccatgggaatgcctggagcccgtaaagccgctgccctctctggaggcctcttgtccgatcctgagttgcagaggaagattatggagatggagctgagtgtgcatggggtcacccaccaggagtgccagacagcactaggagccactgggggagatgtggtttctgccatccggaacctcaaggtagatcagctcttccacctgagtagccggtccagagctgactgctggcgcatcctggagcattaccagtgggacctctcagctgccagccgttatgtcctggccaggccctgagcccagcttctgcgggcacagacaccagcatgaaaagcctaggtccctgagggcctggccacatgggaccaagtggaaccagaacaaggccccgacaggggtagacgttccacttgtggagatcccacctgccgctaggcacgtggaggaggagcccagagttgggcactggcaaatgtctcctccctcccatgctccttggcttctgaaggctgaagcccctttggctgggccaagaaggatctagtctgcccactacattctcaaacaagaggacttggaggaaaagagctactatacatcatatgcagaggaagcttctacgcgctagagaggatcaaggggccacactggaccatgtgaacagccatccggaactgccatcagctaccacactggactctgcagggcagccatcctggatgatggaagccaccatattgacctggggtataggcccaaactgccttcgtttggtccagggccatcgtgggtgatgacgattgctctcttgcactcatggacatttgatgctggtagtatggattatgagatggactagcccctgctccagcccagttctcacattcccctttgttttttcccataccaactgcttctaccctcccctattacatacatctttcaatgtccaa

SEQ ID NO: 294053 - DNA, 2013 bp, Homo sapiens
  misc_feature (32)..(32): n is a, c, g, or t
  misc_feature (39)..(39): n is a, c, g, or t
  misc_feature (116)..(116): n is a, c, g, or t
  misc_feature (216)..(216): n is a, c, g, or t
ccgcgggcggtcgggctctgagccgggcggantccggangggcagcagccgagggagatcggagggggccgggcttctgagggaggcttggaccagaagggttatcctcctaggcnaaagaggacttttgtgaaagatgggtgcactcgggggtgctccgtggagggtgggcctccaaggagcacgtgtcccgcccctttcagctccactttcttncggcaggtgtgccccagagagcctgcgccacggagccttctcgtctgcctcggacgtgtggatgtttggggtgacgctgtgggagatgttctccgggggcgaggaaccctggcccggggtcccaccgtacctcatcctgcagcggctggaggacagagcccggctgcctaggcctcccccctcctccagggccctctactccctcgccttgcgctgctgggccccccaccctgccgaccggcctagcttttcccacctggaggggctgctgcaagaggccgggccttcggaagcatgttgtgtgagggatgccacagaaccaggcgccctgaggatggagactggtgaccccatcacagtcatcgagggcagctcctctttccacagccccgactccacaatctggaaggaccagaatggtcgcaccttcaaagtgggcagcttcccagcctcggcagtgacgctgacagatgcggggggcttgccagccacccgtccagtccacagaggcacccctgcccggggagatcaacacccaggaagcatagatggagacagaaagaaggcaaatctttgggatgcgcccccagcacggggccagaggaggaacatgcccctggagaggatgaaaggcatttccaggagtctggagtcagttctgtccctcggtcctcgtcccacagggggtggttcaagcccccctgaaattcgacaagccagagctgtgccccagggacctccaggcctgcctccacgcccacctttatcctctagctctcctcagcccagccagccctctagggagaggcttccctggcccaaaagaaaacccccacacaatcaccccatgggaatgcctggagcccgtaaagccgctgccctctctggaggcctcttgtccgatcctgagttgcagaggaagattatggagatggagctgagtgtgcatggggtcacccaccaggagtgccagacagcactaggagccactgggggagatgtggtttctgccatccggaacctcaaggtagatcagctcttccacctgagtagccggtccagagctgactgctggcgcatcctggagcattaccagtgggacctctcagctgccagccgttatgtcctggccaggccctgagcccagcttctgcgggcacagacaccagcatgaaaagcctaggtccctgagggcctggccacatgggaccaagtggaaccagaacaaggccccgacaggggtagacgttccacttgtggagatcccacctgccgctaggcacgtggaggaggagcccagagttgggcactggcaaatgtctcctccctcccatgctccttggcttctgaaggctgaagcccctttggctgggccaagaaggatctagtctgcccactacattctcaaacaagaggacttggaggaaaagagctactatacatcatatgcagaggaagcttctacgcgctagagaggatcaaggggccacactggaccatgtgaacagccatccggaactgccatcagctaccacactggactctgcagggcagccatcctggatgatggaagccaccatattgacctggggtataggcccaaactgccttcgtttggtccagggccatcgtgggtgatgacgattgctctcttgcactcatggacatttgatgctggtagtatggattatgagatggactagcccctgctccagcccagttctcacattcccctttgttttttcccataccaactgcttctaccctcccctattacatacatctttcaatgtccaa

SEQ ID NO: 294054 - DNA, 1221 bp, Homo sapiens
gggaggcggaggctgcagccagccgagttcaagttgtttccttctcaactgtgcaggcatttccaggagtctggagtcagttctgtccctcggtcctcgtcccacagggggtggttcaagcccccctgaaattcgacaagccagagctgtgccccagggacctccaggcctgcctccacgcccacctttatcctctagctctcctcagcccagccagccctctagggagaggcttccctggcccaaaagaaaacccccacacaatcaccccatgggaatgcctggagcccgtaaagccgctgccctctctggaggcctcttgtccgatcctgagttgcagaggaagattatggagatggagctgagtgtgcatggggtcacccaccaggagtgccagacagcactaggagccactgggggagatgtggtttctgccatccggaacctcaaggtagatcagctcttccacctgagtagccggtccagagctgactgctggcgcatcctggagcattaccagtgggacctctcagctgccagccgttatgtcctggccaggccctgagcccagcttctgcgggcacagacaccagcatgaaaagcctaggtccctgagggcctggccacatgggaccaagtggaaccagaacaaggccccgacaggggtagacgttccacttgtggagatcccacctgccgctaggcacgtggaggaggagcccagagttgggcactggcaaatgtctcctccctcccatgctccttggcttctgaaggctgaagcccctttggctgggccaagaaggatctagtctgcccactacattctcaaacaagaggacttggaggaaaagagctactatacatcatatgcagaggaagcttctacgcgctagagaggatcaaggggccacactggaccatgtgaacagccatccggaactgccatcagctaccacactggactctgcagggcagccatcctggatgatggaagccaccatattgacctggggtataggcccaaactgccttcgtttggtccagggccatcgtgggtgatgacgattgctctcttgcactcatggacatttgatgctggtagtatggattatgagatggactagcccctgctccagcccagttctcacattcccctttgttttttcccataccaactgcttctaccctcccctattacatacatctttcaatgtccaa

SEQ ID NO: 294055 - DNA, 1922 bp, Homo sapiens
gagtcgccgcttccgccttgaccaggtggagctggagacctggtctctctagggcctaccctgagctcaccatctgaaggagagtgccatcatccttaggaactccttctccagacatgcttcctgaggctggctccctgtggctactgaagctgctccgggacatccagttggcccagttttactggcccatcctagaggagcttaatgtcacccggccagggcacttcgactttgtaaagcctgaggacctggacggcattggcatgggccggcctgcccaacgcagactgtccgaagctctgaaaagcctacgttctgggcctaagtctaagaactgggtctacaagatccttggaggttttgcccctgagcacaaggagcccaccctgcccacggacagcccacggcacctccctgagccagaggggggcctcaagtgtctgatcccagagggtgctgtttgcagaggggagctgctgggttcaggctgcttcggtgtggtgcaccgagggctgtggacgctgcccagtggcaagagtgtcccagtggctgtcaagtccctccgggtaggtcccgaaggcccgatgggcacagaactgggggacttcctgcgagaggtatcggtcatgatgaacttggagcacccacacgtgctgcgtctgcacggccttgtactgggccagcctctgcagatggtgatggagctggcgccactgggctccctgcacgcgcgcttaacggccccggccccgacacccccgctgctcgtggccctgctctgcctcttcctgcggcagctggcgggagccatggcgtacctgggggcccgcgggctggtgcaccgagacctcgctacgcgcaacctacagctggcgtcgccgcgcaccatcaaggtggctgacttcgggctggtgcggcctctgggcggtgcccggggccgctacgtcatgggcgggccccgccctatcccctacacctggtgtgccccagagagcctgcgccacggagccttctcgtctgcctcggacgtgtggatgtttggggtgacgctgtgggagatgttctccgggggcgaggaaccctggcccggggtcccaccgtacctcatcctgcagcggctggaggacagagcccggctgcctaggcctcccccctcctccagggccctctactccctcgccttgcgctgctgggccccccaccctgccgaccggcctagcttttcccacctggaggggctgctgcaagaggccgggccttcggaagcatgttgtgtgagggatgccacagaaccaggcgccctgaggatggagactggtgaccccatcacagtcatcgagggcagctcctctttccacagccccgactccacaatctggaaggaccagaatggtcgcaccttcaaagtgggcagcttcccagcctcggcagtgacgctgacagatgcggggggcttgccagccacccgtccagtccacagaggcacccctgcccggggagatcaacacccaggaagcatagatgggtgaggacctgaaagggtgagggcaggggttggctgggagaactgatgaggtccaggagcttctctggaagagaagcctggggacaggaccagagtgaagctgcagcctccaccctgggccctgggtctcctgggttcccctgtgagtttttttgggagggtatattgatctgtggggtggggagagttggtgtggaggatgaactggatccctctccgacagagacagaaagaaggcaaatctttgggatgcgcccccagcacggggccagaggaggaacatgcccctggagaggatgaaaggtgggtgtggtggactccagagtctctgaggagatcaagaccagtccttcaattccgaccccctgccctaaatccatgcctttgcatctat

SEQ ID NO: 294056 - DNA, 1125 bp, Homo sapiens
cacacccatgaagcatagatggagacagaaagaaggcaaatctttgggatgcgcccccagcacggggccagaggaggaacatgcccctggagaggatgaaagctctcctcagcccagccagccctctagggagaggcttccctggcccaaaagaaaacccccacacaatcaccccatgggaatgcctggagcccgtaaagccgctgccctctctggaggcctcttgtccgatcctgagttgcagaggaagattatggagatggagctgagtgtgcatggggtcacccaccaggagtgccagacagcactaggagccactgggggagatgtggtttctgccatccggaacctcaaggtagatcagctcttccacctgagtagccggtccagagctgactgctggcgcatcctggagcattaccagtgggacctctcagctgccagccgttatgtcctggccaggccctgagcccagcttctgcgggcacagacaccagcatgaaaagcctaggtccctgagggcctggccacatgggaccaagtggaaccagaacaaggccccgacaggggtagacgttccacttgtggagatcccacctgccgctaggcacgtggaggaggagcccagagttgggcactggcaaatgtctcctccctcccatgctccttggcttctgaaggctgaagcccctttggctgggccaagaaggatctagtctgcccactacattctcaaacaagaggacttggaggaaaagagctactatacatcatatgcagaggaagcttctacgcgctagagaggatcaaggggccacactggaccatgtgaacagccatccggaactgccatcagctaccacactggactctgcagggcagccatcctggatgatggaagccaccatattgacctggggtataggcccaaactgccttcgtttggtccagggccatcgtgggtgatgacgattgctctcttgcactcatggacatttgatgctggtagtatggattatgagatggactagcccctgctccagcccagttctcacattcccctttgttttttcccataccaactgcttctaccctcccctattacatacatctttcaatgtccaa

SEQ ID NO: 294057 - DNA, 624 bp, Homo sapiens
  misc_feature (19)..(19): n is a, c, g, or t
gccagggcccagccctaanctcttgcccttattcccatcctatttaccagctcctctttccacagccccgactccacaatctggaaggaccagaatggtcgcaccttcaaagtgggcagcttcccagcctcggcagtgacgctgacagatgcggggggcttgccagccacccgtccagtccacagaggcacccctgcccggggagatcaacacccaggaagcatagatgggtgaggacctgaaagggtgagggcaggggttggctgggagaactgatgaggtccaggagcttctctggaagagaagcctggggacaggaccagagtgaagctgcagcctccaccctgggccctgggtctcctgggttcccctgtgagtttttttgggagggtatattgatctgtggggtggggagagttggtgtggaggatgaactggatccctctccgacagagacagaaagaaggcaaatctttgggatgcgcccccagcacggggccagaggaggaacatgcccctggagaggatgaaaggtgggtgtggtggactccagagtctctgaggagatcaagaccagtccttcaattccgaccccctgccctaaatccatgcctttgcatctat

SEQ ID NO: 294058 - DNA, 294 bp, Homo sapiens
aagtagtcattcccacagaaagggacagagaggaaatgtccacatcccaaccttggcagtgagtagagagtaaagatacaaacaaccttccttgagaatttgaagtgtaaattagtaatgattcaagttcacagtccgaattcatactgccagtagcgtccaaagaaaccttgaggcaagaattcagagttttctcaattcatagtgctcttggatgaggggaaaaataactctgcaataacttgacataaaaccaggtcattggctgttctgacttccaatattaaaatgtgg

SEQ ID NO: 294059 - DNA, 550 bp, Homo sapiens
cccagctgtttaccaatccccacccagtggggacagaagacaacttaattccacaaagttggacccccaagggaagtggggaggtgagagggaaagaaggatgtggtctccatctaaagtcaagatctcttccccagaagctagaggtaaacttgcccagctcggactaggcctagagaggctgaatgatgtggcatcacccggaaacagcgtttaccctccttatcctcttcccttctgcctgaaaacactaatccagatgatggacaatgattcaattagtcatcttctctgatgggggctgagatccaggctgggatcccgtggaagtgccgggcaatcctctctgcaagtggctctgtgctccctcatcaccaaggacccatgtcactttggcattgcttctcctcagctacttctcagttactggtcctcatttggagagatggatatccggctggaagcatcccctacccgctgggagagtgggtctacagctcagggtctacatgtggaccagggcctcagaatgtgggtaaatgtgagtcag

SEQ ID NO: 294060 - DNA, 549 bp, Homo sapiens
aagaatctatccataattttattcttctaatatagatccctgtaattatttcatcctggaattcacagccagaaaggagtttgcctgcagactgcaagcttcttgcaggccgaacttagacttcattcttcataaccttggcaccaagcacagtgcacagtatgtgggaagtcagctgccatgttttgagctgccctctggaaagaccctcgtggtgaggaactggtggctctggccaacatccagcgaggacctgagatctgccagctgccacatgagtgagctgggaagtggatcttctcctagccttgagataactgcaattctggtcaatttgatcattgctctgcaggacacccagaggtgtcagctgagtcacaaatggatttctgacccacagaaactgagtgaaataatcactacaggtaagcaatgatatgaatggtgaatgctgacgctgtgggattgctgggtgtcctgaggaagaccacgtggaaagggaactcagagctaatacctacaaataaatacatcaaactgccatgatta

SEQ ID NO: 294061 - DNA, 5426 bp, Homo sapiens
  misc_feature (1655)..(1655): n is a, c, g, or t
tttaggaggaatcgctggtcgccagcgaggggtgcggcttcaatttcaataactttattggtggcctgatctgcagaacagccatcacatcagtggcccttggaggagggagcgcatcgcccgaggtggtccccgacgagctgcagccatgggaaacaccaccagcgaccgggtgtccggggagcgccacggcgccaaggctgcacgctccgagggcgcaggcggccatgccccggggaaggagcacaagatcatggtggggagtacggacgaccccagcgtgttcagcctccctgactccaagctccctggggacaaagagtttgtatcatggcagcaggatttggaggactccgtaaagcccacacagcaggcccggcccactgttatccgctggtctgaaggaggcaaggaggtcttcatctctgggtccttcaacaattggagcaccaagattccactgattaagagccataatgactttgttgccatcctggacctccctgagggagagcaccaatacaagttctttgtggatggacagtgggttcatgatccatcagagcctgtggttaccagtcagcttggcacaattaacaatttgatccatgtcaagaaatctgattttgaggtgttcgatgctttaaagttagattctatggaaagttctgagacatcttgtagagacctttccagctcacccccagggccttatggtcaagaaatgtatgcgtttcgatctgaggaaagattcaaatccccacccatccttcctcctcatctacttcaagttattcttaacaaagacactaatatttcttgtgacccagccttactccctgagcccaaccatgttatgctgaaccatctctatgcattgtccattaaggacagtgtgatggtccttagcgcaacccatcgctacaagaagaagtatgttactactctgctatacaagcccatttgaagggatcccttcttgcctctaaggattcaggagaagcatctcccttgcatttctggactgaaccagtcttacctgagactggaaggctgatttgctttgaggctgatatgtgtgtttcagagcctctgagtaggatgctctgcttttgcatttgattgcagatgagagctttatgagttcacggaatttattttaagaaaaaaaaatatacatatgagaagaaggtaaatggaagcctcctagccccagctagaagtattgtttctgcctgtgggttttcaccaagacctgtttgggggcgctgcaggaataactatataggaagatttttcctaaaatgaaagaacagcaaactcttaggatccttgttgggtggagattctatcactgctaccttggctctccaaggaatgggcttgtgctagaccgctgccctacttaacagctgcctcattgcaagggcagtttttcttgcatgggttctctatattcccagagtatgtggcacaatctgtgttgtttatatgataccagatgccccacaagaacccttattcctctcatttcacattcttcctttaatagcctccttcagatcccatacctgacccctctctaacacaaaacttattgggtaagtgactttgaaaagttttgtggcacctgacccaccccagacactagggcnatcagaaggtctcctttttagcccagcacaggcccaggccactttgtcgtgtttgttttaacttctaaagaaaatatgtttcagcattataagaaaggcagaatgcagaacacctacatttttgttttagtttggtgccaaggctcaggctgtattggcaaattcccgaaagttttcccactttgcctggccctgcttctgtcttttctttctcagtaaacagttctgaaggcaggagtggaacccgggagtattttcatgtctttcatccttgaaagatttttatgtgcctgcattttttttttaattaaaaaatgccttttcattggtcttaagagaccgcattggagaatttcaggcttttgataaatgcttcttcaaagagattttcttctctagtctagccttccacattcttagattaatatggccaaccctgtacacatcactacactaaacactgctctagataaactgctcaagttcatttaactcatttgatgcacctaaaggggttcctcattttaaagatttgttaggccaagaagcaagagagtattcctagtattcccaaccatgaaaagtatcattctttgcaccaaatgttaacaaaatcattttgttctcctgcctcttctttttaaaggtgtttgatgattaagtggggtcactgaattccatttgtggactgaaaagtattcaatccacttttggggttcagagataaaacattttttcccaagtagctggggctcttccattttgcagataagtcaaataatcaacactaaaggaggctaaactgttgatgaatgagagactccctgactgctcagatgaccctagccacactgaaagggcacctacaggtcagtttagctacctcctgtctttcccatgcaaagctgataacacagttgtctttggacttgtagacctcttggattccaggtgtgatggagtaaagtgtgggattgttgttttgctgggatgcaaataactaaatgctttggtggttaattgctaagagtaaatactactttagccatccaaggccaccttctgcagcaaaaggcttttgtggagaaccttttatgttcccaaccactttttgaatggtgtgccatttaaaaatccaggccagatcctattataaccaactctcaggatttacagccttcagttgtactagaattttgtttttatccaatactcattaaataagtgggccacttaggaagattcaaaatcttggttattacatgaagtttgttatatttcttgtcaacagtattgaaatgtaatatgtatgtgttcatgtatgaaaatttttactccacacaggtgtttcagtagagtggggcaggaaaagagatctcttcgatttctttcaggcctgaggcttttgtgaaatgcgtcagccccctgtgacagtaggttttgatgctagtgatcttcagatctttctctctggaaatgtgcagagagtgtcagtttcccaagttctgaggtaactctcagcccagatgtgaaatgggagcctaccagctggtatagaagggaatgggtaggaggcactgggtgctgactcattcagcactgtcccttttctatactgctgatacatcccatggttctgagaagccttatctcagtctatttggaagagagggaggaagagaaggaagtaacccaaagtactactcatttatccttgtatattgattagttaaagggataattaatttaatgctgaggagagtttgacagattttgaaaatgagtaaaggcaaaaaaaatttttttagcctttattttgcctttgggaattttacagagtcaaagtaggcagaataagaaaatagttcttcaggagggccgacctttaaagaacttcaacatagtttcggaattgtggggaagagaagagtgactgagctgagaagtaataatagaataaagggttgagtaacttagaactgaaaatgatctcttttaaaaagaaattaaatcagacaccacatggtggtgtccttggatctcactgtgcagaattagcagtgtataaccatcttctcttttcatcttgttccaattctctcctctttcctttccattctgctttaagctcatgtgtcaggcagactttaccagagtgtcagacattacctaaaacacatacgttagccatgctgctggtatggagaaattccacaccatgattattagcctcctttaagctgaatgggatttaaccattctaggcaacacccctgaagggcatacctaacctcaatagtgttggcttttaaaacgtatgtttgtatggtagagaaactttgtaaaagaagaatccaagagaagtttgtgaggatcctacaaacccaggcccactcactttgctctaattctttctagtatcttgtagatctaatgggtctgggataaaaactttgaaaagtgtcaatattccatgtatgctgctgaaatgaagttaagtttggaaagaagtgatacctctagactgggtttatattaatctgggatataaatgaagaagacatactaatagaactccttgcttttaattggggaaatagggctttaataattttgacctcaactaaaaatgatatgcaatagtctctgtgtgtgtttgaaatacattgtgttctcagagatttctacattctcacgttctagtgatttggggcatgggcttaatagcagatgtacagtgtattcctgcattattgtgattccccttaaagcccagttcttgctgtcttctaccaggggctgctgactccagttacccatggaatgcaggacctgggaggggtagccattagggtctttcaaaactctttggatctaagcatttgtctctccttaagtgccaatcacaattggatatggaaggactgtgatttctgcaatgaacccaaacttttagagtaaaaagccaaatttaaattataagaaagaagggaaaaaagagaaaaactcaagtctattacttgtagagtccaattcttagcaatggaatcgctctaggattctagtttgggctttgtctggatttgcttttctcagttgtgctttgaagtgaataagctttgttacaaattaattttttattagttccaatattagttggagttaacttgaattgattgtatgtagcacagcacttttgcagtaagattggtgtgaaatactaaacactatggattttgtaggtgtcaggttaaatggtcaagggatacctacattaagtcatatattaggtattgatgatcttacttcttttctgttcccctgtacaaaacacttacctaacccagcttgtggttttaggacagccaaagctcactgttgttggttagtcctaatcactacacgggtctcataaatgagacttgtttgaattttggtacattggagcatgttggttggtattacacggcagcatttcgaatgagtgcagctctgtgtctgtcagaaaggagagataagactactttgaagggaattaaatatgtgagtcctctttttaatggtgctttttgtaacctttaatgctgaggtacagagctgcttttcaatatttcataaaggagtggcagacaagagtggattttaaagctgttcttcaaacgtaatttgtcactggactctgacacacctggaaattatatgatatgatacatacagaaatgttgtgggttttttccataaaactttaataaaagtattatacagcaataa

SEQ ID NO: 294062 - DNA, 5259 bp, Homo sapiens
  misc_feature (1488)..(1488): n is a, c, g, or t
tttaggaggaatcgctggtcgccagcgaggggtgcggcttcaatttcaataactttattggtggcctgatctgcagaacagccatcacatcagtggcccttggaggagggagcgcatcgcccgaggtggtccccgacgagctgcagccatgggaaacaccaccagcgaccgggtgtccggggagcgccacggcgccaaggctgcacgctccgagggcgcaggcggccatgccccggggaaggagcacaagatcatggtggggagtacggacgaccccagcgtgttcagcctccctgactccaagccataatgactttgttgccatcctggacctccctgagggagagcaccaatacaagttctttgtggatggacagtgggttcatgatccatcagagcctgtggttaccagtcagcttggcacaattaacaatttgatccatgtcaagaaatctgattttgaggtgttcgatgctttaaagttagattctatggaaagttctgagacatcttgtagagacctttccagctcacccccagggccttatggtcaagaaatgtatgcgtttcgatctgaggaaagattcaaatccccacccatccttcctcctcatctacttcaagttattcttaacaaagacactaatatttcttgtgacccagccttactccctgagcccaaccatgttatgctgaaccatctctatgcattgtccattaaggacagtgtgatggtccttagcgcaacccatcgctacaagaagaagtatgttactactctgctatacaagcccatttgaagggatcccttcttgcctctaaggattcaggagaagcatctcccttgcatttctggactgaaccagtcttacctgagactggaaggctgatttgctttgaggctgatatgtgtgtttcagagcctctgagtaggatgctctgcttttgcatttgattgcagatgagagctttatgagttcacggaatttattttaagaaaaaaaaatatacatatgagaagaaggtaaatggaagcctcctagccccagctagaagtattgtttctgcctgtgggttttcaccaagacctgtttgggggcgctgcaggaataactatataggaagatttttcctaaaatgaaagaacagcaaactcttaggatccttgttgggtggagattctatcactgctaccttggctctccaaggaatgggcttgtgctagaccgctgccctacttaacagctgcctcattgcaagggcagtttttcttgcatgggttctctatattcccagagtatgtggcacaatctgtgttgtttatatgataccagatgccccacaagaacccttattcctctcatttcacattcttcctttaatagcctccttcagatcccatacctgacccctctctaacacaaaacttattgggtaagtgactttgaaaagttttgtggcacctgacccaccccagacactagggcnatcagaaggtctcctttttagcccagcacaggcccaggccactttgtcgtgtttgttttaacttctaaagaaaatatgtttcagcattataagaaaggcagaatgcagaacacctacatttttgttttagtttggtgccaaggctcaggctgtattggcaaattcccgaaagttttcccactttgcctggccctgcttctgtcttttctttctcagtaaacagttctgaaggcaggagtggaacccgggagtattttcatgtctttcatccttgaaagatttttatgtgcctgcattttttttttaattaaaaaatgccttttcattggtcttaagagaccgcattggagaatttcaggcttttgataaatgcttcttcaaagagattttcttctctagtctagccttccacattcttagattaatatggccaaccctgtacacatcactacactaaacactgctctagataaactgctcaagttcatttaactcatttgatgcacctaaaggggttcctcattttaaagatttgttaggccaagaagcaagagagtattcctagtattcccaaccatgaaaagtatcattctttgcaccaaatgttaacaaaatcattttgttctcctgcctcttctttttaaaggtgtttgatgattaagtggggtcactgaattccatttgtggactgaaaagtattcaatccacttttggggttcagagataaaacattttttcccaagtagctggggctcttccattttgcagataagtcaaataatcaacactaaaggaggctaaactgttgatgaatgagagactccctgactgctcagatgaccctagccacactgaaagggcacctacaggtcagtttagctacctcctgtctttcccatgcaaagctgataacacagttgtctttggacttgtagacctcttggattccaggtgtgatggagtaaagtgtgggattgttgttttgctgggatgcaaataactaaatgctttggtggttaattgctaagagtaaatactactttagccatccaaggccaccttctgcagcaaaaggcttttgtggagaaccttttatgttcccaaccactttttgaatggtgtgccatttaaaaatccaggccagatcctattataaccaactctcaggatttacagccttcagttgtactagaattttgtttttatccaatactcattaaataagtgggccacttaggaagattcaaaatcttggttattacatgaagtttgttatatttcttgtcaacagtattgaaatgtaatatgtatgtgttcatgtatgaaaatttttactccacacaggtgtttcagtagagtggggcaggaaaagagatctcttcgatttctttcaggcctgaggcttttgtgaaatgcgtcagccccctgtgacagtaggttttgatgctagtgatcttcagatctttctctctggaaatgtgcagagagtgtcagtttcccaagttctgaggtaactctcagcccagatgtgaaatgggagcctaccagctggtatagaagggaatgggtaggaggcactgggtgctgactcattcagcactgtcccttttctatactgctgatacatcccatggttctgagaagccttatctcagtctatttggaagagagggaggaagagaaggaagtaacccaaagtactactcatttatccttgtatattgattagttaaagggataattaatttaatgctgaggagagtttgacagattttgaaaatgagtaaaggcaaaaaaaatttttttagcctttattttgcctttgggaattttacagagtcaaagtaggcagaataagaaaatagttcttcaggagggccgacctttaaagaacttcaacatagtttcggaattgtggggaagagaagagtgactgagctgagaagtaataatagaataaagggttgagtaacttagaactgaaaatgatctcttttaaaaagaaattaaatcagacaccacatggtggtgtccttggatctcactgtgcagaattagcagtgtataaccatcttctcttttcatcttgttccaattctctcctctttcctttccattctgctttaagctcatgtgtcaggcagactttaccagagtgtcagacattacctaaaacacatacgttagccatgctgctggtatggagaaattccacaccatgattattagcctcctttaagctgaatgggatttaaccattctaggcaacacccctgaagggcatacctaacctcaatagtgttggcttttaaaacgtatgtttgtatggtagagaaactttgtaaaagaagaatccaagagaagtttgtgaggatcctacaaacccaggcccactcactttgctctaattctttctagtatcttgtagatctaatgggtctgggataaaaactttgaaaagtgtcaatattccatgtatgctgctgaaatgaagttaagtttggaaagaagtgatacctctagactgggtttatattaatctgggatataaatgaagaagacatactaatagaactccttgcttttaattggggaaatagggctttaataattttgacctcaactaaaaatgatatgcaatagtctctgtgtgtgtttgaaatacattgtgttctcagagatttctacattctcacgttctagtgatttggggcatgggcttaatagcagatgtacagtgtattcctgcattattgtgattccccttaaagcccagttcttgctgtcttctaccaggggctgctgactccagttacccatggaatgcaggacctgggaggggtagccattagggtctttcaaaactctttggatctaagcatttgtctctccttaagtgccaatcacaattggatatggaaggactgtgatttctgcaatgaacccaaacttttagagtaaaaagccaaatttaaattataagaaagaagggaaaaaagagaaaaactcaagtctattacttgtagagtccaattcttagcaatggaatcgctctaggattctagtttgggctttgtctggatttgcttttctcagttgtgctttgaagtgaataagctttgttacaaattaattttttattagttccaatattagttggagttaacttgaattgattgtatgtagcacagcacttttgcagtaagattggtgtgaaatactaaacactatggattttgtaggtgtcaggttaaatggtcaagggatacctacattaagtcatatattaggtattgatgatcttacttcttttctgttcccctgtacaaaacacttacctaacccagcttgtggttttaggacagccaaagctcactgttgttggttagtcctaatcactacacgggtctcataaatgagacttgtttgaattttggtacattggagcatgttggttggtattacacggcagcatttcgaatgagtgcagctctgtgtctgtcagaaaggagagataagactactttgaagggaattaaatatgtgagtcctctttttaatggtgctttttgtaacctttaatgctgaggtacagagctgcttttcaatatttcataaaggagtggcagacaagagtggattttaaagctgttcttcaaacgtaatttgtcactggactctgacacacctggaaattatatgatatgatacatacagaaatgttgtgggttttttccataaaactttaataaaagtattatacagcaataa

SEQ ID NO: 294063 - DNA, 5372 bp, Homo sapiens
  misc_feature (1655)..(1655): n is a, c, g, or t
tttaggaggaatcgctggtcgccagcgaggggtgcggcttcaatttcaataactttattggtggcctgatctgcagaacagccatcacatcagtggcccttggaggagggagcgcatcgcccgaggtggtccccgacgagctgcagccatgggaaacaccaccagcgaccgggtgtccggggagcgccacggcgccaaggctgcacgctccgagggcgcaggcggccatgccccggggaaggagcacaagatcatggtggggagtacggacgaccccagcgtgttcagcctccctgactccaagctccctggggacaaagagtttgtatcatggcagcaggatttggaggactccgtaaagcccacacagcaggcccggcccactgttatccgctggtctgaaggaggcaaggaggtcttcatctctgggtccttcaacaattggagcaccaagattccactgattaagagccataatgactttgttgccatcctggacctccctgagggagagcaccaatacaagttctttgtggatggacagtgggttcatgatccatcagagcctgtggttaccagtcagcttggcacaattaacaatttgatccatgtcaagaaatctgattttgaggtgttcgatgctttaaagttagattctatggaaagttctgagacatcttgtagagacctttccagctcacccccagggccttatggtcaagaaatgtatgcgtttcgatctgaggaaagattcaaatccccacccatccttcctcctcatctacttcaagttattcttaacaaagacactaatatttcttgtgacccagccttactccctgagcccaaccatgttatgctgaaccatctctatgcattgtccattaaggacagtgtgatggtccttagcgcaacccatcgctacaagaagaagtatgttactactctgctatacaagcccatttgaagggatcccttcttgcctctaaggattcaggagaagcatctcccttgcatttctggactgaaccagtcttacctgagactggaaggctgatttgctttgaggctgatatgtgtgtttcagagcctctgagtaggatgctctgcttttgcatttgattgcagatgagagctttatgagttcacggaatttattttaagaaaaaaaaatatacatatgagaagaaggtaaatggaagcctcctagccccagctagaagtattgtttctgcctgtgggttttcaccaagacctgtttgggggcgctgcaggaataactatataggaagatttttcctaaaatgaaagaacagcaaactcttaggatccttgttgggtggagattctatcactgctaccttggctctccaaggaatgggcttgtgctagaccgctgccctacttaacagctgcctcattgcaagggcagtttttcttgcatgggttctctatattcccagagtatgtggcacaatctgtgttgtttatatgataccagatgccccacaagaacccttattcctctcatttcacattcttcctttaatagcctccttcagatcccatacctgacccctctctaacacaaaacttattgggtaagtgactttgaaaagttttgtggcacctgacccaccccagacactagggcnatcagaaggtctcctttttagcccagcacaggcccaggccactttgtcgtgtttgttttaacttctaaagaaaatatgtttcagcattataagaaaggcagaatgcagaacacctacatttttgttttagtttggtgccaaggctcaggctgtattggcaaattcccgaaagttttcccactttgcctggccctgcttctgtcttttctttctcagtaaacagttctgaaggcaggagtggaacccgggagtattttcatgtctttcatccttgaaagatttttatgtgcctgcattttttttttaattaaaaaatgccttttcattggtcttaagagaccgcattggagaatttcaggcttttgataaatgcttcttcaaagagattttcttctctagtctagccttccacattcttagattaatatggccaaccctgtacacatcactacactaaacactgctctagataaactgctcaagttcatttaactcatttgatgcacctaaaggggttcctcattttaaagatttgttaggccaagaagcaagagagtattcctagtattcccaaccatgaaaagtatcattctttgcaccaaatgttaacaaaatcattttgttctcctgcctcttctttttaaaggtgtttgatgattaagtggggtcactgaattccatttgtggactgaaaagtattcaatccacttttggggttcagagataaaacattttttcccaagtagctggggctcttccattttgcagataagtcaaataatcaacactaaaggaggctaaactgttgatgaatgagagactccctgactgctcagatgaccctagccacactgaaagggcacctacaggtcagtttagctacctcctgtctttcccatgcaaagctgataacacagttgtctttggacttgtagacctcttggattccaggtgtgatggagtaaagtgtgggattgttgttttgctgggatgcaaataactaaatgctttggtggttaattgctaagagtaaatactactttagccatccaaggccaccttctgcagcaaaaggcttttgtggagaaccttttatgttcccaaccactttttgaatggtgtgccatttaaaaatccaggccagatcctattataaccaactctcaggatttacagccttcagttgtactagaattttgtttttatccaatactcattaaataagtgggccacttaggaagattcaaaatcttggttattacatgaagtttgttatatttcttgtcaacagtattgaaatgtaatatgtatgtgttcatgtatgaaaatttttactccacacaggtgtttcagtagagtggggcaggaaaagagatctcttcgatttctttcaggcctgaggcttttgtgaaatgcgtcagccccctgtgacagtaggttttgatgctagtgatcttcagatctttctctctggaaatgtgcagagagtgtcagtttcccaagttctgaggtaactctcagcccagatgtgaaatgggagcctaccagctggtatagaagggaatgggtaggaggcactgggtgctgactcattcagcactgtcccttttctatactgctgatacatcccatggttctgagaagccttatctcagtctatttggaagagagggaggaagagaaggaagtaacccaaagtactactcatttatccttgtatattgattagttaaagggataattaatttaatgctgaggagagtttgacagattttgaaaatgagtaaaggcaaaaaaaatttttttagcctttattttgcctttgggaattttacagagtcaaagtaggcagaataagaaaatagttcttcaggagggccgacctttaaagaacttcaacatagtttcggaattgtggggaagagaagagtgactgagctgagaagtaataatagaataaagggttgagtaacttagaactgaaaatgatctcttttaaattagcagtgtataaccatcttctcttttcatcttgttccaattctctcctctttcctttccattctgctttaagctcatgtgtcaggcagactttaccagagtgtcagacattacctaaaacacatacgttagccatgctgctggtatggagaaattccacaccatgattattagcctcctttaagctgaatgggatttaaccattctaggcaacacccctgaagggcatacctaacctcaatagtgttggcttttaaaacgtatgtttgtatggtagagaaactttgtaaaagaagaatccaagagaagtttgtgaggatcctacaaacccaggcccactcactttgctctaattctttctagtatcttgtagatctaatgggtctgggataaaaactttgaaaagtgtcaatattccatgtatgctgctgaaatgaagttaagtttggaaagaagtgatacctctagactgggtttatattaatctgggatataaatgaagaagacatactaatagaactccttgcttttaattggggaaatagggctttaataattttgacctcaactaaaaatgatatgcaatagtctctgtgtgtgtttgaaatacattgtgttctcagagatttctacattctcacgttctagtgatttggggcatgggcttaatagcagatgtacagtgtattcctgcattattgtgattccccttaaagcccagttcttgctgtcttctaccaggggctgctgactccagttacccatggaatgcaggacctgggaggggtagccattagggtctttcaaaactctttggatctaagcatttgtctctccttaagtgccaatcacaattggatatggaaggactgtgatttctgcaatgaacccaaacttttagagtaaaaagccaaatttaaattataagaaagaagggaaaaaagagaaaaactcaagtctattacttgtagagtccaattcttagcaatggaatcgctctaggattctagtttgggctttgtctggatttgcttttctcagttgtgctttgaagtgaataagctttgttacaaattaattttttattagttccaatattagttggagttaacttgaattgattgtatgtagcacagcacttttgcagtaagattggtgtgaaatactaaacactatggattttgtaggtgtcaggttaaatggtcaagggatacctacattaagtcatatattaggtattgatgatcttacttcttttctgttcccctgtacaaaacacttacctaacccagcttgtggttttaggacagccaaagctcactgttgttggttagtcctaatcactacacgggtctcataaatgagacttgtttgaattttggtacattggagcatgttggttggtattacacggcagcatttcgaatgagtgcagctctgtgtctgtcagaaaggagagataagactactttgaagggaattaaatatgtgagtcctctttttaatggtgctttttgtaacctttaatgctgaggtacagagctgcttttcaatatttcataaaggagtggcagacaagagtggattttaaagctgttcttcaaacgtaatttgtcactggactctgacacacctggaaattatatgatatgatacatacagaaatgttgtgggttttttccataaaactttaataaaagtattatacagcaataa

SEQ ID NO: 294064 - DNA, 2897 bp, Homo sapiens
  misc_feature (1655)..(1655): n is a, c, g, or t
tttaggaggaatcgctggtcgccagcgaggggtgcggcttcaatttcaataactttattggtggcctgatctgcagaacagccatcacatcagtggcccttggaggagggagcgcatcgcccgaggtggtccccgacgagctgcagccatgggaaacaccaccagcgaccgggtgtccggggagcgccacggcgccaaggctgcacgctccgagggcgcaggcggccatgccccggggaaggagcacaagatcatggtggggagtacggacgaccccagcgtgttcagcctccctgactccaagctccctggggacaaagagtttgtatcatggcagcaggatttggaggactccgtaaagcccacacagcaggcccggcccactgttatccgctggtctgaaggaggcaaggaggtcttcatctctgggtccttcaacaattggagcaccaagattccactgattaagagccataatgactttgttgccatcctggacctccctgagggagagcaccaatacaagttctttgtggatggacagtgggttcatgatccatcagagcctgtggttaccagtcagcttggcacaattaacaatttgatccatgtcaagaaatctgattttgaggtgttcgatgctttaaagttagattctatggaaagttctgagacatcttgtagagacctttccagctcacccccagggccttatggtcaagaaatgtatgcgtttcgatctgaggaaagattcaaatccccacccatccttcctcctcatctacttcaagttattcttaacaaagacactaatatttcttgtgacccagccttactccctgagcccaaccatgttatgctgaaccatctctatgcattgtccattaaggacagtgtgatggtccttagcgcaacccatcgctacaagaagaagtatgttactactctgctatacaagcccatttgaagggatcccttcttgcctctaaggattcaggagaagcatctcccttgcatttctggactgaaccagtcttacctgagactggaaggctgatttgctttgaggctgatatgtgtgtttcagagcctctgagtaggatgctctgcttttgcatttgattgcagatgagagctttatgagttcacggaatttattttaagaaaaaaaaatatacatatgagaagaaggtaaatggaagcctcctagccccagctagaagtattgtttctgcctgtgggttttcaccaagacctgtttgggggcgctgcaggaataactatataggaagatttttcctaaaatgaaagaacagcaaactcttaggatccttgttgggtggagattctatcactgctaccttggctctccaaggaatgggcttgtgctagaccgctgccctacttaacagctgcctcattgcaagggcagtttttcttgcatgggttctctatattcccagagtatgtggcacaatctgtgttgtttatatgataccagatgccccacaagaacccttattcctctcatttcacattcttcctttaatagcctccttcagatcccatacctgacccctctctaacacaaaacttattgggtaagtgactttgaaaagttttgtggcacctgacccaccccagacactagggcnatcagaaggtctcctttttagcccagcacaggcccaggccactttgtcgtgtttgttttaacttctaaagaaaatatgtttcagcattataagaaaggcagaatgcagaacacctacatttttgttttagtttggtgccaaggctcaggctgtattggcaaattcccgaaagttttcccactttgcctggccctgcttctgtcttttctttctcagtaaacagttctgaaggcaggagtggaacccgggagtattttcatgtctttcatccttgaaagatttttatgtgcctgcattttttttttaattaaaaaatgccttttcattggtcttaagagaccgcattggagaatttcaggcttttgataaatgcttcttcaaagagattttcttctctagtctagccttccacattcttagattaatatggccaaccctgtacacatcactacactaaacactgctctagataaactgctcaagttcatttaactcatttgatgcacctaaaggggttcctcattttaaagatttgttaggccaagaagcaagagagtattcctagtattcccaaccatgaaaagtatcattctttgcaccaaatgttaacaaaatcattttgttctcctgcctcttctttttaaaggtgtttgatgattaagtggggtcactgaattccatttgtggactgaaaagtattcaatccacttttggggttcagagataaaacattttttcccaagtagctggggctcttccattttgcagataagtcaaataatcaacactaaaggaggctaaactgttgatgaatgagagactccctgactgctcagatgaccctagccacactgaaagggcacctacaggtcagtttagctacctcctgtctttcccatgcaaagctgataacacagttgtctttggacttgtagacctcttggattccaggtgtgatggagtaaagtgtgggattgttgttttgctgggatgcaaataactaaatgctttggtggttaattgctaagagtaaatactactttagccatccaaggccaccttctgcagcaaaaggcttttgtggagaaccttttatgttcccaaccactttttgaatggtgtgccatttaaaaatccaggccagatcctattataaccaactctcaggatttacagccttcagttgtactagaattttgtttttatccaatactcattaaataagtgggccacttaggaaga

SEQ ID NO: 294065 - DNA, 945 bp, Homo sapiens
agagagatttccaacctcttgcatcccctcctctagggctcatgggacctctggttctgaatgcatattcccctaaaatcaaagaacttgaagactgaaaaagaccatggttattgtcaacttaagtggtctccaagatgggctataagacaccagattgaagtgtaagaagaaaatatgagaacatttaagagtatttctttttgagcttgaaatttaaaaagatattcagctttactaatattcatggtggtgctcttgctcaggagaccttagtggctgacagagaacctaaaccctggcttgcaactcgaggctgtgtgaaaggaatcggaacttacttctcacggtgactcgaatccacgtgctgaggatggggctgtgaacgttatcagctgcacagtagtatctccctgcatcactctccttcacggtgagaacatgcagctctgccaacagggaacgctgggtctttctacccaggcttcttactcttccttctttgtgccaggagaatgtgacagtccctgaaccctgggctactgagcaaataaggaccatattttctccttcaatcagctgccctccggtgggccggatctctagattcacattagacacagggactcctgggggaacacaagatggcatgtgaaggtcctgatggcagggacatcaaggtcaaggggaaggctggagctaccatgaataggccaatagcagcaggtgcagcaggcagaagcccaaagtaggaaataagaaattaattgtgtatacgattataaaggaagcaacatccctctcactcccacaacattcccatccttgagaaatgtgggcaccaagtccataatctccataaatccaatgttttctggtcacattttatatgcatttatctctaaggaatctttgatgcatcaataaaccacaaaataaaagaga

SEQ ID NO: 294066 - DNA, 304 bp, Homo sapiens
ggtgcacaggacgtcactggcttcgcgctccgagaagtatctctgccggaggatgcggtccaggagctccccaccatggactacctccattcccagggggtaggagccatgcctggggcagccttcggggaggagggagcttcagggcaggaaccaaaaccacaagggtttatgggttcaagagctgagaacgcggattgtcctggaattccttccgtgccaccatcgtctctcttgtgtctggaggctcagtgacggtgcaagggaagaaaaattctcttcccagccgggtgcagtggctcac

SEQ ID NO: 294067 - DNA, 5839 bp, Homo sapiens
ggccggcgctggtactcggcacgaggcggagaaggaggcggagggagcgattgtggccccggccgcggtggccggcgcggcctgccctttgtgaccgcagctcgcgccccacgccccgcgcccatggccgccgtgccgggctccctggccacgcgtgcccgcccgcggacctgagccccgcgcctgggatgccggggatgcgcgtcccccggccctgcggctgctccgggctgggcgcggggcgatggacctgagcatgaagaagttcgccgtgcgcaggttcttctctgtgtacctgcgcaggaagtcgcgctccaagagctccagcctgagccggctcgaggaagaaggtgtcgtgaaggagatagacatcagccatcatgtgaaggagggctttgagaaggcagatccttcccagtttgagctgctgaaggttttaggacaaggatcctatggaaaggtgttcctggtgaggaaggtgaaggggtccgacgctgggcagctctacgccatgaaggtccttaagaaagccaccctaaaagttcgggaccgagtgagatcgaagatggagagagacatcttggcagaagtgaatcaccccttcattgtgaagcttcattatgcctttcagacggaaggaaagctctacctgatcctggacttcctgcggggaggggacctcttcacccggctctccaaagaggtcatgttcacggaggaggatgtcaagttctacctggctgagctggccttggctttagaccatctccacagcctggggatcatctacagagatctgaagcctgagaacatcctcctggatgaagaggggcacattaagatcacagatttcggcctgagtaaggaggccattgaccacgacaagagagcgtactccttctgcgggacgatcgagtacatggcgcccgaggtggtgaaccggcgaggacacacgcagagtgccgactggtggtccttcggcgtgctcatgtttgagatgctcacggggtccctgccgttccaggggaaggacaggaaggagaccatggctctcatcctcaaagccaagctggggatgccgcagttcctcagtggggaggcacagagtttgctgcgagctctcttcaaacggaacccctgcaaccggctgggtgctggcattgacggagtggaggaaattaagcgccatcccttctttgtgaccatagactggaacacgctgtaccggaaggagatcaagccaccgttcaaaccagcagtgggcaggcctgaggacaccttccactttgaccccgagttcacagcgcggacgcccacagactctcctggcgtccccccgagtgcaaacgctcatcacctgtttagaggattcagctttgtggcctcaagcctgatccaggagccctcacagcaagatctgcacaaagtcccagttcacccaatcgtgcagcagttacacgggaacaacatccacttcaccgatggctacgagatcaaggaggacatcggggtgggctcctactcagtgtgcaagcgatgtgtgcataaagccacagacaccgagtatgccgtgaagatcattgataagagcaagagagacccctcggaagagattgagatcctcctgcggtacggccagcacccgaacatcatcaccctcaaggatgtctatgatgatggcaagtttgtgtacctggtaatggagctgatgcgtggtggggagctcctggaccgcatcctccggcagagatacttctcggagcgcgaagccagtgacgtcctgtgcaccatcaccaagaccatggactacctccattcccagggggttgttcatcgagacctgaagccgagtaacatcctgtacagggatgagtcggggagcccagaatccatccgagtctgcgacttcggctttgccaagcagctgcgcgcggggaacgggctgctcatgacaccctgctacacggccaatttcgtggccccggaggtcctgaagcgtcaaggctatgatgcggcgtgtgacatctggagtttggggatcctgttgtacaccatgctggcaggatttaccccttttgcaaatgggccagacgatacccctgaggagattctggcgcggatcggcagtgggaagtatgccctttctgggggaaactgggactcgatatctgacgcagctaaagacgtcgtgtccaagatgctccacgtggaccctcatcagcgcctgacggcgatgcaagtgctcaaacacccgtgggtggtcaacagagagtacctgtccccaaaccagctcagccgacaggacgtgcacctggtgaagggcgcgatggccgccacctactttgctctaaacagaacacctcaggccccgcggctggagcccgtgctgtcatccaacctggctcagcgcagaggcatgaagagactcacgtccacgcggctgtagcgggtgggaccctggccccagcgtcccctgccagcatcctcgtgggctcacagaccccggcctcggagcccgtctggcacccagagtgaccacaagtccagcagggaggcggcgccgcctcgccgtgtccgtgttttctttttcagccccggagagggtcctgacctgggggcttctccaagcctcactgcgccagcctccccgcccgctctcttttctcccaagcgaaaccaaatgcgccccttcacctcgcgtgcccgtgcgaggccgggggcttctttcagagcccgcgggtcctctcatacatggcttctgtttctgccgagagatctgttttccaattatgaagccggtcggtttggtcagactcccgacacccacgtcccaggtacccggtgggaaagtggcagtgcgagggcgcagccattggtggttgcagggccccagagggctggggtgacctggcatcccggggctccccacgggctggatgacggggttggcactgtggcgtccaggaggagatgcctggttctgcccaaaataatccaaagagccgtttcctcctcgcccttcagtttttgcctgaggtgctgggtagcccatcctttcctctgtcccagattcaaatgaggagtaagagcccagacgagaggaaggcaggctggatctttgccttgagagctccgtgtcaccaggatggaagggggtgcctctcggaggagcctgtgtccacctccagtctcggctttccccggggggccaagcgcactgggctgccgtctgtccccagctcccgtggccacacagctatctggaggctttgcagggagtcgtgggttctcgcacctgctcagccctgtgtcggcttcctgtgtgctcacctaaagctgtggttttgctgtgttcacttcgatttttctggtctgtggagaaactgtgaattggagaaatggagctctgtggcttcccacccaaaccttctcagtccagctggaggctggagggagacacaggccccacccagcagactgaggggcagaggcacaggtgggagggcagcggagatcagcgtggacaggagcgatgcactttgtagatgctgtggctttgtgttgcgttttgtgtctctgttgcacagatctgttttttcacactgatccgtattcccctgggtgtgcacacagggcgggtgtggggcatttaggccatgctgtgctctacttcattgagtaaaatcgagtgagaggttccgggcagcaggatcgacgcccagtccagccggcagagggaacacacgggtccttcattgtcctgtaagggtgttgaagatgctccctggcggcccccaagcagactagatgggaggaggcgccgctcagcccctcaccctgcatcactgaagagcggcgcctctgcagcaagcagggcttcaggaggtgcccgctggccacagccaggttttccctaagaagatgttattttgttgggttttgttccccctccatctcgattctcgtacccaactaaaaaaaaaaaaataaagaaaaaatgtgctgcgttctgaaaaataactccttagcttggtctgattgttttcagaccttaaaatataaacttgtttcacaagctttaatccatgtggatttttttttcttagagaaccacaaaacataaaaggagcaagtcggactgaatacctgtttccatagtgcccacagggtattcctcacattttctccatagaagatgctttttcccaaggctagaacgacttccaccatgatgaatttgctttttaggtcttaattatttcacttctttttagaaacttaggaagaagtggataatcctgaggtcacacaatctgtcctcccagaaatgaacaaaagtcatcaccttttctgcttgctacacaggcaacgattcccccatcagctgcccggaccctttggcctggcttggtgtgcaggcctgtctgtttgcttaaagtcagtgggttctggtgcagggagtgagaagtgggggaagtgaaagggaaagcatccgtgagaaagcggccacggttttccctccttgtgtgcccatggggcaccagctcatggtctttttcagtcatcccagtttgtacagacttagcttctgaactctaagaatgccaaagggaccgacgagactccccatcacagcgagctctgtccttacatgtatttgatgtgcatcagcggaggagaacactggcttggccctgctccgctgagtgtctgtgaaatacctctactttccctcccatatccagaacaaaatgatacttgacatccttccacaaaagtcagcctaaagaagttatggtatcatatgttaaactaagctttcaaaaaccttagtgaaatagcaagtgactgctttcaagcagcagtcgacatgtaaatgaaggtgttcttagaattcgcattttgccagctcagcgcacctccacaacgaatgaaatgctccgtatgatttgcacaaatgacatagacctccccaaaagttaactggctctccttcctcacacagttcatcataacccaaccccccacccccgggtcatgaaaatcacagaacttataaacacattgaaccctagatctcaggcttcctgacctaccgccagtggccccttgctggccaccctatagggtcctccttccctggcagccccccatgtgggagaaatacctgattctcccaatctgcagtgggagagctttgctgaattccatcccaaagtcaaacatgggcaagaggtgaggatttcacttttaccctcaagtccgatttgtctgtgattttaaactaactgtgtatgtattgatgtttggaagattgtttgaattttaaagtgataatagtacttaatgttatccagtattgttcattaaatggtgttatcctaaagctgcacttgggatttttacctaacgctttactgattctctcaagcacatggcaaagtttgatttgcactccgttcatttctgacacgttttgctgcctcctacctttctaagcgtcatgcaaattcgagaatggagaaggacgctgccggtccctgagcggtgtggagagggcggaaggtggactccagcgcagcttgaggggctgaggacggaggctgcagcatctgtgtcgttctactgagcacgcttctctgcctcgctcctgactcagcactttgttcactggctcagcagttatgtttacacatcatttttatgttcctgctttgtaattcatgtttgagatgggtggccactgtacagatatttattacgctttccagactttctgaatagatttttttgaataaacatggttttatgaagtgtaatctttttctagcctaacaat

SEQ ID NO: 294068 - DNA, 5785 bp, Homo sapiens
ggccggcgctggtactcggcacgaggcggagaaggaggcggagggagcgattgtggccccggccgcggtggccggcgcggcctgccctttgtgaccgcagctcgcgccccacgccccgcgcccatggccgccgtgccgggctccctggccacgcgtgcccgcccgcggacctgagccccgcgcctgggatgccggggatgcgcgtcccccggccctgcggctgctccgggctgggcgcggggcgatggacctgagcatgaagaagttcgccgtgcgcaggttcttctctgtgtacctgcgcaggaagtcgcgctccaagagctccagcctgagccggctcgaggaagaaggtgtcgtgaaggagatagacatcagccatcatgtgaaggagggctttgagaaggcagatccttcccagtttgagctgctgaaggttttaggacaaggatcctatggaaaggtgttcctggtgaggaaggtgaaggggtccgacgctgggcagctctacgccatgaaggtccttaagaaagccaccctaaaagttcgggaccgagtgagatcgaagatggagagagacatcttggcagaagtgaatcaccccttcattgtgaagcttcattatgcctttcagacggaaggaaagctctacctgatcctggacttcctgcggggaggggacctcttcacccggctctccaaagaggtcatgttcacggaggaggatgtcaagttctacctggctgagctggccttggctttagaccatctccacagcctggggatcatctacagagatctgaagcctgagaacatcctcctggatgaagaggggcacattaagatcacagatttcggcctgagtaaggaggccattgaccacgacaagagagcgtactccttctgcgggacgatcgagtacatggcgcccgaggtggtgaaccggcgaggacacacgcagagtgccgactggtggtccttcggcgtgctcatgtttgagatgctcacggggtccctgccgttccaggggaaggacaggaaggagaccatggctctcatcctcaaagccaagctggggatgccgcagttcctcagtggggaggcacagagtttgctgcgagctctcttcaaacggaacccctgcaaccggctgggtgctggcattgacggagtggaggaaattaagcgccatcccttctttgtgaccatagactggaacacgctgtaccggaaggagatcaagccaccgttcaaaccagcagtgggcaggcctgaggacaccttccactttgaccccgagttcacagcgcggacgcccacagactctcctggcgtccccccgagtgcaaacgctcatcacctgtttagaggattcagctttgtggcctcaagcctgatccaggagccctcacagcaagatctgcacaaagtcccagttcacccaatcgtgcagcagttacacgggaacaacatccacttcaccgatggctacgagatcaaggaggacatcggggtgggctcctactcagtgtgcaagcgatgtgtgcataaagccacagacaccgagtatgccgtgaagatcattgataagagcaagagagacccctcggaagagattgagatcctcctgcggtacggccagcacccgaacatcatcaccctcaaggatgtctatgatgatggcaagtttgtgtacctggtaatggagctgatgcgtggtggggagctcctggaccgcatcctccggcagagatacttctcggagcgcgaagccagtgacgtcctgtgcaccatcaccaagaccatggactacctccattcccagggggttgttcatcgagacctgaagccgagtaacatcctgtacagggatgagtcggggagcccagaatccatccgagtctgcgacttcggctttgccaagcagctgcgcgcggggaacgggctgctcatgacaccctgctacacggccaatttcgtggccccggaggtcctgaagcgtcaaggctatgatgcggcgtgtgacatctggagtttggggatcctgttgtacaccatgctggcaggatttaccccttttgcaaatgggccagacgatacccctgaggagattctggcgcggatcggcagtgggaagtatgccctttctgggggaaactgggactcgatatctgacgcagctaaagacgtcgtgtccaagatgctccacgtggaccctcatcagcgcctgacggcgatgcaagtgctcaaacacccgtgggtggtcaacagagagtacctgtccccaaaccagctcagccgacaggacgtgcacctggtgaagggcgcgatggccgccacctactttgctctaaacagaacacctcaggccccgcggctggagcccgtgctgtcatccaacctggctcagcgcagaggcatgaagagactcacgtccacgcggctgtagcgggtgggaccctggccccagcgtcccctgccagcatcctcgtgggctcacagaccccggcctcggagcccgtctggcacccagagtgaccacaagtccagcagggaggcggcgccgcctcgccgtgtccgtgttttctttttcagccccggagagggtcctgacctgggggcttctccaagcctcactgcgccagcctccccgcccgctctcttttctcccaagcgaaaccaaatgcgccccttcacctcgcgtgcccgtgcgaggccgggggcttctttcagagcccgcgggtcctctcatacatggcttctgtttctgccgagagatctgttttccaattatgaagccggtcggtttggtcagactcccgacacccacgtcccaggtacccggtgggaaagtggcagtgcgagggcgcagccattggtggttgcagggccccagagggctggggtgacctggcatcccggggctccccacgggctggatgacggggttggcactgtggcgtccaggaggagatgcctggttctgccctgggtagcccatcctttcctctgtcccagattcaaatgaggagtaagagcccagacgagaggaaggcaggctggatctttgccttgagagctccgtgtcaccaggatggaagggggtgcctctcggaggagcctgtgtccacctccagtctcggctttccccggggggccaagcgcactgggctgccgtctgtccccagctcccgtggccacacagctatctggaggctttgcagggagtcgtgggttctcgcacctgctcagccctgtgtcggcttcctgtgtgctcacctaaagctgtggttttgctgtgttcacttcgatttttctggtctgtggagaaactgtgaattggagaaatggagctctgtggcttcccacccaaaccttctcagtccagctggaggctggagggagacacaggccccacccagcagactgaggggcagaggcacaggtgggagggcagcggagatcagcgtggacaggagcgatgcactttgtagatgctgtggctttgtgttgcgttttgtgtctctgttgcacagatctgttttttcacactgatccgtattcccctgggtgtgcacacagggcgggtgtggggcatttaggccatgctgtgctctacttcattgagtaaaatcgagtgagaggttccgggcagcaggatcgacgcccagtccagccggcagagggaacacacgggtccttcattgtcctgtaagggtgttgaagatgctccctggcggcccccaagcagactagatgggaggaggcgccgctcagcccctcaccctgcatcactgaagagcggcgcctctgcagcaagcagggcttcaggaggtgcccgctggccacagccaggttttccctaagaagatgttattttgttgggttttgttccccctccatctcgattctcgtacccaactaaaaaaaaaaaaataaagaaaaaatgtgctgcgttctgaaaaataactccttagcttggtctgattgttttcagaccttaaaatataaacttgtttcacaagctttaatccatgtggatttttttttcttagagaaccacaaaacataaaaggagcaagtcggactgaatacctgtttccatagtgcccacagggtattcctcacattttctccatagaagatgctttttcccaaggctagaacgacttccaccatgatgaatttgctttttaggtcttaattatttcacttctttttagaaacttaggaagaagtggataatcctgaggtcacacaatctgtcctcccagaaatgaacaaaagtcatcaccttttctgcttgctacacaggcaacgattcccccatcagctgcccggaccctttggcctggcttggtgtgcaggcctgtctgtttgcttaaagtcagtgggttctggtgcagggagtgagaagtgggggaagtgaaagggaaagcatccgtgagaaagcggccacggttttccctccttgtgtgcccatggggcaccagctcatggtctttttcagtcatcccagtttgtacagacttagcttctgaactctaagaatgccaaagggaccgacgagactccccatcacagcgagctctgtccttacatgtatttgatgtgcatcagcggaggagaacactggcttggccctgctccgctgagtgtctgtgaaatacctctactttccctcccatatccagaacaaaatgatacttgacatccttccacaaaagtcagcctaaagaagttatggtatcatatgttaaactaagctttcaaaaaccttagtgaaatagcaagtgactgctttcaagcagcagtcgacatgtaaatgaaggtgttcttagaattcgcattttgccagctcagcgcacctccacaacgaatgaaatgctccgtatgatttgcacaaatgacatagacctccccaaaagttaactggctctccttcctcacacagttcatcataacccaaccccccacccccgggtcatgaaaatcacagaacttataaacacattgaaccctagatctcaggcttcctgacctaccgccagtggccccttgctggccaccctatagggtcctccttccctggcagccccccatgtgggagaaatacctgattctcccaatctgcagtgggagagctttgctgaattccatcccaaagtcaaacatgggcaagaggtgaggatttcacttttaccctcaagtccgatttgtctgtgattttaaactaactgtgtatgtattgatgtttggaagattgtttgaattttaaagtgataatagtacttaatgttatccagtattgttcattaaatggtgttatcctaaagctgcacttgggatttttacctaacgctttactgattctctcaagcacatggcaaagtttgatttgcactccgttcatttctgacacgttttgctgcctcctacctttctaagcgtcatgcaaattcgagaatggagaaggacgctgccggtccctgagcggtgtggagagggcggaaggtggactccagcgcagcttgaggggctgaggacggaggctgcagcatctgtgtcgttctactgagcacgcttctctgcctcgctcctgactcagcactttgttcactggctcagcagttatgtttacacatcatttttatgttcctgctttgtaattcatgtttgagatgggtggccactgtacagatatttattacgctttccagactttctgaatagatttttttgaataaacatggttttatgaagtgtaatctttttctagcctaacaat

SEQ ID NO: 294069 - DNA, 5719 bp, Homo sapiens
ggccggcgctggtactcggcacgaggcggagaaggaggcggagggagcgattgtggccccggccgcggtggccggcgcggcctgccctttgtgaccgcagctcgcgccccacgccccgcgcccatggccgccgtgccgggctccctggccacgcgtgcccgcccgcggacctgagccccgcgcctgggatgccggggatgcgcgtcccccggccctgcggctgctccgggctgggcgcggggcgatggacctgagcatgaagaagttcgccgtgcgcaggttcttctctgtgtacctgcgcaggaagtcgcgctccaagagctccagcctgagccggctcgaggaagaaggtgtcgtgaaggagatagacatcagccatcatgtgaaggagggctttgagaaggcagatccttcccagtttgagctgctgaaggttttaggacaaggatcctatggaaaggtgttcctggtgaggaaggtgaaggggtccgacgctgggcagctctacgccatgaaggtccttaagaaagccaccctaaaagttcgggaccgagtgagatcgaagatggagagagacatcttggcagaagtgaatcaccccttcattgtgaagcttcattatgcctttcagacggaaggaaagctctacctgatcctggacttcctgcggggaggggacctcttcacccggctctccaaagaggtcatgttcacggaggaggatgtcaagttctacctggctgagctggccttggctttagaccatctccacagcctggggatcatctacagagatctgaagcctgagaacatcctcctggatgaagaggggcacattaagatcacagatttcggcctgagtaaggaggccattgaccacgacaagagagcgtactccttctgcgggacgatcgagtacatggcgcccgaggtggtgaaccggcgaggacacacgcagagtgccgactggtggtccttcggcgtgctcatgtttgagatgctcacggggtccctgccgttccaggggaaggacaggaaggagaccatggctctcatcctcaaagccaagctggggatgccgcagttcctcagtggggaggcacagagtttgctgcgagctctcttcaaacggaacccctgcaaccggctgggtgctggcattgacggagtggaggaaattaagcgccatcccttctttgtgaccatagactggaacacgctgtaccggaaggagatcaagccaccgttcaaaccagcagtgggcaggcctgaggacaccttccactttgaccccgagttcacagcgcggacgcccacagactctcctggcgtccccccgagtgcaaacgctcatcacctgtttagaggattcagctttgtggcctcaagcctgatccaggagccctcacagcaagatctgcacaaagtcccagttcacccaatcgtgcagcagttacacgggaacaacatccacttcaccgatggctacgagatcaaggaggacatcggggtgggctcctactcagtgtgcaagcgatgtgtgcataaagccacagacaccgagtatgccgtgaagatcattgataagagcaagagagacccctcggaagagattgagatcctcctgcggtacggccagcacccgaacatcatcaccctcaaggatgtctatgatgatggcaagtttgtgtacctggtaatggagctgatgcgtggtggggagctcctggaccgcatcctccggcagagatacttctcggagcgcgaagccagtgacgtcctgtgcaccatcaccaagaccatggactacctccattcccagggggttgttcatcgagacctgaagccgagtaacatcctgtacagggatgagtcggggagcccagaatccatccgagtctgcgacttcggctttgccaagcagctgcgcgcggggaacgggctgctcatgacaccctgctacacggccaatttcgtggccccggaggtcctgaagcgtcaaggctatgatgcggcgtgtgacatctggagtttggggatcctgttgtacaccatgctggcaggatttaccccttttgcaaatgggccagacgatacccctgaggagattctggcgcggatcggcagtgggaagtatgccctttctgggggaaactgggactcgatatctgacgcagctaaagacgtcgtgtccaagatgctccacgtggaccctcatcagcgcctgacggcgatgcaagtgctcaaacacccgtgggtggtcaacagagagtacctgtccccaaaccagctcagccgacaggacgtgcacctggtgaagggcgcgatggccgccacctactttgctctaaacagaacacctcaggccccgcggctggagcccgtgctgtcatccaacctggctcagcgcagaggcatgaagagactcacgtccacgcggctgtagcgggtgggaccctggccccagcgtcccctgccagcatcctcgtgggctcacagaccccggcctcggagcccgtctggcacccagagtgaccacaagtccagcagggaggcggcgccgcctcgccgtgtccgtgttttctttttcagccccggagagggtcctgacctgggggcttctccaagcctcactgcgccagcctccccgcccgctctcttttctcccaagcgaaaccaaatgcgccccttcacctcgcgtgcccgtgcgaggccgggggcttctttcagagcccgcgggtcctctcatacatggcttctgtttctgccgagagatctgttttccaattatgaagccggtcggtttggtcagactcccgacacccacgtcccaggtacccggtgggaaagtggcagtgcgagggcgcagccattggtggttgcagggccccagagggctggggtgacctggcatcccggggctccccacgggctggatgacggggttggcactgtggcgtccaggaggagatgcctggttctgcccaaaataatccaaagagccgtttcctcctcgcccttcagtttttgcctgaggtgctgggtagcccatcctttcctctgtcccagattcaaatgaggagtaagagcccagacgagaggaaggcaggctggatctttgccttgagagctccgtgtcaccaggatggaagggggtgcctctcggaggagcctgtgtccaccccctgtgtcggcttcctgtgtgctcacctaaagctgtggttttgctgtgttcacttcgatttttctggtctgtggagaaactgtgaattggagaaatggagctctgtggcttcccacccaaaccttctcagtccagctggaggctggagggagacacaggccccacccagcagactgaggggcagaggcacaggtgggagggcagcggagatcagcgtggacaggagcgatgcactttgtagatgctgtggctttgtgttgcgttttgtgtctctgttgcacagatctgttttttcacactgatccgtattcccctgggtgtgcacacagggcgggtgtggggcatttaggccatgctgtgctctacttcattgagtaaaatcgagtgagaggttccgggcagcaggatcgacgcccagtccagccggcagagggaacacacgggtccttcattgtcctgtaagggtgttgaagatgctccctggcggcccccaagcagactagatgggaggaggcgccgctcagcccctcaccctgcatcactgaagagcggcgcctctgcagcaagcagggcttcaggaggtgcccgctggccacagccaggttttccctaagaagatgttattttgttgggttttgttccccctccatctcgattctcgtacccaactaaaaaaaaaaaaataaagaaaaaatgtgctgcgttctgaaaaataactccttagcttggtctgattgttttcagaccttaaaatataaacttgtttcacaagctttaatccatgtggatttttttttcttagagaaccacaaaacataaaaggagcaagtcggactgaatacctgtttccatagtgcccacagggtattcctcacattttctccatagaagatgctttttcccaaggctagaacgacttccaccatgatgaatttgctttttaggtcttaattatttcacttctttttagaaacttaggaagaagtggataatcctgaggtcacacaatctgtcctcccagaaatgaacaaaagtcatcaccttttctgcttgctacacaggcaacgattcccccatcagctgcccggaccctttggcctggcttggtgtgcaggcctgtctgtttgcttaaagtcagtgggttctggtgcagggagtgagaagtgggggaagtgaaagggaaagcatccgtgagaaagcggccacggttttccctccttgtgtgcccatggggcaccagctcatggtctttttcagtcatcccagtttgtacagacttagcttctgaactctaagaatgccaaagggaccgacgagactccccatcacagcgagctctgtccttacatgtatttgatgtgcatcagcggaggagaacactggcttggccctgctccgctgagtgtctgtgaaatacctctactttccctcccatatccagaacaaaatgatacttgacatccttccacaaaagtcagcctaaagaagttatggtatcatatgttaaactaagctttcaaaaaccttagtgaaatagcaagtgactgctttcaagcagcagtcgacatgtaaatgaaggtgttcttagaattcgcattttgccagctcagcgcacctccacaacgaatgaaatgctccgtatgatttgcacaaatgacatagacctccccaaaagttaactggctctccttcctcacacagttcatcataacccaaccccccacccccgggtcatgaaaatcacagaacttataaacacattgaaccctagatctcaggcttcctgacctaccgccagtggccccttgctggccaccctatagggtcctccttccctggcagccccccatgtgggagaaatacctgattctcccaatctgcagtgggagagctttgctgaattccatcccaaagtcaaacatgggcaagaggtgaggatttcacttttaccctcaagtccgatttgtctgtgattttaaactaactgtgtatgtattgatgtttggaagattgtttgaattttaaagtgataatagtacttaatgttatccagtattgttcattaaatggtgttatcctaaagctgcacttgggatttttacctaacgctttactgattctctcaagcacatggcaaagtttgatttgcactccgttcatttctgacacgttttgctgcctcctacctttctaagcgtcatgcaaattcgagaatggagaaggacgctgccggtccctgagcggtgtggagagggcggaaggtggactccagcgcagcttgaggggctgaggacggaggctgcagcatctgtgtcgttctactgagcacgcttctctgcctcgctcctgactcagcactttgttcactggctcagcagttatgtttacacatcatttttatgttcctgctttgtaattcatgtttgagatgggtggccactgtacagatatttattacgctttccagactttctgaatagatttttttgaataaacatggttttatgaagtgtaatctttttctagcctaacaat

SEQ ID NO: 294070 - DNA, 5321 bp, Homo sapiens
gatgctactcgggttcatactatcgatgtatgaaggcgcgcacatcggcgagctgcatactgaaagcggagctgtgcaatacgcggtctgtgcgacgtgaccgttgacacggacggagaagctctaactgaatccgtgacttcgtggggggaggggacctcttcactccggatctccgataagacgtcatgttcacggaggaggatgtcaagttctacctggctgagctggccttggctttagaccatctccacagcctggggatcatctacagagatctgaagcctgagaacatcctcctggatgaagaggggcacattaagatcacagatttcggcctgagtaaggaggccattgaccacgacaagagagcgtactccttctgcgggacgatcgagtacatggcgcccgaggtggtgaaccggcgaggacacacgcagagtgccgactggtggtccttcggcgtgctcatgtttgagatgctcacggggtccctgccgttccaggggaaggacaggaaggagaccatggctctcatcctcaaagccaagctggggatgccgcagttcctcagtggggaggcacagagtttgctgcgagctctcttcaaacggaacccctgcaaccggctgggtgctggcattgacggagtggaggaaattaagcgccatcccttctttgtgaccatagactggaacacgctgtaccggaaggagatcaagccaccgttcaaaccagcagtgggcaggcctgaggacaccttccactttgaccccgagttcacagcgcggacgcccacagactctcctggcgtccccccgagtgcaaacgctcatcacctgtttagaggattcagctttgtggcctcaagcctgatccaggagccctcacagcaagatctgcacaaagtcccagttcacccaatcgtgcagcagttacacgggaacaacatccacttcaccgatggctacgagatcaaggaggacatcggggtgggctcctactcagtgtgcaagcgatgtgtgcataaagccacagacaccgagtatgccgtgaagatcattgataagagcaagagagacccctcggaagagattgagatcctcctgcggtacggccagcacccgaacatcatcaccctcaaggatgtctatgatgatggcaagtttgtgtacctggtaatggagctgatgcgtggtggggagctcctggaccgcatcctccggcagagatacttctcggagcgcgaagccagtgacgtcctgtgcaccatcaccaagaccatggactacctccattcccagggggttgttcatcgagacctgaagccgagtaacatcctgtacagggatgagtcggggagcccagaatccatccgagtctgcgacttcggctttgccaagcagctgcgcgcggggaacgggctgctcatgacaccctgctacacggccaatttcgtggccccggaggtcctgaagcgtcaaggctatgatgcggcgtgtgacatctggagtttggggatcctgttgtacaccatgctggcaggatttaccccttttgcaaatgggccagacgatacccctgaggagattctggcgcggatcggcagtgggaagtatgccctttctgggggaaactgggactcgatatctgacgcagctaaagacgtcgtgtccaagatgctccacgtggaccctcatcagcgcctgacggcgatgcaagtgctcaaacacccgtgggtggtcaacagagagtacctgtccccaaaccagctcagccgacaggacgtgcacctggtgaagggcgcgatggccgccacctactttgctctaaacagaacacctcaggccccgcggctggagcccgtgctgtcatccaacctggctcagcgcagaggcatgaagagactcacgtccacgcggctgtagcgggtgggaccctggccccagcgtcccctgccagcatcctcgtgggctcacagaccccggcctcggagcccgtctggcacccagagtgaccacaagtccagcagggaggcggcgccgcctcgccgtgtccgtgttttctttttcagccccggagagggtcctgacctgggggcttctccaagcctcactgcgccagcctccccgcccgctctcttttctcccaagcgaaaccaaatgcgccccttcacctcgcgtgcccgtgcgaggccgggggcttctttcagagcccgcgggtcctctcatacatggcttctgtttctgccgagagatctgttttccaattatgaagccggtcggtttggtcagactcccgacacccacgtcccaggtacccggtgggaaagtggcagtgcgagggcgcagccattggtggttgcagggccccagagggctggggtgacctggcatcccggggctccccacgggctggatgacggggttggcactgtggcgtccaggaggagatgcctggttctgcccaaaataatccaaagagccgtttcctcctcgcccttcagtttttgcctgaggtgctgggtagcccatcctttcctctgtcccagattcaaatgaggagtaagagcccagacgagaggaaggcaggctggatctttgccttgagagctccgtgtcaccaggatggaagggggtgcctctcggaggagcctgtgtccacctccagtctcggctttccccggggggccaagcgcactgggctgccgtctgtccccagctcccgtggccacacagctatctggaggctttgcagggagtcgtgggttctcgcacctgctcagccctgtgtcggcttcctgtgtgctcacctaaagctgtggttttgctgtgttcacttcgatttttctggtctgtggagaaactgtgaattggagaaatggagctctgtggcttcccacccaaaccttctcagtccagctggaggctggagggagacacaggccccacccagcagactgaggggcagaggcacaggtgggagggcagcggagatcagcgtggacaggagcgatgcactttgtagatgctgtggctttgtgttgcgttttgtgtctctgttgcacagatctgttttttcacactgatccgtattcccctgggtgtgcacacagggcgggtgtggggcatttaggccatgctgtgctctacttcattgagtaaaatcgagtgagaggttccgggcagcaggatcgacgcccagtccagccggcagagggaacacacgggtccttcattgtcctgtaagggtgttgaagatgctccctggcggcccccaagcagactagatgggaggaggcgccgctcagcccctcaccctgcatcactgaagagcggcgcctctgcagcaagcagggcttcaggaggtgcccgctggccacagccaggttttccctaagaagatgttattttgttgggttttgttccccctccatctcgattctcgtacccaactaaaaaaaaaaaaataaagaaaaaatgtgctgcgttctgaaaaataactccttagcttggtctgattgttttcagaccttaaaatataaacttgtttcacaagctttaatccatgtggatttttttttcttagagaaccacaaaacataaaaggagcaagtcggactgaatacctgtttccatagtgcccacagggtattcctcacattttctccatagaagatgctttttcccaaggctagaacgacttccaccatgatgaatttgctttttaggtcttaattatttcacttctttttagaaacttaggaagaagtggataatcctgaggtcacacaatctgtcctcccagaaatgaacaaaagtcatcaccttttctgcttgctacacaggcaacgattcccccatcagctgcccggaccctttggcctggcttggtgtgcaggcctgtctgtttgcttaaagtcagtgggttctggtgcagggagtgagaagtgggggaagtgaaagggaaagcatccgtgagaaagcggccacggttttccctccttgtgtgcccatggggcaccagctcatggtctttttcagtcatcccagtttgtacagacttagcttctgaactctaagaatgccaaagggaccgacgagactccccatcacagcgagctctgtccttacatgtatttgatgtgcatcagcggaggagaacactggcttggccctgctccgctgagtgtctgtgaaatacctctactttccctcccatatccagaacaaaatgatacttgacatccttccacaaaagtcagcctaaagaagttatggtatcatatgttaaactaagctttcaaaaaccttagtgaaatagcaagtgactgctttcaagcagcagtcgacatgtaaatgaaggtgttcttagaattcgcattttgccagctcagcgcacctccacaacgaatgaaatgctccgtatgatttgcacaaatgacatagacctccccaaaagttaactggctctccttcctcacacagttcatcataacccaaccccccacccccgggtcatgaaaatcacagaacttataaacacattgaaccctagatctcaggcttcctgacctaccgccagtggccccttgctggccaccctatagggtcctccttccctggcagccccccatgtgggagaaatacctgattctcccaatctgcagtgggagagctttgctgaattccatcccaaagtcaaacatgggcaagaggtgaggatttcacttttaccctcaagtccgatttgtctgtgattttaaactaactgtgtatgtattgatgtttggaagattgtttgaattttaaagtgataatagtacttaatgttatccagtattgttcattaaatggtgttatcctaaagctgcacttgggatttttacctaacgctttactgattctctcaagcacatggcaaagtttgatttgcactccgttcatttctgacacgttttgctgcctcctacctttctaagcgtcatgcaaattcgagaatggagaaggacgctgccggtccctgagcggtgtggagagggcggaaggtggactccagcgcagcttgaggggctgaggacggaggctgcagcatctgtgtcgttctactgagcacgcttctctgcctcgctcctgactcagcactttgttcactggctcagcagttatgtttacacatcatttttatgttcctgctttgtaattcatgtttgagatgggtggccactgtacagatatttattacgctttccagactttctgaatagatttttttgaataaacatggttttatgaagtgtaatctttttctagcctaacaat

SEQ ID NO: 294071 - DNA, 4242 bp, Homo sapiens
ctgtattgtatgtgcatgtgtacacacatgtagaatcttgttttagaggtttttactgctacgactttacaatgaaatggaaaaataccattattgcacatgaacccactggacatatctgatggctccagattgtagattttgcggtttctgattatttgtagtaaatatttatgggtagtcctgataaaaaatgtaagtatgtgcatcattatgaattgatttctacctgtggaatattaattatttcagcttttccctttggaaagatataattgttacaagaaacagtgtttcatcgatttacatgcatcatctaatatttccacatttaactttttagacatgaaatatttaataaaagataaaccttcagtgaacttccaagtttggtaatatttaaagctaaaaaccattgacatacttctaaacctgaaagtgaacatgaccccataatgcaaagacccacactcagcatagtggttgggtgttgccatagagggagaggagttctgctggggaggctctctgacccagcacaaatgatccaaccatccccccgactctcatgaccttccctggcaggacgtcgtgtccaagatgctccacgtggaccctcatcagcgcctgacggcgatgcaagtgctcaaacacccgtgggtggtcaacagagagtacctgtccccaaaccagctcagccgacaggacgtgcacctggtgaagggcgcgatggccgccacctactttgctctaaacagaacacctcaggccccgcggctggagcccgtgctgtcatccaacctggctcagcgcagaggcatgaagagactcacgtccacgcggctgtagcgggtgggaccctggccccagcgtcccctgccagcatcctcgtgggctcacagaccccggcctcggagcccgtctggcacccagagtgaccacaagtccagcagggaggcggcgccgcctcgccgtgtccgtgttttctttttcagccccggagagggtcctgacctgggggcttctccaagcctcactgcgccagcctccccgcccgctctcttttctcccaagcgaaaccaaatgcgccccttcacctcgcgtgcccgtgcgaggccgggggcttctttcagagcccgcgggtcctctcatacatggcttctgtttctgccgagagatctgttttccaattatgaagccggtcggtttggtcagactcccgacacccacgtcccaggtacccggtgggaaagtggcagtgcgagggcgcagccattggtggttgcagggccccagagggctggggtgacctggcatcccggggctccccacgggctggatgacggggttggcactgtggcgtccaggaggagatgcctggttctgcccaaaataatccaaagagccgtttcctcctcgcccttcagtttttgcctgaggtgctgggtagcccatcctttcctctgtcccagattcaaatgaggagtaagagcccagacgagaggaaggcaggctggatctttgccttgagagctccgtgtcaccaggatggaagggggtgcctctcggaggagcctgtgtccacctccagtctcggctttccccggggggccaagcgcactgggctgccgtctgtccccagctcccgtggccacacagctatctggaggctttgcagggagtcgtgggttctcgcacctgctcagccctgtgtcggcttcctgtgtgctcacctaaagctgtggttttgctgtgttcacttcgatttttctggtctgtggagaaactgtgaattggagaaatggagctctgtggcttcccacccaaaccttctcagtccagctggaggctggagggagacacaggccccacccagcagactgaggggcagaggcacaggtgggagggcagcggagatcagcgtggacaggagcgatgcactttgtagatgctgtggctttgtgttgcgttttgtgtctctgttgcacagatctgttttttcacactgatccgtattcccctgggtgtgcacacagggcgggtgtggggcatttaggccatgctgtgctctacttcattgagtaaaatcgagtgagaggttccgggcagcaggatcgacgcccagtccagccggcagagggaacacacgggtccttcattgtcctgtaagggtgttgaagatgctccctggcggcccccaagcagactagatgggaggaggcgccgctcagcccctcaccctgcatcactgaagagcggcgcctctgcagcaagcagggcttcaggaggtgcccgctggccacagccaggttttccctaagaagatgttattttgttgggttttgttccccctccatctcgattctcgtacccaactaaaaaaaaaaaaataaagaaaaaatgtgctgcgttctgaaaaataactccttagcttggtctgattgttttcagaccttaaaatataaacttgtttcacaagctttaatccatgtggatttttttttcttagagaaccacaaaacataaaaggagcaagtcggactgaatacctgtttccatagtgcccacagggtattcctcacattttctccatagaagatgctttttcccaaggctagaacgacttccaccatgatgaatttgctttttaggtcttaattatttcacttctttttagaaacttaggaagaagtggataatcctgaggtcacacaatctgtcctcccagaaatgaacaaaagtcatcaccttttctgcttgctacacaggcaacgattcccccatcagctgcccggaccctttggcctggcttggtgtgcaggcctgtctgtttgcttaaagtcagtgggttctggtgcagggagtgagaagtgggggaagtgaaagggaaagcatccgtgagaaagcggccacggttttccctccttgtgtgcccatggggcaccagctcatggtctttttcagtcatcccagtttgtacagacttagcttctgaactctaagaatgccaaagggaccgacgagactccccatcacagcgagctctgtccttacatgtatttgatgtgcatcagcggaggagaacactggcttggccctgctccgctgagtgtctgtgaaatacctctactttccctcccatatccagaacaaaatgatacttgacatccttccacaaaagtcagcctaaagaagttatggtatcatatgttaaactaagctttcaaaaaccttagtgaaatagcaagtgactgctttcaagcagcagtcgacatgtaaatgaaggtgttcttagaattcgcattttgccagctcagcgcacctccacaacgaatgaaatgctccgtatgatttgcacaaatgacatagacctccccaaaagttaactggctctccttcctcacacagttcatcataacccaaccccccacccccgggtcatgaaaatcacagaacttataaacacattgaaccctagatctcaggcttcctgacctaccgccagtggccccttgctggccaccctatagggtcctccttccctggcagccccccatgtgggagaaatacctgattctcccaatctgcagtgggagagctttgctgaattccatcccaaagtcaaacatgggcaagaggtgaggatttcacttttaccctcaagtccgatttgtctgtgattttaaactaactgtgtatgtattgatgtttggaagattgtttgaattttaaagtgataatagtacttaatgttatccagtattgttcattaaatggtgttatcctaaagctgcacttgggatttttacctaacgctttactgattctctcaagcacatggcaaagtttgatttgcactccgttcatttctgacacgttttgctgcctcctacctttctaagcgtcatgcaaattcgagaatggagaaggacgctgccggtccctgagcggtgtggagagggcggaaggtggactccagcgcagcttgaggggctgaggacggaggctgcagcatctgtgtcgttctactgagcacgcttctctgcctcgctcctgactcagcactttgttcactggctcagcagttatgtttacacatcatttttatgttcctgctttgtaattcatgtttgagatgggtggccactgtacagatatttattacgctttccagactttctgaatagatttttttgaataaacatggttttatgaagtgtaatctttttctagcctaacaat

SEQ ID NO: 294072 - DNA, 2036 bp, Homo sapiens
ggccggcgctggtactcggcacgaggcggagaaggaggcggagggagcgattgtggccccggccgcggtggccggcgcggcctgccctttgtgaccgcagctcgcgccccacgccccgcgcccatggccgccgtgccgggctccctggccacgcgtgcccgcccgcggacctgagccccgcgcctgggatgccggggatgcgcgtcccccggccctgcggctgctccgggctgggcgcggggcgatggacctgagcatgaagaagttcgccgtgcgcaggttcttctctgtgtacctgcgcaggaagtcgcgctccaagagctccagcctgagccggctcgaggaagaaggtgtcgtgaaggagatagacatcagccatcatgtgaaggagggctttgagaaggcagatccttcccagtttgagctgctgaaggttttaggacaaggatcctatggaaaggtgttcctggtgaggaaggtgaaggggtccgacgctgggcagctctacgccatgaaggtccttaagaaagccaccctaaaagttcgggaccgagtgagatcgaagatggagagagacatcttggcagaagtgaatcaccccttcattgtgaagcttcattatgcctttcagacggaaggaaagctctacctgatcctggacttcctgcggggaggggacctcttcacccggctctccaaagaggtcatgttcacggaggaggatgtcaagttctacctggctgagctggccttggctttagaccatctccacagcctggggatcatctacagagatctgaagcctgagaacatcctcctggatgaagaggggcacattaagatcacagatttcggcctgagtaaggaggccattgaccacgacaagagagcgtactccttctgcgggacgatcgagtacatggcgcccgaggtggtgaaccggcgaggacacacgcagagtgccgactggtggtccttcggcgtgctcatgtttgagatgctcacggggtccctgccgttccaggggaaggacaggaaggagaccatggctctcatcctcaaagccaagctggggatgccgcagttcctcagtggggaggcacagagtttgctgcgagctctcttcaaacggaacccctgcaaccggctgggtgctggcattgacggagtggaggaaattaagcgccatcccttctttgtgaccatagactggaacacgctgtaccggaaggagatcaagccaccgttcaaaccagcagtgggcaggcctgaggacaccttccactttgaccccgagttcacagcgcggacgcccacagactctcctggcgtccccccgagtgcaaacgctcatcacctgtttagaggattcagctttgtggcctcaagcctgatccaggagccctcacagcaagatctgcacaaagtcccagttcacccaatcgtgcagcagttacacgggaacaacatccacttcaccgatggctacgagatcaaggaggacatcggggtgggctcctactcagtgtgcaagcgatgtgtgcataaagccacagacaccgagtatgccgtgaagcccctcccagcaggcatgcggcggaggacggtcatcagcaataagatgtagcatgtgccttctgcccactaccgggtccccgagcccatctcacaggctcccacccaccagccaaaacttggctctcaactctcccactgcaaacctctccccggtctttcaacacaggctagtttcctattgtttaggaatgcaacacattaccccacatctagtggcttaaaacaacctgagcttattgtcttccagctctggatgtcagaattctgaaatctgtctcactgggctaaagtccagtgtccccaaggctggttccttccgcgggctctgggggctgagagtggatacacagcagatggtggccaggctgggtgcccgacagaagtctgacccacacctgcagccagcccctttatctacaatacatagctcgggaggccagcagctgtgtcaggcttgc

SEQ ID NO: 294073 - DNA, 1265 bp, Homo sapiens
ggccggcgctggtactcggcacgaggcggagaaggaggcggagggagcgattgtggccccggccgcggtggccggcgcggcctgccctttgtgaccgcagctcgcgccccacgccccgcgcccatggccgccgtgccgggctccctggccacgcgtgcccgcccgcggacctgagccccgcgcctgggatgccggggatgcgcgtcccccggccctgcggctgctccgggctgggcgcggggcgatggacctgagcatgaagaagttcgccgtgcgcaggttcttctctgtgtacctgcgcaggaagtcgcgctccaagagctccagcctgagccggctcgaggaagaaggtgtcgtgaaggagatagacatcagccatcatgtgaaggagggctttgagaaggcagatccttcccagtttgagctgctgaaggttttaggacaaggatcctatggaaaggtgttcctggtgaggaaggtgaaggggtccgacgctgggcagctctacgccatgaaggtccttaagaaagccaccctaaaagttcgggaccgagtgagatcgaagatggagagagacatcttggcagaagtgaatcaccccttcattgtgaagcttcattatgcctttcagacggaaggaaagctctacctgatcctggacttcctgcggggaggggacctcttcacccggctctccaaagaggtcatgttcacggaggaggatgtcaagttctacctggctgagctggccttggctttagaccatctccacagcctggggatcatctacagagatctgaagcctgagaacatcctcctggatgaagaggggcacattaagatcacagatttcggcctgagtaaggaggccattgaccacgacaagagagcgtactccttctgcgggacgatcgagtacatggcgcccgaggtggtgaaccggcgaggacacacgcagagtgccgactggtggtccttcggcgtgctcatgtttgagatgctcacggggtccctgccgttccaggggaaggacaggaaggagaccatggctctcatcctcaaagccaagctggggatgccgcagttcctcagtggggaggcacagagtttgctgcgagctctcttcaaacggaacccctgcaaccggctgggtgagaaaacggccctctgcccccgtgtgagttgctccaggctcctaggcttctgagtctaagactggcatttctcccacctccacatcccctgaagataaaatgtcttcgttc

SEQ ID NO: 294074 - DNA, 3685 bp, Homo sapiens
gaagagccgcggcgtaacggcagccatcttgtttgtttgagtgaatcggaaaggaggcgccggctgtggcggcggcgggagctgctcggaagctacacctcgcaagggctcccccctttccccaccccctcccccgacccttttcccctccccgggccacccagcccgcccaactcccagcggagagcaaggttttcttctgttttcatagccagccagaacaatgttctacgcacattttgttctcagtaaaagagggcctctggccaaaatttggctagcggcccattgggataagaagctaaccaaagcccatgtgttcgagtgtaatttagagagcagcgtggagagtatcatctcaccaaaggtgaaaatggcattacggacatcaggacatctcttactgggagtagttcgaatctatcacaggaaagccaaataccttcttgcagactgtaatgaagcattcattaagataaagatggcttttcggccaggtgtggttgacctgcctgaggaaaatcgggaagcagcttataatgccattactttacctgaagaatttcatgactttgatcagccactgcctgacttagatgacatcgatgtggcccagcagttcagcttgaatcagagtagagtggaagagataaccatgagagaagaagttgggaacatcagtattttacaagaaaatgattttggtgattttggaatggatgatcgtgagataatgagagaaggcagtgcttttgaggatgacgacatgttagtaagcactactacttctaacctcctattagagtctgaacagagcaccagcaatctgaatgagaaaattaaccatttagaatatgaagatcaatataaggatgataattttggagaaggaaatgatggtggaatattagatgacaaacttattagtaataatgatggcggtatctttgatgatccccctgccctctctgaggcaggggtgatgttgccagagcagcctgcacatgacgatatggatgaggatgataatgtatcaatgggtgggcctgatagtcctgattcagtggatcccgttgaaccaatgccaaccatgactgatcaaacaacacttgttccaaatgaggaagaagcatttgcattggagcctattgatataactgttaaagaaacaaaagccaagaggaagaggaagctaattgttgacagtgtcaaagagttggatagcaagacaattagagcccaacttagtgattattcagatattgttactactttggatctggcaccgcccaccaagaaattgatgatgtggaaagagacaggaggagtagaaaaactgttttctttacctgctcagcctttgtggaataacagactactgaagctctttacacgctgtcttacaccgcttgtaccagaagaccttagaaaaaggaggaaaggaggagaggcagataatttggatgaattcctcaaagaatttgaaaatccagaggttcctagagaggaccagcaacagcagcatcagcagcgtgatgttatcgatgagcccattattgaagagccaagccgcctccaggagtcagtgatggaggccagcagaacaaacatagatgagtcagctatgcctccaccaccacctcagggagttaagcgaaaagctggacaaattgacccagagcctgtgatgcctcctcagcaggtagagcagatggaaataccacctgtagagcttcccccagaagaacctccaaatatctgtcagctaataccagagttagaacttctgccagaaaaagagaaggagaaagagaaggaaaaagaagatgatgaagaggaagaggatgaagatgcatcagggggcgatcaagatcaggaagaaagaagatggaacaaaaggactcagcagatgcttcatggtcttcagcgtgctcttgctaaaactggagctgaatctatcagtttgcttgagttatgtcgaaatacgaacagaaaacaagctgccgcaaagttctacagcttcttggttcttaaaaagcagcaagctattgagctgacacaggaagaaccgtacagtgacatcatcgcaacacctggaccaaggttccatattatataaggagctagaagcattatagctagtgtttgattcactagtgcttacaaattgcccccatgtgtaggggacacagaaccctttgagaaaacttagatttttgtctgtacaaagtctttgcctttttccttcttcatttttttccagtacattaaatttgtcaatttcatctttgagggaaactgattagatgggttgtgtttgtgttctgatggagaaaacagcaccccaaggactcagaagatgattttaacagttcagaacagatgtgtgcaatattggtgcatgtaataatgttgagtggcagtcaaaagtcatgatttttatcttagttcttcattactgcattgaaaaggaaaacctgtctgagaaaatgcctgacagtttaatttaaaactatggtgtaagtctttgacaagaaaaaaaaacaaacaaacacttctttccatcagtaacactggcaatcttcctgttaaccactctccttagggatggtatctgaaacaacaatggtcaccctcttgagattcgttttaagtgtaattccataatgagcagaggtgtacgcgaaattgtgttatgactgatagccttcagctacaaaaagataggactgacctggtttaaagtgttctattttgtaaatcattccatttgagtctttctgatgaacttggctatactgaaatctgttattttagtgaggctccaaaatgagcaaagctaggcctgattagagtagagtgactattaaaaaacataactttctaggagctataaatcaaagttttaaaaagatgtttggatatatttgagtattccgatcatgaaaacagaaattgccctgcctactacaaggacagactgatgggaaattatgcacctggtcaacttagcttttaagcagacgatgctgtaaaaactaacggcttctctgatatttattgtaagttttagtactgatctccttttccagtgctgcacactcctggtttggaactttaatagcgttgcaacgaaatcctatatccagtttcctgtaatttaattgaagaaaaatacatccaaataaagactttattattaacagaccagatagcatcagaaatcatgtgactgttatgattatcagaatgtcttaactttttagggcaaagttaacactgaaagttctagcttaagtgttgaaacttttgtgggaaaaaaaaatcacttttgaaactcagacttcagtgtatacccaataatttaaaattatgtgaaatgttttaaatttgtgaactcgtaattactgttttaatgattcagtttcttcagagtggtaattgtataaaattgctattgcagctttatattcaatatgatgtgcctgtaaaccaaggagttttccccgtttgtaaaaagacattgtagataattgaatgtttgattttagaaaggtcattagtttcttgttacacattttgttagtctggtttttgttgcttatcgggtttaatattgttcttgaaaatagttgatgctatgttatgtataacttttctaataaaagttgtgttataagctgta

SEQ ID NO: 294075 - DNA, 2546 bp, Homo sapiens
gttgtgaatgagtattaaaatagttgtggtttctgttatggctggtatatagtttcaccatagcctgggaacatcacaactgctgccttgcacccaccttggactttaaaaagtcatttaggcagcatgtggctgagaactaggttgctcaagtgaaatatataataaggagtatagcccattcattttaaaacaccatataaatcaacttaggtagtctgcaggctctttggtactgctccacaatgagattaagagtctgccagaacattagtcatctagaaaatcatgttgcaatatttatgtatgtatatttagttgaaataaacagtatatttagtggtacagttgatttatatcctgaagttctttaagaggggccagtaaccaaaacctccatgatcagcagcagtccacagaccacatagtgtgtgtagatagcatccttatagcgcaatatagaagcatactttcagccaaatgtttgcttgcacatagaggactttgccttgtaatttaagaaaaacagactcttcagtttgtactctaaatgctaagtgattgctcagcagcattaagtacagttttctattagttcaaaatacacaatctcaaggtaatttaggagcttttaggagatgtagaaatacttcatttttcattggacttgttttgtcagctttttgggggtcatttttattcaggatgaagatgcatcagggggcgatcaagatcaggaagaaagaagatggaacaaaaggactcagcagatgcttcatggtcttcagcgtgctcttgctaaaactggagctgaatctatcagtttgcttgagttatgtcgaaatacgaacagaaaacaagctgccgcaaagttctacagcttcttggttcttaaaaagcagcaagctattgagctgacacaggaagaaccgtacagtgacatcatcgcaacacctggaccaaggttccatattatataaggagctagaagcattatagctagtgtttgattcactagtgcttacaaattgcccccatgtgtaggggacacagaaccctttgagaaaacttagatttttgtctgtacaaagtctttgcctttttccttcttcatttttttccagtacattaaatttgtcaatttcatctttgagggaaactgattagatgggttgtgtttgtgttctgatggagaaaacagcaccccaaggactcagaagatgattttaacagttcagaacagatgtgtgcaatattggtgcatgtaataatgttgagtggcagtcaaaagtcatgatttttatcttagttcttcattactgcattgaaaaggaaaacctgtctgagaaaatgcctgacagtttaatttaaaactatggtgtaagtctttgacaagaaaaaaaaacaaacaaacacttctttccatcagtaacactggcaatcttcctgttaaccactctccttagggatggtatctgaaacaacaatggtcaccctcttgagattcgttttaagtgtaattccataatgagcagaggtgtacgcgaaattgtgttatgactgatagccttcagctacaaaaagataggactgacctggtttaaagtgttctattttgtaaatcattccatttgagtctttctgatgaacttggctatactgaaatctgttattttagtgaggctccaaaatgagcaaagctaggcctgattagagtagagtgactattaaaaaacataactttctaggagctataaatcaaagttttaaaaagatgtttggatatatttgagtattccgatcatgaaaacagaaattgccctgcctactacaaggacagactgatgggaaattatgcacctggtcaacttagcttttaagcagacgatgctgtaaaaactaacggcttctctgatatttattgtaagttttagtactgatctccttttccagtgctgcacactcctggtttggaactttaatagcgttgcaacgaaatcctatatccagtttcctgtaatttaattgaagaaaaatacatccaaataaagactttattattaacagaccagatagcatcagaaatcatgtgactgttatgattatcagaatgtcttaactttttagggcaaagttaacactgaaagttctagcttaagtgttgaaacttttgtgggaaaaaaaaatcacttttgaaactcagacttcagtgtatacccaataatttaaaattatgtgaaatgttttaaatttgtgaactcgtaattactgttttaatgattcagtttcttcagagtggtaattgtataaaattgctattgcagctttatattcaatatgatgtgcctgtaaaccaaggagttttccccgtttgtaaaaagacattgtagataattgaatgtttgattttagaaaggtcattagtttcttgttacacattttgttagtctggtttttgttgcttatcgggtttaatattgttcttgaaaatagttgatgctatgttatgtataacttttctaataaaagttgtgttataagctgta

SEQ ID NO: 294076 - DNA, 842 bp, Homo sapiens
gttgtgaatgagtattaaaatagttgtggtttctgttatggctggtatatagtttcaccatagcctgggaacatcacaactgctgccttgcacccaccttggactttaaaaagtcatttaggcagcatgtggctgagaactaggttgctcaagtgaaatatataataaggagtatagcccattcattttaaaacaccatataaatcaacttaggtagtctgcaggctctttggtactgctccacaatgagattaagagtctgccagaacattagtcatctagaaaatcatgttgcaatatttatgtatgtatatttagttgaaataaacagtatatttagtggtacagttgatttatatcctgaagttctttaagaggggccagtaaccaaaacctccatgatcagcagcagtccacagaccacatagtgtgtgtagatagcatccttatagcgcaatatagaagcatactttcagccaaatgtttgcttgcacatagaggactttgccttgtaatttaagaaaaacagactcttcagtttgtactctaaatgctaagtgattgctcagcagcattaagtacagttttctattagttcaaaatacacaatctcaaggtaatttaggagcttttaggagatgtagaaatacttcatttttcattggacttgttttgtcagctttttgggggtcatttttattcaggatgaagatgcatcagggggcgatcaagatcaggaagaaagaagatggaacaaaaggactcagcagatgcttcatggtcttcaggtattgccactgttgtctcagaggaaaatgcttcatcaaaggcttttgccattg

SEQ ID NO: 294077 - DNA, 3561 bp, Homo sapiens
ccccttcgccccgggcccgccctcggcccggacccatgcagcttgggcccgcatcatcgcttgttcggttttcttctgttttcatagccagccagaacaatgttctacgcacattttgttctcagtaaaagagggcctctggccaaaatttggctagcggcccattgggataagaagctaaccaaagcccatgtgttcgagtgtaatttagagagcagcgtggagagtatcatctcaccaaaggtgaaaatggcattacggacatcaggacatctcttactgggagtagttcgaatctatcacaggaaagccaaataccttcttgcagactgtaatgaagcattcattaagataaagatggcttttcggccaggtgtggttgacctgcctgaggaaaatcgggaagcagcttataatgccattactttacctgaagaatttcatgactttgatcagccactgcctgacttagatgacatcgatgtggcccagcagttcagcttgaatcagagtagagtggaagagataaccatgagagaagaagttgggaacatcagtattttacaagaaaatgattttggtgattttggaatggatgatcgtgagataatgagagaaggcagtgcttttgaggatgacgacatgttagtaagcactactacttctaacctcctattagagtctgaacagagcaccagcaatctgaatgagaaaattaaccatttagaatatgaagatcaatataaggatgataattttggagaaggaaatgatggtggaatattagatgacaaacttattagtaataatgatggcggtatctttgatgatccccctgccctctctgaggcaggggtgatgttgccagagcagcctgcacatgacgatatggatgaggatgataatgtatcaatgggtgggcctgatagtcctgattcagtggatcccgttgaaccaatgccaaccatgactgatcaaacaacacttgttccaaatgaggaagaagcatttgcattggagcctattgatataactgttaaagaaacaaaagccaagaggaagaggaagctaattgttgacagtgtcaaagagttggatagcaagacaattagagcccaacttagtgattattcagatattgttactactttggatctggcaccgcccaccaagaaattgatgatgtggaaagagacaggaggagtagaaaaactgttttctttacctgctcagcctttgtggaataacagactactgaagctctttacacgctgtcttacaccgcttgtaccagaagaccttagaaaaaggaggaaaggaggagaggcagataatttggatgaattcctcaaagaatttgaaaatccagaggttcctagagaggaccagcaacagcagcatcagcagcgtgatgttatcgatgagcccattattgaagagccaagccgcctccaggagtcagtgatggaggccagcagaacaaacatagatgagtcagctatgcctccaccaccacctcagggagttaagcgaaaagctggacaaattgacccagagcctgtgatgcctcctcagcaggtagagcagatggaaataccacctgtagagcttcccccagaagaacctccaaatatctgtcagctaataccagagttagaacttctgccagaaaaagagaaggagaaagagaaggaaaaagaagatgatgaagaggaagaggatgaagatgcatcagggggcgatcaagatcaggaagaaagaagatggaacaaaaggactcagcagatgcttcatggtcttcagcgtgctcttgctaaaactggagctgaatctatcagtttgcttgagttatgtcgaaatacgaacagaaaacaagctgccgcaaagttctacagcttcttggttcttaaaaagcagcaagctattgagctgacacaggaagaaccgtacagtgacatcatcgcaacacctggaccaaggttccatattatataaggagctagaagcattatagctagtgtttgattcactagtgcttacaaattgcccccatgtgtaggggacacagaaccctttgagaaaacttagatttttgtctgtacaaagtctttgcctttttccttcttcatttttttccagtacattaaatttgtcaatttcatctttgagggaaactgattagatgggttgtgtttgtgttctgatggagaaaacagcaccccaaggactcagaagatgattttaacagttcagaacagatgtgtgcaatattggtgcatgtaataatgttgagtggcagtcaaaagtcatgatttttatcttagttcttcattactgcattgaaaaggaaaacctgtctgagaaaatgcctgacagtttaatttaaaactatggtgtaagtctttgacaagaaaaaaaaacaaacaaacacttctttccatcagtaacactggcaatcttcctgttaaccactctccttagggatggtatctgaaacaacaatggtcaccctcttgagattcgttttaagtgtaattccataatgagcagaggtgtacgcgaaattgtgttatgactgatagccttcagctacaaaaagataggactgacctggtttaaagtgttctattttgtaaatcattccatttgagtctttctgatgaacttggctatactgaaatctgttattttagtgaggctccaaaatgagcaaagctaggcctgattagagtagagtgactattaaaaaacataactttctaggagctataaatcaaagttttaaaaagatgtttggatatatttgagtattccgatcatgaaaacagaaattgccctgcctactacaaggacagactgatgggaaattatgcacctggtcaacttagcttttaagcagacgatgctgtaaaaactaacggcttctctgatatttattgtaagttttagtactgatctccttttccagtgctgcacactcctggtttggaactttaatagcgttgcaacgaaatcctatatccagtttcctgtaatttaattgaagaaaaatacatccaaataaagactttattattaacagaccagatagcatcagaaatcatgtgactgttatgattatcagaatgtcttaactttttagggcaaagttaacactgaaagttctagcttaagtgttgaaacttttgtgggaaaaaaaaatcacttttgaaactcagacttcagtgtatacccaataatttaaaattatgtgaaatgttttaaatttgtgaactcgtaattactgttttaatgattcagtttcttcagagtggtaattgtataaaattgctattgcagctttatattcaatatgatgtgcctgtaaaccaaggagttttccccgtttgtaaaaagacattgtagataattgaatgtttgattttagaaaggtcattagtttcttgttacacattttgttagtctggtttttgttgcttatcgggtttaatattgttcttgaaaatagttgatgctatgttatgtataacttttctaataaaagttgtgttataagctgta

SEQ ID NO: 294078 - DNA, 3614 bp, Homo sapiens
ccccttcgccccgggcccgccctcggcccggacccatgcagcttgggcccgcatcatcgcttgttcggtaacaaatgattctgatccattctgagatctacaaaggctgttaccctgcaggttttcttctgttttcatagccagccagaacaatgttctacgcacattttgttctcagtaaaagagggcctctggccaaaatttggctagcggcccattgggataagaagctaaccaaagcccatgtgttcgagtgtaatttagagagcagcgtggagagtatcatctcaccaaaggtgaaaatggcattacggacatcaggacatctcttactgggagtagttcgaatctatcacaggaaagccaaataccttcttgcagactgtaatgaagcattcattaagataaagatggcttttcggccaggtgtggttgacctgcctgaggaaaatcgggaagcagcttataatgccattactttacctgaagaatttcatgactttgatcagccactgcctgacttagatgacatcgatgtggcccagcagttcagcttgaatcagagtagagtggaagagataaccatgagagaagaagttgggaacatcagtattttacaagaaaatgattttggtgattttggaatggatgatcgtgagataatgagagaaggcagtgcttttgaggatgacgacatgttagtaagcactactacttctaacctcctattagagtctgaacagagcaccagcaatctgaatgagaaaattaaccatttagaatatgaagatcaatataaggatgataattttggagaaggaaatgatggtggaatattagatgacaaacttattagtaataatgatggcggtatctttgatgatccccctgccctctctgaggcaggggtgatgttgccagagcagcctgcacatgacgatatggatgaggatgataatgtatcaatgggtgggcctgatagtcctgattcagtggatcccgttgaaccaatgccaaccatgactgatcaaacaacacttgttccaaatgaggaagaagcatttgcattggagcctattgatataactgttaaagaaacaaaagccaagaggaagaggaagctaattgttgacagtgtcaaagagttggatagcaagacaattagagcccaacttagtgattattcagatattgttactactttggatctggcaccgcccaccaagaaattgatgatgtggaaagagacaggaggagtagaaaaactgttttctttacctgctcagcctttgtggaataacagactactgaagctctttacacgctgtcttacaccgcttgtaccagaagaccttagaaaaaggaggaaaggaggagaggcagataatttggatgaattcctcaaagaatttgaaaatccagaggttcctagagaggaccagcaacagcagcatcagcagcgtgatgttatcgatgagcccattattgaagagccaagccgcctccaggagtcagtgatggaggccagcagaacaaacatagatgagtcagctatgcctccaccaccacctcagggagttaagcgaaaagctggacaaattgacccagagcctgtgatgcctcctcagcaggtagagcagatggaaataccacctgtagagcttcccccagaagaacctccaaatatctgtcagctaataccagagttagaacttctgccagaaaaagagaaggagaaagagaaggaaaaagaagatgatgaagaggaagaggatgaagatgcatcagggggcgatcaagatcaggaagaaagaagatggaacaaaaggactcagcagatgcttcatggtcttcagcgtgctcttgctaaaactggagctgaatctatcagtttgcttgagttatgtcgaaatacgaacagaaaacaagctgccgcaaagttctacagcttcttggttcttaaaaagcagcaagctattgagctgacacaggaagaaccgtacagtgacatcatcgcaacacctggaccaaggttccatattatataaggagctagaagcattatagctagtgtttgattcactagtgcttacaaattgcccccatgtgtaggggacacagaaccctttgagaaaacttagatttttgtctgtacaaagtctttgcctttttccttcttcatttttttccagtacattaaatttgtcaatttcatctttgagggaaactgattagatgggttgtgtttgtgttctgatggagaaaacagcaccccaaggactcagaagatgattttaacagttcagaacagatgtgtgcaatattggtgcatgtaataatgttgagtggcagtcaaaagtcatgatttttatcttagttcttcattactgcattgaaaaggaaaacctgtctgagaaaatgcctgacagtttaatttaaaactatggtgtaagtctttgacaagaaaaaaaaacaaacaaacacttctttccatcagtaacactggcaatcttcctgttaaccactctccttagggatggtatctgaaacaacaatggtcaccctcttgagattcgttttaagtgtaattccataatgagcagaggtgtacgcgaaattgtgttatgactgatagccttcagctacaaaaagataggactgacctggtttaaagtgttctattttgtaaatcattccatttgagtctttctgatgaacttggctatactgaaatctgttattttagtgaggctccaaaatgagcaaagctaggcctgattagagtagagtgactattaaaaaacataactttctaggagctataaatcaaagttttaaaaagatgtttggatatatttgagtattccgatcatgaaaacagaaattgccctgcctactacaaggacagactgatgggaaattatgcacctggtcaacttagcttttaagcagacgatgctgtaaaaactaacggcttctctgatatttattgtaagttttagtactgatctccttttccagtgctgcacactcctggtttggaactttaatagcgttgcaacgaaatcctatatccagtttcctgtaatttaattgaagaaaaatacatccaaataaagactttattattaacagaccagatagcatcagaaatcatgtgactgttatgattatcagaatgtcttaactttttagggcaaagttaacactgaaagttctagcttaagtgttgaaacttttgtgggaaaaaaaaatcacttttgaaactcagacttcagtgtatacccaataatttaaaattatgtgaaatgttttaaatttgtgaactcgtaattactgttttaatgattcagtttcttcagagtggtaattgtataaaattgctattgcagctttatattcaatatgatgtgcctgtaaaccaaggagttttccccgtttgtaaaaagacattgtagataattgaatgtttgattttagaaaggtcattagtttcttgttacacattttgttagtctggtttttgttgcttatcgggtttaatattgttcttgaaaatagttgatgctatgttatgtataacttttctaataaaagttgtgttataagctgta

SEQ ID NO: 294079 - DNA, 3374 bp, Homo sapiens
  misc_feature (9)..(9): n is a, c, g, or t
tgagcacgngctgcgcacgctcaacattggacagtgtgtggtatcatctcaccaaagtgaaaatggcattacggacatcaggacatctcttactgggagtagttcgaatctatcacaggaaagccaaataccttcttgcagactgtaatgaagcattcattaagataaagatggcttttcggccaggtgtggttgacctgcctgaggaaaatcgggaagcagcttataatgccattactttacctgaagaatttcatgactttgatcagccactgcctgacttagatgacatcgatgtggcccagcagttcagcttgaatcagagtagagtggaagagataaccatgagagaagaagttgggaacatcagtattttacaagaaaatgattttggtgattttggaatggatgatcgtgagataatgagagaaggcagtgcttttgaggatgacgacatgttagtaagcactactacttctaacctcctattagagtctgaacagagcaccagcaatctgaatgagaaaattaaccatttagaatatgaagatcaatataaggatgataattttggagaaggaaatgatggtggaatattagatgacaaacttattagtaataatgatggcggtatctttgatgatccccctgccctctctgaggcaggggtgatgttgccagagcagcctgcacatgacgatatggatgaggatgataatgtatcaatgggtgggcctgatagtcctgattcagtggatcccgttgaaccaatgccaaccatgactgatcaaacaacacttgttccaaatgaggaagaagcatttgcattggagcctattgatataactgttaaagaaacaaaagccaagaggaagaggaagctaattgttgacagtgtcaaagagttggatagcaagacaattagagcccaacttagtgattattcagatattgttactactttggatctggcaccgcccaccaagaaattgatgatgtggaaagagacaggaggagtagaaaaactgttttctttacctgctcagcctttgtggaataacagactactgaagctctttacacgctgtcttacaccgcttgtaccagaagaccttagaaaaaggaggaaaggaggagaggcagataatttggatgaattcctcaaagaatttgaaaatccagaggttcctagagaggaccagcaacagcagcatcagcagcgtgatgttatcgatgagcccattattgaagagccaagccgcctccaggagtcagtgatggaggccagcagaacaaacatagatgagtcagctatgcctccaccaccacctcagggagttaagcgaaaagctggacaaattgacccagagcctgtgatgcctcctcagcaggtagagcagatggaaataccacctgtagagcttcccccagaagaacctccaaatatctgtcagctaataccagagttagaacttctgccagaaaaagagaaggagaaagagaaggaaaaagaagatgatgaagaggaagaggatgaagatgcatcagggggcgatcaagatcaggaagaaagaagatggaacaaaaggactcagcagatgcttcatggtcttcagcgtgctcttgctaaaactggagctgaatctatcagtttgcttgagttatgtcgaaatacgaacagaaaacaagctgccgcaaagttctacagcttcttggttcttaaaaagcagcaagctattgagctgacacaggaagaaccgtacagtgacatcatcgcaacacctggaccaaggttccatattatataaggagctagaagcattatagctagtgtttgattcactagtgcttacaaattgcccccatgtgtaggggacacagaaccctttgagaaaacttagatttttgtctgtacaaagtctttgcctttttccttcttcatttttttccagtacattaaatttgtcaatttcatctttgagggaaactgattagatgggttgtgtttgtgttctgatggagaaaacagcaccccaaggactcagaagatgattttaacagttcagaacagatgtgtgcaatattggtgcatgtaataatgttgagtggcagtcaaaagtcatgatttttatcttagttcttcattactgcattgaaaaggaaaacctgtctgagaaaatgcctgacagtttaatttaaaactatggtgtaagtctttgacaagaaaaaaaaacaaacaaacacttctttccatcagtaacactggcaatcttcctgttaaccactctccttagggatggtatctgaaacaacaatggtcaccctcttgagattcgttttaagtgtaattccataatgagcagaggtgtacgcgaaattgtgttatgactgatagccttcagctacaaaaagataggactgacctggtttaaagtgttctattttgtaaatcattccatttgagtctttctgatgaacttggctatactgaaatctgttattttagtgaggctccaaaatgagcaaagctaggcctgattagagtagagtgactattaaaaaacataactttctaggagctataaatcaaagttttaaaaagatgtttggatatatttgagtattccgatcatgaaaacagaaattgccctgcctactacaaggacagactgatgggaaattatgcacctggtcaacttagcttttaagcagacgatgctgtaaaaactaacggcttctctgatatttattgtaagttttagtactgatctccttttccagtgctgcacactcctggtttggaactttaatagcgttgcaacgaaatcctatatccagtttcctgtaatttaattgaagaaaaatacatccaaataaagactttattattaacagaccagatagcatcagaaatcatgtgactgttatgattatcagaatgtcttaactttttagggcaaagttaacactgaaagttctagcttaagtgttgaaacttttgtgggaaaaaaaaatcacttttgaaactcagacttcagtgtatacccaataatttaaaattatgtgaaatgttttaaatttgtgaactcgtaattactgttttaatgattcagtttcttcagagtggtaattgtataaaattgctattgcagctttatattcaatatgatgtgcctgtaaaccaaggagttttccccgtttgtaaaaagacattgtagataattgaatgtttgattttagaaaggtcattagtttcttgttacacattttgttagtctggtttttgttgcttatcgggtttaatattgttcttgaaaatagttgatgctatgttatgtataacttttctaataaaagttgtgttataagctgta

SEQ ID NO: 294080 - DNA, 2690 bp, Homo sapiens
cttgttccaaatgaggaagaagtgttgtttgatcagtcatggttggcatggttcaacgggatccactgaatcaggactatcaggcccacccattgatacatgatcaaacaacacttgttccaaatgaggaagaagcatttgcattggagcctattgatataactgttaaagaaacaaaagccaagaggaagaggaagctaattgttgacagtgtcaaagagttggatagcaagacaattagagcccaacttagtgattattcagatattgttactactttggatctggcaccgcccaccaagaaattgatgatgtggaaagagacaggaggagtagaaaaactgttttctttacctgctcagcctttgtggaataacagactactgaagctctttacacgctgtcttacaccgcttgtaccagaagaccttagaaaaaggaggaaaggaggagaggcagataatttggatgaattcctcaaagaatttgaaaatccagaggttcctagagaggaccagcaacagcagcatcagcagcgtgatgttatcgatgagcccattattgaagagccaagccgcctccaggagtcagtgatggaggccagcagaacaaacatagatgagtcagctatgcctccaccaccacctcagggagttaagcgaaaagctggacaaattgacccagagcctgtgatgcctcctcagcaggtagagcagatggaaataccacctgtagagcttcccccagaagaacctccaaatatctgtcagctaataccagagttagaacttctgccagaaaaagagaaggagaaagagaaggaaaaagaagatgatgaagaggaagaggatgaagatgcatcagggggcgatcaagatcaggaagaaagaagatggaacaaaaggactcagcagatgcttcatggtcttcagcgtgctcttgctaaaactggagctgaatctatcagtttgcttgagttatgtcgaaatacgaacagaaaacaagctgccgcaaagttctacagcttcttggttcttaaaaagcagcaagctattgagctgacacaggaagaaccgtacagtgacatcatcgcaacacctggaccaaggttccatattatataaggagctagaagcattatagctagtgtttgattcactagtgcttacaaattgcccccatgtgtaggggacacagaaccctttgagaaaacttagatttttgtctgtacaaagtctttgcctttttccttcttcatttttttccagtacattaaatttgtcaatttcatctttgagggaaactgattagatgggttgtgtttgtgttctgatggagaaaacagcaccccaaggactcagaagatgattttaacagttcagaacagatgtgtgcaatattggtgcatgtaataatgttgagtggcagtcaaaagtcatgatttttatcttagttcttcattactgcattgaaaaggaaaacctgtctgagaaaatgcctgacagtttaatttaaaactatggtgtaagtctttgacaagaaaaaaaaacaaacaaacacttctttccatcagtaacactggcaatcttcctgttaaccactctccttagggatggtatctgaaacaacaatggtcaccctcttgagattcgttttaagtgtaattccataatgagcagaggtgtacgcgaaattgtgttatgactgatagccttcagctacaaaaagataggactgacctggtttaaagtgttctattttgtaaatcattccatttgagtctttctgatgaacttggctatactgaaatctgttattttagtgaggctccaaaatgagcaaagctaggcctgattagagtagagtgactattaaaaaacataactttctaggagctataaatcaaagttttaaaaagatgtttggatatatttgagtattccgatcatgaaaacagaaattgccctgcctactacaaggacagactgatgggaaattatgcacctggtcaacttagcttttaagcagacgatgctgtaaaaactaacggcttctctgatatttattgtaagttttagtactgatctccttttccagtgctgcacactcctggtttggaactttaatagcgttgcaacgaaatcctatatccagtttcctgtaatttaattgaagaaaaatacatccaaataaagactttattattaacagaccagatagcatcagaaatcatgtgactgttatgattatcagaatgtcttaactttttagggcaaagttaacactgaaagttctagcttaagtgttgaaacttttgtgggaaaaaaaaatcacttttgaaactcagacttcagtgtatacccaataatttaaaattatgtgaaatgttttaaatttgtgaactcgtaattactgttttaatgattcagtttcttcagagtggtaattgtataaaattgctattgcagctttatattcaatatgatgtgcctgtaaaccaaggagttttccccgtttgtaaaaagacattgtagataattgaatgtttgattttagaaaggtcattagtttcttgttacacattttgttagtctggtttttgttgcttatcgggtttaatattgttcttgaaaatagttgatgctatgttatgtataacttttctaataaaagttgtgttataagctgta

SEQ ID NO: 294081 - DNA, 2790 bp, Homo sapiens
  misc_feature (181)..(181): n is a, c, g, or t
tcatagctgactcatctatgtttgttctgctggcctccatcactgactcctggaggcggcttggctcttcaataatgggctcatcgataacatcaccctcttgtgattcgttttaagtgtaattccataatgagcagaggtgtacgcgaaattgtgttatgactgatagccttcagctacnaaaagataggactggcctggtttaaagtgttctattttgtaaatcattccatttgagtctttctgatgaacttggctataactgttaaagaaacaaaagccaagaggaagaggaagctaattgttgacagtgtcaaagagttggatagcaagacaattagagcccaacttagtgattattcagatattgttactactttggatctggcaccgcccaccaagaaattgatgatgtggaaagagacaggaggagtagaaaaactgttttctttacctgctcagcctttgtggaataacagactactgaagctctttacacgctgtcttacaccgcttgtaccagaagaccttagaaaaaggaggaaaggaggagaggcagataatttggatgaattcctcaaagaatttgaaaatccagaggttcctagagaggaccagcaacagcagcatcagcagcgtgatgttatcgatgagcccattattgaagagccaagccgcctccaggagtcagtgatggaggccagcagaacaaacatagatgagtcagctatgcctccaccaccacctcagggagttaagcgaaaagctggacaaattgacccagagcctgtgatgcctcctcagcaggtagagcagatggaaataccacctgtagagcttcccccagaagaacctccaaatatctgtcagctaataccagagttagaacttctgccagaaaaagagaaggagaaagagaaggaaaaagaagatgatgaagaggaagaggatgaagatgcatcagggggcgatcaagatcaggaagaaagaagatggaacaaaaggactcagcagatgcttcatggtcttcagcgtgctcttgctaaaactggagctgaatctatcagtttgcttgagttatgtcgaaatacgaacagaaaacaagctgccgcaaagttctacagcttcttggttcttaaaaagcagcaagctattgagctgacacaggaagaaccgtacagtgacatcatcgcaacacctggaccaaggttccatattatataaggagctagaagcattatagctagtgtttgattcactagtgcttacaaattgcccccatgtgtaggggacacagaaccctttgagaaaacttagatttttgtctgtacaaagtctttgcctttttccttcttcatttttttccagtacattaaatttgtcaatttcatctttgagggaaactgattagatgggttgtgtttgtgttctgatggagaaaacagcaccccaaggactcagaagatgattttaacagttcagaacagatgtgtgcaatattggtgcatgtaataatgttgagtggcagtcaaaagtcatgatttttatcttagttcttcattactgcattgaaaaggaaaacctgtctgagaaaatgcctgacagtttaatttaaaactatggtgtaagtctttgacaagaaaaaaaaacaaacaaacacttctttccatcagtaacactggcaatcttcctgttaaccactctccttagggatggtatctgaaacaacaatggtcaccctcttgagattcgttttaagtgtaattccataatgagcagaggtgtacgcgaaattgtgttatgactgatagccttcagctacaaaaagataggactgacctggtttaaagtgttctattttgtaaatcattccatttgagtctttctgatgaacttggctatactgaaatctgttattttagtgaggctccaaaatgagcaaagctaggcctgattagagtagagtgactattaaaaaacataactttctaggagctataaatcaaagttttaaaaagatgtttggatatatttgagtattccgatcatgaaaacagaaattgccctgcctactacaaggacagactgatgggaaattatgcacctggtcaacttagcttttaagcagacgatgctgtaaaaactaacggcttctctgatatttattgtaagttttagtactgatctccttttccagtgctgcacactcctggtttggaactttaatagcgttgcaacgaaatcctatatccagtttcctgtaatttaattgaagaaaaatacatccaaataaagactttattattaacagaccagatagcatcagaaatcatgtgactgttatgattatcagaatgtcttaactttttagggcaaagttaacactgaaagttctagcttaagtgttgaaacttttgtgggaaaaaaaaatcacttttgaaactcagacttcagtgtatacccaataatttaaaattatgtgaaatgttttaaatttgtgaactcgtaattactgttttaatgattcagtttcttcagagtggtaattgtataaaattgctattgcagctttatattcaatatgatgtgcctgtaaaccaaggagttttccccgtttgtaaaaagacattgtagataattgaatgtttgattttagaaaggtcattagtttcttgttacacattttgttagtctggtttttgttgcttatcgggtttaatattgttcttgaaaatagttgatgctatgttatgtataacttttctaataaaagttgtgttataagctgta

SEQ ID NO: 294082 - DNA, 3647 bp, Homo sapiens
gaagagccgcggcgtaacggcagccatcttgtttgtttgagtgaatcggaaaggaggcgccggctgtggcggcggcgggagctgctcggaagctacacctcgcaagggctcccccctttccccaccccctcccccgacccttttcccctccccgggccacccagcccgcccaactcccagcggagagcaaggttttcttctgttttcatagccagccagaacaatgttctacgcacattttgttctcagtaaaagagggcctctggccaaaatttggctagcggcccattgggataagaagctaaccaaagcccatgtgttcgagtgtaatttagagagcagcgtggagagtatcatctcaccaaaggtgaaaatggcattacggacatcaggacatctcttactgggagtagttcgaatctatcacaggaaagccaaataccttcttgcagactgtaatgaagcattcattaagataaagatggcttttcggccaggtgtggttgacctgcctgaggaaaatcgggaagcagcttataatgccattactttacctgaagaatttcatgactttgatcagccactgcctgacttagatgacatcgatgtggcccagcagttcagcttgaatcagagtagagtggaagagataaccatgagagaagaagttgggaacatcagtattttacaagaaaatgattttggtgattttggaatggatgatcgtgagataatgagagaaggcagtgcttttgaggatgacgacatgttagtaagcactactacttctaacctcctattagagtctgaacagagcaccagcaatctgaatgagaaaattaaccatttagaatatgaagatcaatataaggatgataattttggagaaggaaatgatggtggaatattagatgacaaacttattagtaataatgatggcggtatctttgatgatccccctgccctctctgaggcaggggtgatgttgccagagcagcctgcacatgacgatatggatgaggatgataatgtatcaatgggtgggcctgatagtcctgattcagtggatcccgttgaaccaatgccaaccatgactgatcaaacaacacttgttccaaatgaggaagaagcatttgcattggagcctattgatataactgttaaagaaacaaaagccaagaggaagaggaagctaattgttgacagtgtcaaagagttggatagcaagacaattagagcccaacttagtgattattcagatattgttactactttggatctggcaccgcccaccaagaaattgatgatgtggaaagagacaggaggagtagaaaaactgttttctttacctgctcagcctttgtggaataacagactactgaagctctttacacgctgtcttacaccgcttgtaccagaagaccttagaaaaaggaggaaaggaggagaggcagataatttggatgaattcctcaaagaatttgaaaatccagaggttcctagagaggaccagcaacagcagcatcagcagcgtgatgttatcgatgagcccattattgaagagccaagccgcctccaggagtcagtgatggaggccagcagaacaaacatagatgagtcagctatgcctccaccaccacctcagggagttaagcgaaaagctggacaaattgacccagagcctgtgatgcctcctcagcaggtagagcagatggaaataccacctgtagagcttcccccagaagaacctccaaatatctgtcagctaataccagagttagaacttctgccagaaaaagagaaggagaaagagaaggaaaaagaagatgatgaagaggaagaggatgaagatgcatcagggggcgatcaagatcaggaagaaagaagatggaacaaaaggactcagcagatgcttcatggtcttcagcgtgctcttgctaaaactggagctgaatctatcagtttgcttgagttatgtcgaaatacgaacagaaaacaagctgccgcaaagttctacagcttcttggttcttaaaaagcagcaagctattgagacctggaccaaggttccatattatataaggagctagaagcattatagctagtgtttgattcactagtgcttacaaattgcccccatgtgtaggggacacagaaccctttgagaaaacttagatttttgtctgtacaaagtctttgcctttttccttcttcatttttttccagtacattaaatttgtcaatttcatctttgagggaaactgattagatgggttgtgtttgtgttctgatggagaaaacagcaccccaaggactcagaagatgattttaacagttcagaacagatgtgtgcaatattggtgcatgtaataatgttgagtggcagtcaaaagtcatgatttttatcttagttcttcattactgcattgaaaaggaaaacctgtctgagaaaatgcctgacagtttaatttaaaactatggtgtaagtctttgacaagaaaaaaaaacaaacaaacacttctttccatcagtaacactggcaatcttcctgttaaccactctccttagggatggtatctgaaacaacaatggtcaccctcttgagattcgttttaagtgtaattccataatgagcagaggtgtacgcgaaattgtgttatgactgatagccttcagctacaaaaagataggactgacctggtttaaagtgttctattttgtaaatcattccatttgagtctttctgatgaacttggctatactgaaatctgttattttagtgaggctccaaaatgagcaaagctaggcctgattagagtagagtgactattaaaaaacataactttctaggagctataaatcaaagttttaaaaagatgtttggatatatttgagtattccgatcatgaaaacagaaattgccctgcctactacaaggacagactgatgggaaattatgcacctggtcaacttagcttttaagcagacgatgctgtaaaaactaacggcttctctgatatttattgtaagttttagtactgatctccttttccagtgctgcacactcctggtttggaactttaatagcgttgcaacgaaatcctatatccagtttcctgtaatttaattgaagaaaaatacatccaaataaagactttattattaacagaccagatagcatcagaaatcatgtgactgttatgattatcagaatgtcttaactttttagggcaaagttaacactgaaagttctagcttaagtgttgaaacttttgtgggaaaaaaaaatcacttttgaaactcagacttcagtgtatacccaataatttaaaattatgtgaaatgttttaaatttgtgaactcgtaattactgttttaatgattcagtttcttcagagtggtaattgtataaaattgctattgcagctttatattcaatatgatgtgcctgtaaaccaaggagttttccccgtttgtaaaaagacattgtagataattgaatgtttgattttagaaaggtcattagtttcttgttacacattttgttagtctggtttttgttgcttatcgggtttaatattgttcttgaaaatagttgatgctatgttatgtataacttttctaataaaagttgtgttataagctgta

SEQ ID NO: 294083 - DNA, 2165 bp, Homo sapiens
gcacgagcgctgctgatgctatcgatgagcccattattgaagagccaagccgcctccaggagtcagtgatggaggccagcagaacaaacatagatgagtcagctatgcctccaccaccacctcagggagttaagcgaaaagctggacaaattgacccagagcctgtgatgcctcctcagcaggtagagcagatggaaataccacctgtagagcttcccccagaagaacctccaaatatctgtcagctaataccagagttagaacttctgccagaaaaagagaaggagaaagagaaggaaaaagaagatgatgaagaggaagaggatgaagatgcatcagggggcgatcaagatcaggaagaaagaagatggaacaaaaggactcagcagatgcttcatggtcttcagcgtgctcttgctaaaactggagctgaatctatcagtttgcttgagttatgtcgaaatacgaacagaaaacaagctgccgcaaagttctacagcttcttggttcttaaaaagcagcaagctattgagctgacacaggaagaaccgtacagtgacatcatcgcaacacctggaccaaggttccatattatataaggagctagaagcattatagctagtgtttgattcactagtgcttacaaattgcccccatgtgtaggggacacagaaccctttgagaaaacttagatttttgtctgtacaaagtctttgcctttttccttcttcatttttttccagtacattaaatttgtcaatttcatctttgagggaaactgattagatgggttgtgtttgtgttctgatggagaaaacagcaccccaaggactcagaagatgattttaacagttcagaacagatgtgtgcaatattggtgcatgtaataatgttgagtggcagtcaaaagtcatgatttttatcttagttcttcattactgcattgaaaaggaaaacctgtctgagaaaatgcctgacagtttaatttaaaactatggtgtaagtctttgacaagaaaaaaaaacaaacaaacacttctttccatcagtaacactggcaatcttcctgttaaccactctccttagggatggtatctgaaacaacaatggtcaccctcttgagattcgttttaagtgtaattccataatgagcagaggtgtacgcgaaattgtgttatgactgatagccttcagctacaaaaagataggactgacctggtttaaagtgttctattttgtaaatcattccatttgagtctttctgatgaacttggctatactgaaatctgttattttagtgaggctccaaaatgagcaaagctaggcctgattagagtagagtgactattaaaaaacataactttctaggagctataaatcaaagttttaaaaagatgtttggatatatttgagtattccgatcatgaaaacagaaattgccctgcctactacaaggacagactgatgggaaattatgcacctggtcaacttagcttttaagcagacgatgctgtaaaaactaacggcttctctgatatttattgtaagttttagtactgatctccttttccagtgctgcacactcctggtttggaactttaatagcgttgcaacgaaatcctatatccagtttcctgtaatttaattgaagaaaaatacatccaaataaagactttattattaacagaccagatagcatcagaaatcatgtgactgttatgattatcagaatgtcttaactttttagggcaaagttaacactgaaagttctagcttaagtgttgaaacttttgtgggaaaaaaaaatcacttttgaaactcagacttcagtgtatacccaataatttaaaattatgtgaaatgttttaaatttgtgaactcgtaattactgttttaatgattcagtttcttcagagtggtaattgtataaaattgctattgcagctttatattcaatatgatgtgcctgtaaaccaaggagttttccccgtttgtaaaaagacattgtagataattgaatgtttgattttagaaaggtcattagtttcttgttacacattttgttagtctggtttttgttgcttatcgggtttaatattgttcttgaaaatagttgatgctatgttatgtataacttttctaataaaagttgtgttataagctgta

SEQ ID NO: 294084 - DNA, 2165 bp, Homo sapiens
ttaggatgaggaacgtcactatcgatgagcccattattgaagagccaagccgcctccaggagtcagtgatggaggccagcagaacaaacatagatgagtcagctatgcctccaccaccacctcagggagttaagcgaaaagctggacaaattgacccagagcctgtgatgcctcctcagcaggtagagcagatggaaataccacctgtagagcttcccccagaagaacctccaaatatctgtcagctaataccagagttagaacttctgccagaaaaagagaaggagaaagagaaggaaaaagaagatgatgaagaggaagaggatgaagatgcatcagggggcgatcaagatcaggaagaaagaagatggaacaaaaggactcagcagatgcttcatggtcttcagcgtgctcttgctaaaactggagctgaatctatcagtttgcttgagttatgtcgaaatacgaacagaaaacaagctgccgcaaagttctacagcttcttggttcttaaaaagcagcaagctattgagctgacacaggaagaaccgtacagtgacatcatcgcaacacctggaccaaggttccatattatataaggagctagaagcattatagctagtgtttgattcactagtgcttacaaattgcccccatgtgtaggggacacagaaccctttgagaaaacttagatttttgtctgtacaaagtctttgcctttttccttcttcatttttttccagtacattaaatttgtcaatttcatctttgagggaaactgattagatgggttgtgtttgtgttctgatggagaaaacagcaccccaaggactcagaagatgattttaacagttcagaacagatgtgtgcaatattggtgcatgtaataatgttgagtggcagtcaaaagtcatgatttttatcttagttcttcattactgcattgaaaaggaaaacctgtctgagaaaatgcctgacagtttaatttaaaactatggtgtaagtctttgacaagaaaaaaaaacaaacaaacacttctttccatcagtaacactggcaatcttcctgttaaccactctccttagggatggtatctgaaacaacaatggtcaccctcttgagattcgttttaagtgtaattccataatgagcagaggtgtacgcgaaattgtgttatgactgatagccttcagctacaaaaagataggactgacctggtttaaagtgttctattttgtaaatcattccatttgagtctttctgatgaacttggctatactgaaatctgttattttagtgaggctccaaaatgagcaaagctaggcctgattagagtagagtgactattaaaaaacataactttctaggagctataaatcaaagttttaaaaagatgtttggatatatttgagtattccgatcatgaaaacagaaattgccctgcctactacaaggacagactgatgggaaattatgcacctggtcaacttagcttttaagcagacgatgctgtaaaaactaacggcttctctgatatttattgtaagttttagtactgatctccttttccagtgctgcacactcctggtttggaactttaatagcgttgcaacgaaatcctatatccagtttcctgtaatttaattgaagaaaaatacatccaaataaagactttattattaacagaccagatagcatcagaaatcatgtgactgttatgattatcagaatgtcttaactttttagggcaaagttaacactgaaagttctagcttaagtgttgaaacttttgtgggaaaaaaaaatcacttttgaaactcagacttcagtgtatacccaataatttaaaattatgtgaaatgttttaaatttgtgaactcgtaattactgttttaatgattcagtttcttcagagtggtaattgtataaaattgctattgcagctttatattcaatatgatgtgcctgtaaaccaaggagttttccccgtttgtaaaaagacattgtagataattgaatgtttgattttagaaaggtcattagtttcttgttacacattttgttagtctggtttttgttgcttatcgggtttaatattgttcttgaaaatagttgatgctatgttatgtataacttttctaataaaagttgtgttataagctgta

SEQ ID NO: 294085 - DNA, 3705 bp, Homo sapiens
gaagagccgcggcgtaacggcagccatcttgtttgtttgagtgaatcggaaaggaggcgccggctgtggcggcggcgggagctgctcggaagctacacctcgcaagggctcccccctttccccaccccctcccccgacccttttcccctccccgggccacccagcccgcccaactcccagcggagagcaaggttttcttctgttttcatagccagccagaacaatgttctacgcacattttgttctcagtaaaagagggcctctggccaaaatttggctagcggcccattgggataagaagctaaccaaagcccatgtgttcgagtgtaatttagagagcagcgtggagagtatcatctcaccaaaggtgaaaatggcattacggacatcaggacatctcttactgggagtagttcgaatctatcacaggaaagccaaataccttcttgcagactgtaatgaagcattcattaagataaagatggcttttcggccaggtgtggttgacctgcctgaggaaaatcgggaagcagcttataatgccattactttacctgaagaatttcatgactttgatcagccactgcctgacttagatgacatcgatgtggcccagcagttcagcttgaatcagagtagagtggaagagataaccatgagagaagaagttgggaacatcagtattttacaagaaaatgattttggtgattttggaatggatgatcgtgagataatgagagaaggcagtgcttttgaggatgacgacatgttagtaagcactactacttctaacctcctattagagtctgaacagagcaccagcaatctgaatgagaaaattaaccatttagaatatgaagatcaatataaggatgataattttggagaaggaaatgatggtggaatattagatgacaaacttattagtaataatgatggcggtatctttgatgatccccctgccctctctgaggcaggggtgatgttgccagagcagcctgcacatgacgatatggatgaggatgataatgtatcaatgggtgggcctgatagtcctgattcagtggatcccgttgaaccaatgccaaccatgactgatcaaacaacacttgttccaaatgaggaagaagcatttgcattggagcctattgatataactgttaaagaaacaaaagccaagaggaagaggaagctaattgttgacagtgtcaaagagttggatagcaagacaattagagcccaacttagtgattattcagatattgttactactttggatctggcaccgcccaccaagaaattgatgatgtggaaagagacaggaggagtagaaaaactgttttctttacctgctcagcctttgtggaataacagactactgaagctctttacacgctgtcttacaccgcttgtaccagaagaccttagaaaaaggaggaaaggaggagaggcagataatttggatgaattcctcaaagaatttgaaaatccagaggttcctagagaggaccagcaacagcagcatcagcagcgtgatgttatcgatgagcccattattgaagagccaagccgcctccaggagtcagtgatggaggccagcagaacaaacatagatgagtcagctatgcctccaccaccacctcagggagttaagcgaaaagctggacaaattgacccagagcctgtgatgcctcctcagcaggtagagcagatggaaataccacctgtagagcttcccccagaagaacctccaaatatctgtcagctaataccagagttagaacttctgccagaaaaagagaaggagaaagagaaggaaaaagaagatgatgaagaggaagaggatgaagatgcatcagggggcgatcaagatcaggaagaaagaagatggaacaaaaggactcagcagatgcttcatggtcttcagcgtgctcttgctaaaactggagctgaatctatcagtttgcttgagttatgtcgaaatacgaacagaaaacaagctgccgcaaagttctacagcttcttggttcttaaaaagcagcaagctattgagctgacacaggaagaaccgtacagtgacatcatcgcaacacctggaccaaggttccatattatataaggagctagaagcattatagctagtgtttgattcactagtgcttacaaattgcccccatgtgtaggggacacagaaccctttgagaaaacttagatttttgtctgtacaaagtctttgcctttttccttcttcatttttttccagtacattaaatttgtcaatttcatctttgagggaaactgattagatgggttgtgtttgtgttctgatggagaaaacagcaccccaaggactcagaagatgattttaacagttcagaacagatgtgtgcaatattggtgcatgtaataatgttgagtggcagtcaaaagtcatgatttttatcttagttcttcattactgcattgaaaaggaaaacctgtctgagaaaatgcctgacagtttaatttaaaactatggtgtaagtctttgacaagaaaaaaaaacaaacaaacacttctttccatcagtaacactggcaatcttcctgttaaccactctccttagggatggtatctgaaacaacaatggtcaccctcttgagattcgttttaagtgtaattccataatgagcagaggtgtacgcgaaattgtgttatgactgatagccttcagctacaaaaagataggactgacctggtttaaagtgttctattttgtaaatcattccatttgagtctttctgatgaacttggctatactgaaatctgttattttagtgaggctccaaaatgagcaaagctaggcctgattagagtagagtgactattaaaaaacataactttctaggagctataaatcaaagttttaaaaagatgtttggatatatttgagtattccgatcatgaaaacagaaattgccctgcctactacaaggacagactgatgggaaattatgcacctggtcaacttagcttttaagcagacgatgctgtaaaaactaacggcttctctgatatttattgtaagttttagtactgatctccttttccagtgctgcacactcctggtttggaactttaatagcgttgcaacgaaatcctatatccagtttcctgtaatttaattgaagaaaaatacatccaaataaagactttattattaacagaccagatagcatcagaaatcatgtgactgttatgattatcagaatgtcttaactttttagggcaaagttaacactgaaagttctagcttaagtgttgaaacttttgtgggaaaaaaaaatcacttttgaaactcagacttcagtgtatacccaataatttaaaattatgtgaaatgttttaaatttgtgaactcgtaattactgttttaatgattcagtttcttcagagtggtaattgtataaaattgctattgcagctttatattcaatatgatgtgcctgtaaaccaaggagttttccccgtttgtaaaaagacattgtagataattgaatgtttgattttagaaaggtcattagtttcttgttacacattttgttagtctggtttttgttgcttatcgggtttaatattgttcttgaaaatagttgatgctatgttatgtataacttttctaataaaagttgtgttataagctgtaaaaaaattttaaaaaaaaaa

SEQ ID NO: 294086 - DNA, 3882 bp, Homo sapiens
gaagagccgcggcgtaacggcagccatcttgtttgtttgagtgaatcggaaaggaggcgccggctgtggcggcggcgggagctgctcggaagctacacctcgcaagggctcccccctttccccaccccctcccccgacccttttcccctccccgggccacccagcccgcccaactcccagcggagagcaaggttttcttctgttttcatagccagccagaacaatgttctacgcacattttgttctcagtaaaagagggcctctggccaaaatttggctagcggcccattgggataagaagctaaccaaagcccatgtgttcgagtgtaatttagagagcagcgtggagagtatcatctcaccaaaggtgaaaatggcattacggacatcaggacatctcttactgggagtagttcgaatctatcacaggaaagccaaataccttcttgcagactgtaatgaagcattcattaagataaagatggcttttcggccaggtgtggttgacctgcctgaggaaaatcgggaagcagcttataatgccattactttacctgaagaatttcatgactttgatcagccactgcctgacttagatgacatcgatgtggcccagcagttcagcttgaatcagagtagagtggaagagataaccatgagagaagaagttgggaacatcagtattttacaagaaaatgattttggtgattttggaatggatgatcgtgagataatgagagaaggcagtgcttttgaggatgacgacatgttagtaagcactactacttctaacctcctattagagtctgaacagagcaccagcaatctgaatgagaaaattaaccatttagaatatgaagatcaatataaggatgataattttggagaaggaaatgatggtggaatattagatgacaaacttattagtaataatgatggcggtatctttgatgatccccctgccctctctgaggcaggggtgatgttgccagagcagcctgcacatgacgatatggatgaggatgataatgtatcaatgggtgggcctgatagtcctgattcagtggatcccgttgaaccaatgccaaccatgactgatcaaacaacacttgttccaaatgaggaagaagcatttgcattggagcctattgatataactgttaaagaaacaaaagccaagaggaagaggaagctaattgttgacagtgtcaaagagttggatagcaagacaattagagcccaacttagtgattattcagatattgttactactttggatctggcaccgcccaccaagaaattgatgatgtggaaagagacaggaggagtagaaaaactgttttctttacctgctcagcctttgtggaataacagactactgaagctctttacacgctgtcttacaccgcttgtaccagaagaccttagaaaaaggaggaaaggaggagaggcagataatttggatgaattcctcaaagaatttgaaaatccagaggttcctagagaggaccagcaacagcagcatcagcagcgtgatgttatcgatgagcccattattgaagagccaagccgcctccaggagtcagtgatggaggccagcagaacaaacatagatgagtcagctatgcctccaccaccacctcagggagttaagcgaaaagctggacaaattgacccagagcctgtgatgcctcctcagcaggtagagcagatggaaataccacctgtagagcttcccccagaagaacctccaaatatctgtcagctaataccagagttagaacttctgccagaaaaagagaaggagaaagagaaggaaaaagaagatgatgaagaggaagaggatgaagatgcatcagggggcgatcaagatcaggaagaaagaagatggaacaaaaggactcagcagatgcttcatggtcttcagcgtgctcttgctaaaactggagctgaatctatcagtttgcttgagttatgtcgaaatacgaacagaaaacaagctgccgcaaagttctacagcttcttggttcttaaaaagcagcaagctattgagctgacacaggaagaaccgtacagtgacatcatcgcaacacctggaccaaggttccatattatataaggagctagaagcattatagctagtgtttgattcactagtgcttacaaattgcccccatgtgtaggggacacagaaccctttgagaaaacttagatttttgtctgtacaaagtctttgcctttttccttcttcatttttttccagtacattaaatttgtcaatttcatctttgagggaaactgattagatgggttgtgtttgtgttctgatggagaaaacagcaccccaaggactcagaagatgattttaacagttcagaacagatgtgtgcaatattggtgcatgtaataatgttgagtggcagtcaaaagtcatgatttttatcttagttcttcattactgcattgaaaaggaaaacctgtctgagaaaatgcctgacagtttaatttaaaactatggtgtaagtctttgacaagaaaaaaaaacaaacaaacacttctttccatcagtaacactggcaatcttcctgttaaccactctccttagggatggtatctgaaacaacaatggtcaccctcttgagattcgttttaagtgtaattccataatgagcagaggtgtacgcgaaattgtgttatgactgatagccttcagctacaaaaagataggactgacctggtttaaagtgttctattttgtaaatcattccatttgagtctttctgatgaacttggctatactgaaatctgttattttagtgaggctccaaaatgagcaaagctaggcctgattagagtagagtgactattaaaaaacataactttctaggagctataaatcaaagttttaaaaagatgtttggatatatttgagtattccgatcatgaaaacagaaattgccctgcctactacaaggacagactgatgggaaattatgcacctggtcaacttagcttttaagcagacgatgctgtaaaaactaacggcttctctgatatttattgtaagttttagtactgatctccttttccagtgctgcacactcctggtttggaactttaatagcgttgcaacgaaatcctatatccagtttcctgtaatttaattgaagaaaaatacatccaaataaagactttattattaacagaccagatagcatcagaaatcatgtgactgttatgattatcagaatgtcttaactttttagggcaaagttaacactgaaagttctagcttaagtgttgaaacttttgtgggaaaaaaaaatcacttttgaaactcagacttcagtgtatacccaataatttaaaattatgtgaaatgttttaaatttgtgaactcgtaattactgttttaatgattcagtttcttcagagtggtaattgtataaaattgctattgcagctttatattcaatatgatgtgcctgtaaaccaaggagttttccccgtttgtaaaaagacattgtagataattgaatgtttgattttagaaaggtcattagtttcttgttacacattttgttagtctggtttttgttgcttatcgggtttaatattgttcttgaaaatagttgatgctgcataaactattacagcataaactattacagcataaactattacagcataaactatttagtcataaactctacaaataggagattaaaaacaaggtatgggatgcctgataacactacaacttcttttgaacctagaaaggtcaaaacactacgctgatgtcacggttctcagtcgcgcgagacacggaggagacagaggcgatgtccgtgtacagtagtaatgcagtgacatagttgatcg

SEQ ID NO: 294087 - DNA, 3684 bp, Homo sapiens
gaagagccgcggcgtaacggcagccatcttgtttgtttgagtgaatcggaaaggaggcgccggctgtggcggcggcgggagctgctcggaagctacacctcgcaagggctcccccctttccccaccccctcccccgacccttttcccctccccgggccacccagcccgcccaactcccagcggagagcaaggttttcttctgttttcatagccagccagaacaatgttctacgcacattttgttctcagtaaaagagggcctctggccaaaatttggctagcggcccattgggataagaagctaaccaaagcccatgtgttcgagtgtaatttagagagcagcgtggagagtatcatctcaccaaaggtgaaaatggcattacggacatcaggacatctcttactgggagtagttcgaatctatcacaggaaagccaaataccttcttgcagactgtaatgaagcattcattaagataaagatggcttttcggccaggtgtggttgacctgcctgaggaaaatcgggaagcagcttataatgccattactttacctgaagaatttcatgactttgatcagccactgcctgacttagatgacatcgatgtggcccagcagttcagcttgaatcagagtagagtggaagagataaccatgagagaagaagttgggaacatcagtattttacaagaaaatgattttggtgattttggaatggatgatcgtgagataatgagagaaggcagtgcttttgaggatgacgacatgttagtaagcactactacttctaacctcctattagagtctgaacagagcaccagcaatctgaatgagaaaattaaccatttagaatatgaagatcaatataaggatgataattttggagaaggaaatgatggtggaatattagatgacaaacttattagtaataatgatggcggtatctttgatgatccccctgccctctctgaggcaggggtgatgttgccagagcagcctgcacatgacgatatggatgaggatgataatgtatcaatgggtgggcctgatagtcctgattcagtggatcccgttgaaccaatgccaaccatgactgatcaaacaacacttgttccaaatgaggaagaagcatttgcattggagcctattgatataactgttaaagaaacaaaagccaagaggaagaggaagctaattgttgacagtgtcaaagagttggatagcaagacaattagagcccaacttagtgattattcagatattgttactactttggatctggcaccgcccaccaagaaattgatgatgtggaaagagacaggaggagtagaaaaactgttttctttacctgctcagcctttgtggaataacagactactgaagctctttacacgctgtcttacaccgcttgtaccagaagaccttagaaaaaggaggaaaggaggagaggcagataatttggatgaattcctcaaagaatttgaaaatccagaggttcctagagaggaccagcaacagcagcatcagcagcgtgatgttatcgatgagcccattattgaagagccaagccgcctccaggagtcagtgatggaggccagcagaacaaacatagatgagtcagctatgcctccaccaccacctcagggagttaagcgaaaagctggacaaattgacccagagcctgtgatgcctcctcagcaggtagagcagatggaaataccacctgtagagcttcccccagaagaacctccaaatatctgtcagctaataccagagttagaacttctgccagaaaaagagaaggagaaagagaaggaaaaagaagatgatgaagaggaagaggatgaagatgcatcagggggcgatcaagatcaggaagaaagaagatggaacaaaaggactcagcagatgcttcatggtcttcagcgtgctcttgctaaaactggagctgaatctatcagtttgcttgagttatgtcgaaatacgaacagaaaacaagctgccgcaaagttctacagcttcttggttcttaaaaagcagcaagctattgagctgacacaggaagaaccgtacagtgacatcatcgcaacacctggaccaaggttccatattatataaggagctagaagcattatagctagtgtttgattcactagtgcttacaaattgcccccatgtgtaggggacacagaaccctttgagaaaacttagatttttgtctgtacaaagtctttgcctttttccttcttcatttttttccagtacattaaatttgtcaatttcatctttgagggaaactgattagatgggttgtgtttgtgttctgatggagaaaacagcaccccaaggactcagaagatgattttaacagttcagaacagatgtgtgcaatattggtgcatgtaataatgttgagtggcagtcaaaagtcatgatttttatcttagttcttcattactgcattgaaaaggaaaacctgtctgagaaaatgcctgacagtttaatttaaaactatggtgtaagtctttgacaagaaaaaaaaacaaacaaacacttctttccatcagtaacactggcaatcttcctgttaaccactctccttagggatggtatctgaaacaacaatggtcaccctcttgagattcgttttaagtgtaattccataatgagcagaggtgtacgcgaaattgtgttatgactgatagccttcagctacaaaaagataggactgacctggtttaaagtgttctattttgtaaatcattccatttgagtctttctgatgaacttggctatactgaaatctgttattttagtgaggctccaaaatgagcaaagctaggcctgattagagtagagtgactattaaaaaacataactttctaggagctataaatcaaagttttaaaaagatgtttggatatatttgagtattccgatcatgaaaacagaaattgcctgcctactacaaggacagactgatgggaaattatgcacctggtcaacttagcttttaagcagacgatgctgtaaaaactaacggcttctctgatatttattgtaagttttagtactgatctccttttccagtgctgcacactcctggtttggaactttaatagcgttgcaacgaaatcctatatccagtttcctgtaatttaattgaagaaaaatacatccaaataaagactttattattaacagaccagatagcatcagaaatcatgtgactgttatgattatcagaatgtcttaactttttagggcaaagttaacactgaaagttctagcttaagtgttgaaacttttgtgggaaaaaaaaatcacttttgaaactcagacttcagtgtatacccaataatttaaaattatgtgaaatgttttaaatttgtgaactcgtaattactgttttaatgattcagtttcttcagagtggtaattgtataaaattgctattgcagctttatattcaatatgatgtgcctgtaaaccaaggagttttccccgtttgtaaaaagacattgtagataattgaatgtttgattttagaaaggtcattagtttcttgttacacattttgttagtctggtttttgttgcttatcgggtttaatattgttcttgaaaatagttgatgctatgttatgtataacttttctaataaaagttgtgttataagctgta

SEQ ID NO: 294088 - DNA, 1989 bp, Homo sapiens
aacagctattacagggatcagctttcaccgggagacactctcagcaggaacacgcatataatctgggagctaataccagagttagaacttctgccagaaaaagagaaggagaaagagaaggaaaaagaagatgatgaagaggaagaggatgaagatgcatcagggggcgatcaagatcaggaagaaagaagatggaacaaaaggactcagcagatgcttcatggtcttcagcgtgctcttgctaaaactggagctgaatctatcagtttgcttgagttatgtcgaaatacgaacagaaaacaagctgccgcaaagttctacagcttcttggttcttaaaaagcagcaagctattgagctgacacaggaagaaccgtacagtgacatcatcgcaacacctggaccaaggttccatattatataaggagctagaagcattatagctagtgtttgattcactagtgcttacaaattgcccccatgtgtaggggacacagaaccctttgagaaaacttagatttttgtctgtacaaagtctttgcctttttccttcttcatttttttccagtacattaaatttgtcaatttcatctttgagggaaactgattagatgggttgtgtttgtgttctgatggagaaaacagcaccccaaggactcagaagatgattttaacagttcagaacagatgtgtgcaatattggtgcatgtaataatgttgagtggcagtcaaaagtcatgatttttatcttagttcttcattactgcattgaaaaggaaaacctgtctgagaaaatgcctgacagtttaatttaaaactatggtgtaagtctttgacaagaaaaaaaaacaaacaaacacttctttccatcagtaacactggcaatcttcctgttaaccactctccttagggatggtatctgaaacaacaatggtcaccctcttgagattcgttttaagtgtaattccataatgagcagaggtgtacgcgaaattgtgttatgactgatagccttcagctacaaaaagataggactgacctggtttaaagtgttctattttgtaaatcattccatttgagtctttctgatgaacttggctatactgaaatctgttattttagtgaggctccaaaatgagcaaagctaggcctgattagagtagagtgactattaaaaaacataactttctaggagctataaatcaaagttttaaaaagatgtttggatatatttgagtattccgatcatgaaaacagaaattgccctgcctactacaaggacagactgatgggaaattatgcacctggtcaacttagcttttaagcagacgatgctgtaaaaactaacggcttctctgatatttattgtaagttttagtactgatctccttttccagtgctgcacactcctggtttggaactttaatagcgttgcaacgaaatcctatatccagtttcctgtaatttaattgaagaaaaatacatccaaataaagactttattattaacagaccagatagcatcagaaatcatgtgactgttatgattatcagaatgtcttaactttttagggcaaagttaacactgaaagttctagcttaagtgttgaaacttttgtgggaaaaaaaaatcacttttgaaactcagacttcagtgtatacccaataatttaaaattatgtgaaatgttttaaatttgtgaactcgtaattactgttttaatgattcagtttcttcagagtggtaattgtataaaattgctattgcagctttatattcaatatgatgtgcctgtaaaccaaggagttttccccgtttgtaaaaagacattgtagataattgaatgtttgattttagaaaggtcattagtttcttgttacacattttgttagtctggtttttgttgcttatcgggtttaatattgttcttgaaaatagttgatgctatgttatgtataacttttctaataaaagttgtgttataagctgta

SEQ ID NO: 294089 - DNA, 3493 bp, Homo sapiens
gaagagccgcggcgtaacggcagccatcttgtttgtttgagtgaatcggaaaggaggcgccggctgtggcggcggcgggagctgctcggaagctacacctcgcaagggctcccccctttccccaccccctcccccgacccttttcccctccccgggccacccagcccgcccaactcccagcggagagcaaggttttcttctgttttcatagccagccagaacaatgttctacgcacattttgttctcagtaaaagagggcctctggccaaaatttggctagcggcccattgggataagaagctaaccaaagcccatgtgttcgagtgtaatttagagagcagcgtggagagtatcatctcaccaaaggtgaaaatggcattacggacatcaggacatctcttactgggagtagttcgaatctatcacaggaaagccaaataccttcttgcagactgtaatgaagcattcattaagataaagatggcttttcggccaggtgtggttgacctgcctgaggaaaatcgggaagcagcttataatgccattactttacctgaagaatttcatgactttgatcagccactgcctgacttagatgacatcgatgtggcccagcagttcagcttgaatcagagtagagtggaagagataaccatgagagaagaagttgggaacatcagtattttacaagaaaatgattttggtgattttggaatggatgatcgtgagataatgagagaaggcagtgcttttgaggatgacgacatgttagtaagcactactacttctaacctcctattagagtctgaacagagcaccagcaatctgaatgagaaaattaaccatttagaatatgaagatcaatataaggatgataattttggagaaggaaatgatggtggaatattagatgacaaacttattagtaataatgatggcggtatctttgatgatccccctgccctctctgaggcaggggtgatgttgccagagcagcctgcacatgacgatatggatgaggatgataatgtatcaatgggtgggcctgatagtcctgattcagtggatcccgttgaaccaatgccaaccatgactgatcaaacaacacttgttccaaatgaggaagaagcatttgcattggagcctattgatataactgttaaagaaacaaaagccaagaggaagaggaagctaattgttgacagtgtcaaagagttggatagcaagacaattagagcccaacttagtgattattcagatattgttactactttggatctggcaccgcccaccaagaaattgatgatgtggaaagagacaggaggagtagaaaaactgttttctttacctgctcagcctttgtggaataacagactactgaagctctttacacgctgtcttacaccgcttgtaccagaagaccttagaaaaaggaggaaaggaggagaggcagataatttggatgaattcctcaaagaatttgaaaatccagaggttcctagagaggaccagcaacagcagcatcagcagcgtgatgttatcgatgagcccattattgaagagccaagccgcctccaggagtcagtgatggaggccagcagaacaaacatagatgagtcagctatgcctccaccaccacctcagggagttaagcgaaaagctggacaaattgacccagagcctgtgatgcctcctcagcaggtagagcagatggaaataccacctgtagagcttcccccagaagaacctccaaatatctgtcagctaataccagagttagaacttctgccagaaaaagagaaggagaaagagaaggaaaaagaagatgatgaagaggaagaggatgaagatgcatcagggggcgatcaagatcaggaagaaagaagatggaacaaaaggactcagcagatgcttcatggtcttcagcgtgctcttgctaaaactggagctgaatctatcagtttgcttgagttatgtcgaaatacgaacagaaaacaagctgccgcaaagttctacagcttcttggttcttaaaaagcagcaagctattgagctgacacaggaagaaccgtacagtgacatcatcgcaacacctggaccaaggttccatattatataaggagctagaagcattatagctagtgtttgattcactagtgcttacaaattgcccccatgtgtaggggacacagaaccctttgagaaaacttagatttttgtctgtacaaagtctttgcctttttccttcttcatttttttccagtacattaaatttgtcaatttcatctttgagggaaactgattagatgggttgtgtttgtgttctgatggagaaaacagcaccccaaggactcagaagatgattttaacagttcagaacagatgtgtgcaatattggtgcatgtaataatgttgagtggcagtcaaaagtcatgatttttatcttagttcttcattactgcattgaaaaggaaaacctgtctgagaaaatgcctgacagtttaatttaaaactatggtgtaagtctttgacaagaaaaaaaaacaaacaaacacttctttccatcagtaacactggcaatcttcctgttaaccactctccttagggatggtatctgaaacaacaatggtcaccctcttgagattcgttttaagtgtaattccataatgagcagaggtgtacgcgaaattgtgttatgactgatagccttcagctacaaaaagataggactgacctggtttaaagtgttctattttgtaaatcattccatttgagtctttctgatgaacttggctatactgaaatctgttattttagtgaggctccaaaatgagcaaagctaggcctgattagagtagagtgactattaaaaaacataactttctaggagctataaatcaaagttttaaaaagatgtttggatatatttgagtattccgatcatgaaaacagaaattgccctgcctactacaaggacagactgatgggaaattatgcacctggtcaacttagcttttaagcagacgatgctgtaaaaactaacggcttctctgatatttattgtaagttttagtactgatctccttttccagtgctgcacactcctggtttggaactttaatagcgttgcaacgaaatcctatatccagtttcctgtaatttaattgaagaaaaatacatccaaataaagactttattattaacagaccagatagcatcagaaatcatgtgactgttatgattatcagaatgtcttaactttttagggcaaagttaacactgaaagttctagcttaagtgttgaaacttttgtgggaaaaaaaaatcacttttgaaactcagacttcagtgtatacccaataatttaaaattatgtgaaatgttttaaatttgtgaactcgtaattactgttttaatgattcagtttcttcagagtggtaattgtataaaattgctattgcaaacttctaaaactaggggtaccgactcgatc

SEQ ID NO: 294090 - DNA, 3190 bp, Homo sapiens
gaagagccgcggcgtaacggcagccatcttgtttgtttgagtgaatcggaaaggaggcgccggctgtggcggcggcgggagctgctcggaagctacacctcgcaagggctcccccctttccccaccccctcccccgacccttttcccctccccgggccacccagcccgcccaactcccagcggagagcaaggttttcttctgttttcatagccagccagaacaatgttctacgcacattttgttctcagtaaaagagggcctctggccaaaatttggctagcggcccattgggataagaagctaaccaaagcccatgtgttcgagtgtaatttagagagcagcgtggagagtatcatctcaccaaaggtgaaaatggcattacggacatcaggacatctcttactgggagtagttcgaatctatcacaggaaagccaaataccttcttgcagactgtaatgaagcattcattaagataaagatggcttttcggccaggtgtggttgacctgcctgaggaaaatcgggaagcagcttataatgccattactttacctgaagaatttcatgactttgatcagccactgcctgacttagatgacatcgatgtggcccagcagttcagcttgaatcagagtagagtggaagagataaccatgagagaagaagttgggaacatcagtattttacaagaaaatgattttggtgattttggaatggatgatcgtgagataatgagagaaggcagtgcttttgaggatgacgacatgttagtaagcactactacttctaacctcctattagagtctgaacagagcaccagcaatctgaatgagaaaattaaccatttagaatatgaagatcaatataaggatgataattttggagaaggaaatgatggtggaatattagatgacaaacttattagtaataatgatggcggtatctttgatgatccccctgccctctctgaggcaggggtgatgttgccagagcagcctgcacatgacgatatggatgaggatgataatgtatcaatgggtgggcctgatagtcctgattcagtggatcccgttgaaccaatgccaaccatgactgatcaaacaacacttgttccaaatgaggaagaagcatttgcattggagcctattgatataactgttaaagaaacaaaagccaagaggaagaggaagctaattgttgacagtgtcaaagagttggatagcaagacaattagagcccaacttagtgattattcagatattgttactactttggatctggcaccgcccaccaagaaattgatgatgtggaaagagacaggaggagtagaaaaactgttttctttacctgctcagcctttgtggaataacagactactgaagctctttacacgctgtcttacaccgcttgtaccagaagaccttagaaaaaggaggaaaggaggagaggcagataatttggatgaattcctcaaagaatttgaaaatccagaggttcctagagaggaccagcaacagcagcatcagcagcgtgatgttatcgatgagcccattattgaagagccaagccgcctccaggagtcagtgatggaggccagcagaacaaacatagatgagtcagctatgcctccaccaccacctcagggagttaagcgaaaagctggacaaattgacccagagcctgtgatgcctacagaaccctttgagaaaacttagatttttgtctgtacaaagtctttgcctttttccttcttcatttttttccagtacattaaatttgtcaatttcatctttgagggaaactgattagatgggttgtgtttgtgttctgatggagaaaacagcaccccaaggactcagaagatgattttaacagttcagaacagatgtgtgcaatattggtgcatgtaataatgttgagtggcagtcaaaagtcatgatttttatcttagttcttcattactgcattgaaaaggaaaacctgtctgagaaaatgcctgacagtttaatttaaaactatggtgtaagtctttgacaagaaaaaaaaacaaacaaacacttctttccatcagtaacactggcaatcttcctgttaaccactctccttagggatggtatctgaaacaacaatggtcaccctcttgagattcgttttaagtgtaattccataatgagcagaggtgtacgcgaaattgtgttatgactgatagccttcagctacaaaaagataggactgacctggtttaaagtgttctattttgtaaatcattccatttgagtctttctgatgaacttggctatactgaaatctgttattttagtgaggctccaaaatgagcaaagctaggcctgattagagtagagtgactattaaaaaacataactttctaggagctataaatcaaagttttaaaaagatgtttggatatatttgagtattccgatcatgaaaacagaaattgccctgcctactacaaggacagactgatgggaaattatgcacctggtcaacttagcttttaagcagacgatgctgtaaaaactaacggcttctctgatatttattgtaagttttagtactgatctccttttccagtgctgcacactcctggtttggaactttaatagcgttgcaacgaaatcctatatccagtttcctgtaatttaattgaagaaaaatacatccaaataaagactttattattaacagaccagatagcatcagaaatcatgtgactgttatgattatcagaatgtcttaactttttagggcaaagttaacactgaaagttctagcttaagtgttgaaacttttgtgggaaaaaaaaatcacttttgaaactcagacttcagtgtatacccaataatttaaaattatgtgaaatgttttaaatttgtgaactcgtaattactgttttaatgattcagtttcttcagagtggtaattgtataaaattgctattgcagctttatattcaatatgatgtgcctgtaaaccaaggagttttccccgtttgtaaaaagacattgtagataattgaatgtttgattttagaaaggtcattagtttcttgttacacattttgttagtctggtttttgttgcttatcgggtttaatattgttcttgaaaatagttgatgctatgttatgtataacttttctaataaaagttgtgttataagctgta

SEQ ID NO: 294091 - DNA, 1927 bp, Homo sapiens
acaagcttactgaaaacattcgttaggcgtcgcggggcccggtcaaggtatacattgaacatggtacatatgctgtatcctagagtacatcctgtgcttgatgtagctgctttggatgtctctatgcaataaatgaagcctcgaagatcgtaatccaccgattggggtttcgttgatatcattgattcgcaagaatgcggagatctcgtgaagggcacagtttagctggatcatatcatacaggatgttctctgcggcgcatgtctcgaatctcgacaaatcatcagtccgcacgctgacacaggaagaaccgtacagtgacatcatcgcaacacctggaccaaggttccatattatataaggagctagaagcattatagctagtgtttgattcactagtgcttacaaattgcccccatgtgtaggggacacagaaccctttgagaaaacttagatttttgtctgtacaaagtctttgcctttttccttcttcatttttttccagtacattaaatttgtcaatttcatctttgagggaaactgattagatgggttgtgtttgtgttctgatggagaaaacagcaccccaaggactcagaagatgattttaacagttcagaacagatgtgtgcaatattggtgcatgtaataatgttgagtggcagtcaaaagtcatgatttttatcttagttcttcattactgcattgaaaaggaaaacctgtctgagaaaatgcctgacagtttaatttaaaactatggtgtaagtctttgacaagaaaaaaaaacaaacaaacacttctttccatcagtaacactggcaatcttcctgttaaccactctccttagggatggtatctgaaacaacaatggtcaccctcttgagattcgttttaagtgtaattccataatgagcagaggtgtacgcgaaattgtgttatgactgatagccttcagctacaaaaagataggactgacctggtttaaagtgttctattttgtaaatcattccatttgagtctttctgatgaacttggctatactgaaatctgttattttagtgaggctccaaaatgagcaaagctaggcctgattagagtagagtgactattaaaaaacataactttctaggagctataaatcaaagttttaaaaagatgtttggatatatttgagtattccgatcatgaaaacagaaattgccctgcctactacaaggacagactgatgggaaattatgcacctggtcaacttagcttttaagcagacgatgctgtaaaaactaacggcttctctgatatttattgtaagttttagtactgatctccttttccagtgctgcacactcctggtttggaactttaatagcgttgcaacgaaatcctatatccagtttcctgtaatttaattgaagaaaaatacatccaaataaagactttattattaacagaccagatagcatcagaaatcatgtgactgttatgattatcagaatgtcttaactttttagggcaaagttaacactgaaagttctagcttaagtgttgaaacttttgtgggaaaaaaaaatcacttttgaaactcagacttcagtgtatacccaataatttaaaattatgtgaaatgttttaaatttgtgaactcgtaattactgttttaatgattcagtttcttcagagtggtaattgtataaaattgctattgcagctttatattcaatatgatgtgcctgtaaaccaaggagttttccccgtttgtaaaaagacattgtagataattgaatgtttgattttagaaaggtcattagtttcttgttacacattttgttagtctggtttttgttgcttatcgggtttaatattgttcttgaaaatagttgatgctatgttatgtataacttttctaataaaagttgtgttataagctgta

SEQ ID NO: 294092 - DNA, 3007 bp, Homo sapiens
gaagagccgcggcgtaacggcagccatcttgtttgtttgagtgaatcggaaaggaggcgccggctgtggcggcggcgggagctgctcggaagctacacctcgcaagggctcccccctttccccaccccctcccccgacccttttcccctccccgggccacccagcccgcccaactcccagcggagagcaaggttttcttctgttttcatagccagccagaacaatgttctacgcacattttgttctcagtaaaagagggcctctggccaaaatttggctagcggcccattgggataagaagctaaccaaagcccatgtgttcgagtgtaatttagagagcagcgtggagagtatcatctcaccaaaggtgaaaatggcattacggacatcaggacatctcttactgggagtagttcgaatctatcacaggaaagccaaataccttcttgcagactgtaatgaagcattcattaagataaagatggcttttcggccaggtgtggttgacctgcctgaggaaaatcgggaagcagcttataatgccattactttacctgaagaatttcatgactttgatcagccactgcctgacttagatgacatcgatgtggcccagcagttcagcttgaatcagagtagagtggaagagataaccatgagagaagaagttgggaacatcagtattttacaagaaaatgattttggtgattttggaatggatgatcgtgagataatgagagaaggcagtgcttttgaggatgacgacatgttagtaagcactactacttctaacctcctattagagtctgaacagagcaccagcaatctgaatgagaaaattaaccatttagaatatgaagatcaatataaggatgataattttggagaaggaaatgatggtggaatattagatgacaaacttattagtaataatgatggcggtatctttgatgatccccctgccctctctgaggcaggggtgatgttgccagagcagcctgcacatgacgatatggatgaggatgataatgtatcaatgggtgggcctgatagtcctgattcagtggatcccgttgaaccaatgccaaccatgactgatcaaacaacacttgttccaaatgaggaagaagcatttgcattggagcctattgatataactgttaaagaaacaaaagccaagaggaagaggaagctaattgttgacagtgtcaaagagttggatagcaagacaattagagcccaacttagtgattattcagatattgttactactttggatctggcaccgcccaccaagaaattgatgatgtggaaagagacaggaggagtagaaaaactgttttctttacctgctcagcctttgtggaataacagactactgaagctctttacacgctgtcttacaccgcttgtaccagaagaccttagaaaaaggaggaaaggaggagaggcagataatttggatgaattcctcaaagaatttgaaaatccagaggttcctagagaggaccagcaacagcagcatcagcagcgtgatgttatcgatgagcccattattgaagagccaagccgcctccaggagtcagtgatggaggccagcagaacaaacatagatgagtcagctatgcctccaccaccacctcagggagttaagcgaaaagctggacaaattgacccagagcctgtgatgcctcctcagcaggtagagcagatggaaataccacctgtagagcttcccccagaagaacctccaaatatctgtcagctaataccagagttagaacttctgccagaaaaagagaaggagaaagagaaggaaaaagaagatgatgaagaggaagaggatgaagatgcatcagggggcgatcaagatcaggaagaaagaagatggaacaaaaggactcagcagatgcttcatggtcttcagcgtgctcttgctaaaactggagctgaatctatcagtttgcttgagttatgtcgaaatacgaacagaaaacaagctgccgcaaagttctacagcttcttggttcttaaaaagcagcaagctattgagctgacacaggaagaaccgtacagtgacatcatcgcaacacctggaccaaggttccatattatataaggagctagaagcattatagctagtgtttgattcactagtgcttacaaattgcccccatgtgtaggggacacagaaccctttgagaaaacttagatttttgtctgtacaaagtctttgcctttttccttcttcatttttttccagtacattaaatttgtcaatttcatctttgagggaaactgattagatgggttgtgtttgtgttctgatggagaaaacagcaccccaaggactcagaagatgattttaacagttcagaacagatgtgtgcaatattggtgcatgtaataatgttgagtggcagtcaaaagtcatgatttttatcttagttcttcattactgcattgaaaaggaaaacctgtctgagaaaatgcctgacagtttaatttaaaactatggtgtaagtctttgacaagaaaaaaaaacaaacaaacacttctttccatcagtaacactggcaatcttcctgttaaccactctccttagggatggtatctgaaacaacaatggtcaccctcttgagattcgttttaagtgtaattccataatgagcagaggtgtacgcgaaattgtgttatgactgatagccttcagctacaaaaagataggactgacctggtttaaagtgttctattttgtaaatcattccatttgagtctttctgatgaacttggctatactgaaatctgttattttagtgaggctccaaaatgagcaaagctaggcctgattagagtagagtgactattaaaaaacataactttctaggagctataaatcaaagttttaaaaagatgtttggatatatttgagtattccgatcatgaaaacagaaattgcctgcctactacaaggacagactgatggtacgacgcagtcgtcactgtc

SEQ ID NO: 294093 - DNA, 3227 bp, Homo sapiens
gaagagccgcggcgtaacggcagccatcttgtttgtttgagtgaatcggaaaggaggcgccggctgtggcggcggcgggagctgctcggaagctacacctcgcaagggctcccccctttccccaccccctcccccgacccttttcccctccccgggccacccagcccgcccaactcccagcggagagcaaggttttcttctgttttcatagccagccagaacaatgttctacgcacattttgttctcagtaaaagagggcctctggccaaaatttggctagcggcccattgggataagaagctaaccaaagcccatgtgttcgagtgtaatttagagagcagcgtggagagtatcatctcaccaaaggtgaaaatggcattacggacatcaggacatctcttactgggagtagttcgaatctatcacaggaaagccaaataccttcttgcagactgtaatgaagcattcattaagataaagatggcttttcggccaggtgtggttgacctgcctgaggaaaatcgggaagcagcttataatgccattactttacctgaagaatttcatgactttgatcagccactgcctgacttagatgacatcgatgtggcccagcagttcagcttgaatcagagtagagtggaagagataaccatgagagaagaagttgggaacatcagtattttacaagaaaatgattttggtgattttggaatggatgatcgtgagataatgagagaaggcagtgcttttgaggatgacgacatgttagtaagcactactacttctaacctcctattagagtctgaacagagcaccagcaatctgaatgagaaaattaaccatttagaatatgaagatcaatataaggatgataattttggagaaggaaatgatggtggaatattagatgacaaacttattagtaataatgatggcggtatctttgatgatccccctgccctctctgaggcaggggtgatgttgccagagcagcctgcacatgacgatatggatgaggatgataatgtatcaatgggtgggcctgatagtcctgattcagtggatcccgttgaaccaatgccaaccatgactgatcaaacaacacttgttccaaatgaggaagaagcatttgcattggagcctattgatataactgttaaagaaacaaaagccaagaggaagaggaagctaattgttgacagtgtcaaagagttggatagcaagacaattagagcccaacttagtgattattcagatattgttactactttggatctggcaccgcccaccaagaaattgatgatgtggaaagagacaggaggagtagaaaaactgttttctttacctgctcagcctttgtggaataacagactactgaagctctttacacgctgtcttacaccgcttgtaccagaagaccttagaaaaaggaggaaaggaggagaggcagataatttggatgaattcctcaaagaatttgaaaatccagaggttcctagagaggaccagcaacagcagcatcagcagcgtgatgttatcgatgagcccattattgaagagccaagccgcctccaggagtcagtgatggaggccagcagaacaaacatagatgagtcagctatgcctccaccaccacctcagggagttaagcgaaaagctggacaaattgacccagagcctgtgatgcctcctcagcaggtagagcagatggaaataccacctgtagagcttcccccagaagaacctccaaatatctgtcagctaataccagagttagaacttctgccagaaaaagagaaggagaaagagaaggaaaaagaagatgatgaagaggaagaggatgaagatgcatcagggggcgatcaagatcaggaagaaagaagatggaacaaaaggactcagcagatgcttcatggtcttcagcgtgctcttgctaaaactggagctgaatctatcagtttgcttgagttatgtcgaaatacgaacagaaaacaagctgccgcaaagttctacagcttcttggttcttaaaaagcagcaagctattgagctgacacaggaagaaccgtacagtgacatcatcgcaacacctggaccaaggttccatattatataaggagctagaagcattatagctagtgtttgattcactagtgcttacaaattgcccccatgtgtaggggacacagaaccctttgagaaaacttagatttttgtctgtacaaagtctttgcctttttccttcttcatttttttccagtacattaaatttgtcaatttcatctttgagggaaactgattagatgggttgtgtttgtgttctgatggagaaaacagcaccccaaggactcagaagatgattttaacagttcagaacagatgtgtgcaatattggtgcatgtaataatgttgagtggcagtcaaaagtcatgatttttatcttagttcttcattactgcattgaaaaggaaaacctgtctgagaaaatgcctgacagtttaatttaaaactatggtgtaagtctttgacaagaaaaaaaaacaaacaaacacttctttccatcagtaacactggcaatcttcctgttaaccactctccttagggatggtatctgaaacaacaatggtcaccctcttgagattcgttttaagtgtaattccataatgagcagaggtgtacgcgaaattgtgttatgactgatagccttcagctacaaaaagataggactgacctggtttaaagtgttctattttgtaaatcattccatttgagtctttctgatgaacttggctatactgaaatctgttattttagtgaggctccaaaatgagcaaagctaggcctgattagagtagacgctgaaccttaatttaaaaaaaaaccattaaacctcttccttaaggagccctatatcagtttaaaagagggatatatgagtatcgatcatgacagatgccgctactacggacagacggggaatatgccctggccttattaagcagacgatgctgtaaactacggctctcgtattatgtaagtttagtacgatctcctccggcgccaccgttgaactatacggcagatctattcgtccgtttatgagaaatctccatagactatataagacatgtcaacaggcgtatgattcattgtaatttaggagtaccgagtcactaggtgaattgggaaaacttgaataccggttcctatattgtagttggaca

SEQ ID NO: 294094 - DNA, 1187 bp, Homo sapiens
cgagctcggtaccctactccagacaagttgaccgcaagaaaaaaaaacaaacaaacacttctttccatcagtaacactggcaatcttcctgttaaccactctccttagggatggtatctgaaacaacaatggtcaccctcttgagattcgttttaagtgtaattccataatgagcagaggtgtacgcgaaattgtgttatgactgatagccttcagctacaaaaagataggactgacctggtttaaagtgttctattttgtaaatcattccatttgagtctttctgatgaacttggctatactgaaatctgttattttagtgaggctccaaaatgagcaaagctaggcctgattagagtagagtgactattaaaaaacataactttctaggagctataaatcaaagttttaaaaagatgtttggatatatttgagtattccgatcatgaaaacagaaattgcctgcctactacaaggacagactgatgggaaattatgcacctggtcaacttagcttttaagcagacgatgctgtaaaaactaacggcttctctgatatttattgtaagttttagtactgatctccttttccagtgctgcacactcctggtttggaactttaatagcgttgcaacgaaatcctatatccagtttcctgtaatttaattgaagaaaaatacatccaaataaagactttattattaacagaccagatagcatcagaaatcatgtgactgttatgattatcagaatgtcttaactttttagggcaaagttaacactgaaagttctagcttaagtgttgaaacttttgtgggaaaaaaaaatcacttttgaaactcagacttcagtgtatacccaataatttaaaattatgtgaaatgttttaaatttgtgaactcgtaattactgttttaatgattcagtttcttcagagtggtaattgtataaaattgctattgcagctttatattcaatatgatgtgcctgtaaaccaaggagttttccccgtttgtaaaaagacattgtagataattgaatgtttgattttagaaaggtcattagtttcttgttacacattttgttagtctggtttttgttgcttatcgggtttaatattgttcttgaaaatagttgatgctatgttatgtataacttttctaataaaagttgtgttataagctgta

SEQ ID NO: 294095 - DNA, 3426 bp, Homo sapiens
gaagagccgcggcgtaacggcagccatcttgtttgtttgagtgaatcggaaaggaggcgccggctgtggcggcggcgggagctgctcggaagctacacctcgcaagggctcccccctttccccaccccctcccccgacccttttcccctccccgggccacccagcccgcccaactcccagcggagagcaaggttttcttctgttttcatagccagccagaacaatgttctacgcacattttgttctcagtaaaagagggcctctggccaaaatttggctagcggcccattgggataagaagctaaccaaagcccatgtgttcgagtgtaatttagagagcagcgtggagagtatcatctcaccaaaggtgaaaatggcattacggacatcaggacatctcttactgggagtagttcgaatctatcacaggaaagccaaataccttcttgcagactgtaatgaagcattcattaagataaagatggcttttcggccaggtgtggttgacctgcctgaggaaaatcgggaagcagcttataatgccattactttacctgaagaatttcatgactttgatcagccactgcctgacttagatgacatcgatgtggcccagcagttcagcttgaatcagagtagagtggaagagataaccatgagagaagaagttgggaacatcagtattttacaagaaaatgattttggtgattttggaatggatgatcgtgagataatgagagaaggcagtgcttttgaggatgacgacatgttagtaagcactactacttctaacctcctattagagtctgaacagagcaccagcaatctgaatgagaaaattaaccatttagaatatgaagatcaatataaggatgataattttggagaaggaaatgatggtggaatattagatgacaaacttattagtaataatgatggcggtatctttgatgatccccctgccctctctgaggcaggggtgatgttgccagagcagcctgcacatgacgatatggatgaggatgataatgtatcaatgggtgggcctgatagtcctgattcagtggatcccgttgaaccaatgccaaccatgactgatcaaacaacacttgttccaaatgaggaagaagcatttgcattggagcctattgatataactgttaaagaaacaaaagccaagaggaagaggaagctaattgttgacagtgtcaaagagttggatagcaagacaattagagcccaacttagtgattattcagatattgttactactttggatctggcaccgcccaccaagaaattgatgatgtggaaagagacaggaggagtagaaaaactgttttctttacctgctcagcctttgtggaataacagactactgaagctctttacacgctgtcttacaccgcttgtaccagaagaccttagaaaaaggaggaaaggaggagaggcagataatttggatgaattcctcaaagaatttgaaaatccagaggttcctagagaggaccagcaacagcagcatcagcagcgtgatgttatcgatgagcccattattgaagagccaagccgcctccaggagtcagtgatggaggccagcagaacaaacatagatgagtcagctatgcctccaccaccacctcagggagttaagcgaaaagctggacaaattgacccagagcctgtgatgcctcctcagcaggtagagcagatggaaataccacctgtagagcttcccccagaagaacctccaaatatctgtcagctaataccagagttagaacttctgccagaaaaagagaaggagaaagagaaggaaaaagaagatgatgaagaggaagaggatgaagatgcatcagggggcgatcaagatcaggaagaaagaagatggaacaaaaggactcagcagatgcttcatggtcttcagcgtgctcttgctaaaactggagctgaatctatcagtttgcttgagttatgtcgaaatacgaacagaaaacaagctgccgcaaagttctacagcttcttggttcttaaaaagcagcaagctattgagctgacacaggaagaaccgtacagtgacatcatcgcaacacctggaccaaggttccatattatataaggagctagaagcattatagctagtgtttgattcactagtgcttacaaattgcccccatgtgtaggggacacagaaccctttgagaaaacttagatttttgtctgtacaaagtctttgcctttttccttcttcatttttttccagtacattaaacttctgctcaacttctcactcctcttgcacgcggacaacctgcacttagcactgggcttgctgctctctgctgcttctgactggacgaacacacatgcaccccacaggaacctcagcacagactgacttcttacaccagctctcacgcaaccagcactgctgctgcccaacctacttggctgcactgctaactacactgctctgacgctgcgcacgctcaacacagcctccactgcactctctctctactcctctacgcctctccctctccactctagcgtggcgactgtgacacacagcgcacaacacaccgcctggctcctggcagcacacacaagttgccccgtgcacccacgcctctctacactctctcaaacaccaccctacatgcgcctgcctacacgctcgcttctctggaacccacacgtcacagcacacactacagagagccaagagatccaaaaaaccaactgtccatcatgtctcccgattccgagtattaaagcgacgtggggtcgaaatttcgatatccccgtgagttttatacccgaactgtccttccccttttagggggacaattgcgcctagttccgtgcactatcaccaaagccgaaatgggggcttcaacaccccattcccttgtgccacgcaactctccaggtcctactctaacacggcctggttacacttctccccgaataaacactgggcacgccgaggcaacgcggctggggttactggccggtcacaacacttagggtttgcttttctaatttggaacctgtggggaatttaaagtcccccctttttccaaagggctttaaaccgataatcatcacacggggcaatttacgggggatcttggggaacctcctgtgggggcgtctcttcgacaccgacgggcgtgggtgtatgccctttgaaagtttggagtgtgggctcacgacacaagatgtttccagattcttgtcccccaagttttattggcgaagaagggtcttccctttattccgtgtggtgaatttggagaaacacccttttgtggggggcagtcttatatttaaccctgtggggaaaaaacatctcccttagaggttgccacaattttttaactcacgagagtcggaagggggcgcttaccccaaatcaaacag

SEQ ID NO: 294096 - DNA, 2295 bp, Homo sapiens
gaagagccgcggcgtaacggcagccatcttgtttgtttgagtgaatcggaaaggaggcgccggctgtggcggcggcgggagctgctcggaagctacacctcgcaagggctcccccctttccccaccccctcccccgacccttttcccctccccgggccacccagcccgcccaactcccagcggagagcaaggttttcttctgttttcatagccagccagaacaatgttctacgcacattttgttctcagtaaaagagggcctctggccaaaatttggctagcggcccattgggataagaagctaaccaaagcccatgtgttcgagtgtaatttagagagcagcgtggagagtatcatctcaccaaaggtgaaaatggcattacggacatcaggacatctcttactgggagtagttcgaatctatcacaggaaagccaaataccttcttgcagactgtaatgaagcattcattaagataaagatggcttttcggccaggtgtggttgacctgcctgaggaaaatcgggaagcagcttataatgccattactttacctgaagaatttcatgactttgatcagccactgcctgacttagatgacatcgatgtggcccagcagttcagcttgaatcagagtagagtggaagagataaccatgagagaagaagttgggaacatcagtattttacaagaaaatgattttggtgattttggaatggatgatcgtgagataatgagagaaggcagtgcttttgaggatgacgacatgttagtaagcactactacttctaacctcctattagagtctgaacagagcaccagcaatctgaatgagaaaattaaccatttagaatatgaagatcaatataaggatgataattttggagaaggaaatgatggtggaatattagatgacaaacttattagtaataatgatggcggtatctttgatgatccccctgccctctctgaggcaggggtgatgttgccagagcagcctgcacatgacgatatggatgaggatgataatgtatcaatgggtgggcctgatagtcctgattcagtggatcccgttgaaccaatgccaaccatgactgatcaaacaacacttgttccaaatgaggaagaagcatttgcattggagcctattgatataactgttaaagaaacaaaagccaagaggaagaggaagctaattgttgacagtgtcaaagagttggatagcaagacaattagagcccaacttagtgattattcagatattgttactactttggatctggcaccgcccaccaagaaattgatgatgtggaaagagacaggaggagtagaaaaactgttttctttacctgctcagcctttgtggaataacagactactgaagctctttacacgctgtcttacaccgcttgtaccagaagaccttagaaaaaggaggaaaggaggagaggcagataatttggatgaattcctcaaagaatttgaaaatccagaggttcctagagaggaccagcaacagcagcatcagcagcgtgatgttatcgatgagcccattattgaagagccaagccgcctccaggagtcagtgatggaggccagcagaacaaacatagatgagtcagctatgcctccaccaccacctcagggagttaagcgaaaagctggacaaattgacccagagcctgtgatgcctcctcagcaggtagagcagatggaaataccacctgtagagcttcccccagaagaacctccaaatatctgtcagctaataccagagttagaacttctgccagaaaaagagaaggagaaagagaaggaaaaagaagatgatgaagaggaagaggatgaagatgcatcagggggcgatcaagatcaggaagaaagaagatggaacaaaaggactcagcagatgcttcatggtcttcagcgtgctcttgctaaaactggagctgaatctatcagtttgcttgagttatgtcgaaatacgaacagaaaacaagctgccgcaaagttctacagcttcttggttcttaaaaagcagcaagctattgagctgacacaggaagaaccgtacagtgacatcatcgcaacacctggaccaaggttccatattatataaggagctagaagcattatagctagtgtttgattcactagtgcttacaaacgcgcatccaagtctaggcgattagcagaacgccgtgcagtaccatagattcatgtctgcagatcgacttttaagcagacctcacattcctgctgtgatgagcagtgggaaacatgcgaaaccggtaa

SEQ ID NO: 294097 - DNA, 1892 bp, Homo sapiens
gaagagccgcggcgtaacggcagccatcttgtttgtttgagtgaatcggaaaggaggcgccggctgtggcggcggcgggagctgctcggaagctacacctcgcaagggctcccccctttccccaccccctcccccgacccttttcccctccccgggccacccagcccgcccaactcccagcggagagcaaggttttcttctgttttcatagccagccagaacaatgttctacgcacattttgttctcagtaaaagagggcctctggccaaaatttggctagcggcccattgggataagaagctaaccaaagcccatgtgttcgagtgtaatttagagagcagcgtggagagtatcatctcaccaaaggtgaaaatggcattacggacatcaggacatctcttactgggagtagttcgaatctatcacaggaaagccaaataccttcttgcagactgtaatgaagcattcattaagataaagatggcttttcggccaggtgtggttgacctgcctgaggaaaatcgggaagcagcttataatgccattactttacctgaagaatttcatgactttgatcagccactgcctgacttagatgacatcgatgtggcccagcagttcagcttgaatcagagtagagtggaagagataaccatgagagaagaagttgggaacatcagtattttacaagaaaatgattttggtgattttggaatggatgatcgtgagataatgagagaaggcagtgcttttgaggatgacgacatgttagtaagcactactacttctaacctcctattagagtctgaacagagcaccagcaatctgaatgagaaaattaaccatttagaatatgaagatcaatataaggatgataattttggagaaggaaatgatggtggaatattagatgacaaacttattagtaataatgatggcggtatctttgatgatccccctgccctctctgaggcaggggtgatgttgccagagcagcctgcacatgacgatatggatgaggatgataatgtatcaatgggtgggcctgatagtcctgattcagtggatcccgttgaaccaatgccaaccatgactgatcaaacaacacttgttccaaatgaggaagaagcatttgcattggagcctattgatataactgttaaagaaacaaaagccaagaggaagaggaagctaattgttgacagtgtcaaagagttggatagcaagacaattagagcccaacttagtgattattcagatattgttactactttggatctggcaccgcccaccaagaaattgatgatgtggaaagagacaggaggagtagaaaaactgttttctttacctgctcagcctttgtggaataacagactactgaagctctttacacgctgtcttacaccgcttgtaccagaagaccttagaaaaaggaggaaaggaggagaggcagataatttggatgaattcctcaaagaatttgaaaatccagaggttcctagagaggaccagcaacagcagcatcagcagcgtgatgttatcgatgagcccattattgaagagccaagccgcctccaggagtcagtgatggaggccagcagaacaaacatagatgagtcagctatgcctccaccaccacctcagggagttaagcgaaaagctggacaaattgacccagagcctgtgatgcctcctcagcaggtagagcagatggaaataccacctgtagagcttcccccagaagaacctccaaatatctgtcagctaataccagagttagaacttctgccagaaaaagagaaggagaaagagaaggaaaaagaagatgatgaagaggaagaggatgaagatgcatcaggggtcgacgcggccgcgaatttagtagtagtag

SEQ ID NO: 294098 - DNA, 496 bp, Homo sapiens
gtaccccctagttttagaagtttccatagcagaaatcatgtgactgttatgattatcagaatgtcttaactttttagggcaaagttaacactgaaagttctagcttaagtgttgaaacttttgtgggaaaaaaaaatcacttttgaaactcagacttcagtgtatacccaataatttaaaattatgtgaaatgttttaaatttgtgaactcgtaattactgttttaatgattcagtttcttcagagtggtaattgtataaaattgctattgcagctttatattcaatatgatgtgcctgtaaaccaaggagttttccccgtttgtaaaaagacattgtagataattgaatgtttgattttagaaaggtcattagtttcttgttacacattttgttagtctggtttttgttgcttatcgggtttaatattgttcttgaaaatagttgatgctatgttatgtataacttttctaataaaagttgtgttataagctgta

SEQ ID NO: 294099 - DNA, 902 bp, Homo sapiens
gaagagccgcggcgtaacggcagccatcttgtttgtttgagtgaatcggaaaggaggcgccggctgtggcggcggcgggagctgctcggaagctacacctcgcaagggctcccccctttccccaccccctcccccgacccttttcccctccccgggccacccagcccgcccaactcccagcggagagcaaggttttcttctgttttcatagccagccagaacaatgttctacgcacattttgttctcagtaaaagagggcctctggccaaaatttggctagcggcccattgggataagaagctaaccaaagcccatgtgttcgagtgtaatttagagagcagcgtggagagtatcatctcaccaaaggtgaaaatggcattacggacatcaggacatctcttactgggagtagttcgaatctatcacaggaaagccaaataccttcttgcagactgtaatgaagcattcattaagataaagatggcttttcggccaggtgtggttgacctgcctgaggaaaatcgggaagcagcttataatgccattactttacctgaagaatttcatgactttgatcagccactgcctgacttagatgacatcgatgtggcccagcagttcagcttgaatcagagtagagtggaagagataaccatgagagaagaagttgggaacatcagtattttacaagaaaatgattttggtgattttggaatggatgatcgtgagataatgagagaaggcagtgcttttgaggatgacgacatgttagtaagcactactacttctaacctcctattagagtctgaacagagcaccagcaatctgaatgagaaaattaaccatttagaataaaacaatcaaaattgaacaagaaatgttttgccactccaatattcct

SEQ ID NO: 294100 - DNA, 374 bp, Homo sapiens
gtaccccaatacgctgacctgcaccgaggccggcaacatggcttgcaggcgtggcagctcggcttgaatgcggtccacggtctcgacgatattcgcgccgggctggcgggagatcaccaggttgaccccgggcgtgtcgccggaccagggagctttatattcaatatgatgtgcctgtaaaccaaggagttttccccgtttgtaaaaagacattgtagataattgaatgtttgattttagaaaggtcattagtttcttgttacacattttgttagtctggtttttgttgcttatcgggtttaatattgttcttgaaaatagttgatgctatgttatgtataacttttctaataaaagttgtgttataagctgta

SEQ ID NO: 294101 - DNA, 266 bp, Homo sapiens
agagggcctctggccaaaatttggctagcggcccattgggataagaagctaaccaaagcccatgtgttcgagtgtaatttagagagcagcgtggagagtatcatctcaccaaaggtatgtttgatgttgacatttttattcactttgttgattgtttattgatatgtgaaatagaacttctaaaacagtttttttaggtaggggcattggagtgcaaggaaaatccttagaaatgtttctttattatgtgaagtccttatcacctc

SEQ ID NO: 294102 - DNA, 603 bp, Homo sapiens
tggaaaaagagaagtacttgtgcttcaaggtattttgcatatgttatcaacctttctatgagaatataaacttaggaagttatacctacttatctccctctgatccctagataatttatgggtagctagatatttaagcttagcatttcttttctaggtgtggttgacctgcctgaggaaaatcgggaagcagcttataatgccattactttacctgaagaatttcatgactttgatcagccactgcctgacttagagtatgtgtcttcttttaaaaaaaattgttgacttggtctgcaataagcagtagtattagcttccaaatgtatagttttccttggaatgttttacattaacagctaaaatgcatatatatatttatataggatagtatataaatatggaacataaaacctagaaagttgttcttctgtaagaaaatcatgtggatgtcagctttaacacagctaagatgtgagagttttgacaagcttaggccaaagcttacgtaaactgaaacagatacgcttgttatataatgatagcagggaatgtaaactgttgcttcatgatatttttcagagttatatattaaagtcagct

SEQ ID NO: 294103 - DNA, 226 bp, Homo sapiens
acattgtagataattgaatgtttgattttagaaaggtcattagtttcttgttacacattttgttagtctggtttttgttgcttatcgggtttaatattgttcttgaaaatagttgatgctatgttatgtataacttttctaataaaagttgtgttataagctgtacttttttgagtattcattattcagttggtggtggtccccaagggaaagttggctgaaaaag

SEQ ID NO: 294104 - DNA, 1083 bp, Homo sapiens
acgcaggtatgtcttcattatttaaatggtcaagtgctcttaaatttaggtagaagcatttgcctatacactctgcctcaccatttggttgtcattcctcttgtggcattaattgaattattggttttaaaataagatagaaactaatggaagttatatctttatggagactggaattttgaaatggattttgatcatttgttttattatttattattgtattcttttgtttttttccaacggttttgcagatatcagatgtgaatgtttaagatgtatttatttagataaatgacagattttatttttcaaaatagttgtctccgaaggagctatatgtgagcagtaaaagtcaaaggaccagattttatggctgaatgcaataatttatgagaaagaaacttacaactacattaccttttcaggtagtatgtatggtgtttcagagattcttaaaagtggagaaaacagtctgttgctttcaattttttaaatcttctcaatgttttagttttttgctctatgtactatacttttttaatagcagtcactgaactcacccctctcagttatcggatctttgttggttgtagtgcacacataataagttgttatggtgtatttctctttgtgtaggtgtccgccaccatggttcatttcacaaattaattttcatcacttactttgaagatttttaaattacttcatacatgcatacagttcagaaaaaacctcaaaccttgtataaaggtatacactgagaaactttgttcctctcctgctggtaacaatttttattagtttttatttcttcctagcttctttatgaataaaagcattgtgcttcttccattttacactactgctgacaatataaagtaatattttaccgcacagttcaatccattagtgataaatggtatttcagcatagtttttttgcattttcttatgaatgacattaggaatctttttttatatatttaagcacacttgttaatttttctgtgaactggttgatcatgttttttccattattttcaactgggttattcaattgtctttgatttctagcgctttttgt

SEQ ID NO: 294105 - DNA, 1323 bp, Homo sapiens
  misc_feature (189)..(189): n is a, c, g, or t
acattttctaatgtttacagaatgaagaggaacagtttatctgttgagaataaaattgtccagttgtcaggagcagcgaaacagccaaaagttgggttctactcttctctcaaccagactcatacacacacggttcttctagactgggggagtttgcctcaccatgtagtattacaaatttttcagtancttcctttactagatcgggcctgtgcatcttctgtatgtaggaggtggaatgaagtttttcatatttctgacctttggagaaagtttgaatttgaactgaaccagtcagctacttcatcttttaagtccactcatcctgatctcattcagcagatcattaaaaagcattttgctcatcttcagtatgtcagctttaaggttgacagtagcgctgagtcagcagaagctgcctgtgatatactctctcagctggtaaattgttccatccagaccttgggcttgatttcaacagccaagccaagtttcatgaatgtgtcggagtctcattttgtgtcagcacttacagttgtttttatcaactcaaaatcattatcatcaatcaaaattgaagatacaccagtggatgatccttcattgaagattcttgtggccaataatagtgacactctaagactcccaaagatgagtagctgtcctcatgtttcatctgatggaattctttgtgtagctgaccgttgtcaaggccttagagaactggcgttgaattattacatcctaactgatgaacttttccttgcactctcaagcgagactcatgttaaccttgaacatcttcgaattgatgttgtgagtgaaaatcctggacagattaaatttcatgctgttaaaaaacacagttgggatgcacttattaaacattcccctagagttaatgttgttatgcacttctttctatatgaagaggaattcgagacgttcttcaaagaagaaacccctgttactcacctttattttggtcgttcagtcagcaaagtggttttaggacgggtaggtctcaactgtcctcgactgattgagttagtggtgtgtgctaatgatcttcagcctcttgataatgaacttatttgtattgctgaacactgtacaaacctaacagccttgggcctcagcaaatgtgaagttagctgcagtgccttcatcaggtttgtaagactgtgtgagagaaggttaacacagctctctgtaatggaggaagttttgatccctgatgaggattatagcctagatgaaattcacactgaagtctccaaatacctgggaagagtatggttccctgatgtgatgcctctctgg

SEQ ID NO: 294106 - DNA, 768 bp, Homo sapiens
ctgcgccgaccggacggccggactccagcaccttggcccggcccgcgaacgctgagcacgcgcggaaaccctttaaagataggaagtgaaatcaaatggaggttggaggtggaatgaagtttttcatatttctgacctttggagaaagtttgaatttgaactgaaccagtcagctacttcatcttttaagtccactcatcctgatctcattcagcagatcattaaaaagcattttgctcatcttcagtatgtcagctttaaggttgacagtagcgctgagtcagcagaagctgcctgtgatatactctctcagctggtaaattgttccatccagaccttgggcttgatttcaacagccaagccaagtttcatgaatgtgtcggagtctcattttgtgtcagcacttacagttgtttttatcaactcaaaatcattatcatcaatcaaaattgaagatacaccagtggatgatccttcattgaagattcttgtggccaataatagtgacactctaagactcccaaagatgagtagctgtcctcatgtttcatctgatgatgggttacattttttaaagctagaatgatatgatatttttattacaataactataaagatgcaatttccttttgaaaattatatacctatgaagcataaattatttaagttttttcaaaagatttcttaatctgcaaggtaggtatagttatagtaagtttctcctgagatattttaattttacatatatacatatgcttttcattatat

SEQ ID NO: 294107 - DNA, 1239 bp, Homo sapiens
ataatcatcttaaactggaaactgcccaaaagtccatctgaggaagaatagataaatagatgaaagtatacgcatataatggaatatcatgcatcagaaagaacgtggatacaaaaacataaactgcataatcacgatgtggaatgaaagaagacccaaagagtgcatgctgtttaattctatttataccatttttagaaacaggaagaactaatacatggtgttagaacttgagatagtgattatcttgctgggaataatgactaagtggtagcacaagggatctctgggatgtgggtgatgttctttttcttgatctgggtgctgattacacaggtgtgttcactttttgaaattcacggagctatacatggatgtgttgtgcacttttatgtgtgtatttataccttgatggagtaaccaaacaacaaaaccaatacctggagtaccaggagatctagctttacctaaaacttagaagctttcaaaaatatttcacattcaactcttgcagaagtgccagcatttatgatttgtgggatttgagtaaatgcaagtatctatccattatggttagcattgctgaaagtggctttgtttatagattgttaagcaaaaccacatgggccacaggaaggaatgcctccaatcagctgtggggtttcgtgaagtgtgtgcatgaagcagaagttttcagagaaaatggtgaaacgtccttgaaagtgcctcagctgggagaggatcagaaaaaaatatctatcgggttttatcattttgaaagaagtacaaaatctctacgtatggaacctgcattaaataaatgagcatcaacatctccaggaggcaccccaggtgtagactccacctctcttacctcttccagatattcgaacaccattattgatagcattcttgttttgataaggtttctcctggcccacaatcattccagtgaatggtgcgtacacagtagatccagcagagcacaagacgtccacaccctggtgaggcctctgacttctaggatgtaaataagaacgaacagactgaggaactgccttaggggagctttactgcctgggaacatggtgttagcccactgtttgcagacgaggtaccaaagcttgaagctgccagaacatgttgggatgtcccaggatgcctcactctgtttagcccaattttaacctccctccccgcaggtgctaataaccatatcataaagatgaaagcatttaa

SEQ ID NO: 294108 - DNA, 1185 bp, Homo sapiens
ataatcatcttaaactggaaactgcccaaaagtccatctgaggaagaatagataaatagatgaaagtatacgcatataatggaatatcatgcatcagaaagaacgtggatacaaaaacataaactgcataatcacgatgtgtagaaacaggaagaactaatacatggtgttagaacttgagatagtgattatcttgctgggaataatgactaagtggtagcacaagggatctctgggatgtgggtgatgttctttttcttgatctgggtgctgattacacaggtgtgttcactttttgaaattcacggagctatacatggatgtgttgtgcacttttatgtgtgtatttataccttgatggagtaaccaaacaacaaaaccaatacctggagtaccaggagatctagctttacctaaaacttagaagctttcaaaaatatttcacattcaactcttgcagaagtgccagcatttatgatttgtgggatttgagtaaatgcaagtatctatccattatggttagcattgctgaaagtggctttgtttatagattgttaagcaaaaccacatgggccacaggaaggaatgcctccaatcagctgtggggtttcgtgaagtgtgtgcatgaagcagaagttttcagagaaaatggtgaaacgtccttgaaagtgcctcagctgggagaggatcagaaaaaaatatctatcgggttttatcattttgaaagaagtacaaaatctctacgtatggaacctgcattaaataaatgagcatcaacatctccaggaggcaccccaggtgtagactccacctctcttacctcttccagatattcgaacaccattattgatagcattcttgttttgataaggtttctcctggcccacaatcattccagtgaatggtgcgtacacagtagatccagcagagcacaagacgtccacaccctggtgaggcctctgacttctaggatgtaaataagaacgaacagactgaggaactgccttaggggagctttactgcctgggaacatggtgttagcccactgtttgcagacgaggtaccaaagcttgaagctgccagaacatgttgggatgtcccaggatgcctcactctgtttagcccaattttaacctccctccccgcaggtgctaataaccatatcataaagatgaaagcatttaa

SEQ ID NO: 294109 - DNA, 1731 bp, Homo sapiens
ctgcgccgaccggacggccggactccagcaccttggcccggcccgcgaacgctgagcacgcgcggaaaccctttaaagataggaagtgaaatcaaatggaggttggaggtggaatgaagtttttcatatttctgacctttggagaaagtttgaatttgaactgaaccagtcagctacttcatcttttaagtccactcatcctgatctcattcagcagatcattaaaaagcattttgctcatcttcagtatgtcagctttaaggttgacagtagcgctgagtcagcagaagctgcctgtgatatactctctcagctggtaaattgttccatccagaccttgggcttgatttcaacagccaagccaagtttcatgaatgtgtcggagtctcattttgtgtcagcacttacagttgtttttatcaactcaaaatcattatcatcaatcaaaattgaagatacaccagtggatgatccttcattgaagattcttgtggccaataatagtgacactctaagactcccaaagatgagtagctgtcctcatgtttcatctgatggaattctttgtgtagctgaccgttgtcaaggccttagagaactggcgttgaattattacatcctaactgatgaacttttccttgcactctcaagcgagactcatgttaaccttgaacatcttcgaattgatgttgtgagtgaaaatcctggacagattaaatttcatgctgttaaaaaacacagttgggatgcacttattaaacattcccctagagttaatgttgttatgcacttctttctatatgaagaggaattcgagacgttcttcaaagaagaaacccctgttactcacctttattttggtcgttcagtcagcaaagtggttttaggacgggtcaaatatttgattgtttgcaaactgtcgtgatggattgctgcagaaacatttggaaaaaaataagaaatttgaaaagcaagaaattgctgtaaatagggcacaagccctgtatatggattagatggtcgatatgccaaaaactacagatggtttctaagtagatttctcacctttccttggaggcatattgtagcttgctaaattgttaagcaaaaccacatgggccacaggaaggaatgcctccaatcagctgtggggtttcgtgaagtgtgtgcatgaagcagaagttttcagagaaaatggtgaaacgtccttgaaagtgcctcagctgggagaggatcagaaaaaaatatctatcgggttttatcattttgaaagaagtacaaaatctctacgtatggaacctgcattaaataaatgagcatcaacatctccaggaggcaccccaggtgtagactccacctctcttacctcttccagatattcgaacaccattattgatagcattcttgttttgataaggtttctcctggcccacaatcattccagtgaatggtgcgtacacagtagatccagcagagcacaagacgtccacaccctggtgaggcctctgacttctaggatgtaaataagaacgaacagactgaggaactgccttaggggagctttactgcctgggaacatggtgttagcccactgtttgcagacgaggtaccaaagcttgaagctgccagaacatgttgggatgtcccaggatgcctcactctgtttagcccaattttaacctccctccccgcaggtgctaataaccatatcataaagatgaaagcatttaa

SEQ ID NO: 294110 - DNA, 678 bp, Homo sapiens
agatggggccggggtttcaccatgttacccaggctagtctcaaactcctgagattacagacatgagccaccatgcccagcagtctttttcaattttttttgtgattctaagaagtttcggacaaggggaaaaatttaaaagataaaagttcattttaaaatatatgttttttttttactgtacatgggtttttttctgtaagatttaccaaacatcttgcctgcatttgtactttatatgtatcgatgtgaatgtgcctatcttgaaatattaactatagccagagattgtttttcttaattgagtatcatctccttcctttttatctccagtaaaacttcacttagaaaaataaattgaggccagggcgatggctcaggcctgtaatgccagcattttgggaggctaaggaaggtggatcacttgaggtcaggagttcaagaccagcctggccaacatggtgaaatcctgtctttactaaaatagctgggtgtggtggcgggtccctgtaatcccagctactcgggaggctgaggcaggagaatcacctgaacctgggaggcagaggttgcagtgagccgagattgtgccactgcagtccagtttgggtcacagagtgagattgtctcaaaaaaaaaaaaagaaagaaagaaagaaagaaaaagaaaaacaaaaaac

SEQ ID NO: 294111 - DNA, 1899 bp, Homo sapiens
acagaggcggtcaggaaaggagcggggaggggagagtggggcacaggcagcgcctcccgtctatgcgcctgtgtgcaaagtggcacaatgccccccttcctattggcagtgcagcccctggccagcaaccactcgcacctgggctgggggcctttgtgtagggcacacctgtgcagccacacctacttgtagagcctcatagactcagctgtggacaaaagcctcacgccccaaacagggaaatgggatctcaaggggaagaagctggggaggcctcacaccctgcccccatttcctcctatgtgggggaggggagcagcacgaactcctgaagacttgggagcgtcagcagcttctgcggaaggggtggggctgagggtggagagaggacagggaaggaagaaaaggggagccttcctggccagggtaaccggcactaagaggcctcactccaagcccccgaggagcctgtggtggggctggagacccggctcaggcccctccaccacccttaaagtcctcagaaggtgggaactgaactggcacaggctgggaaccggctgtgcgctggccacttgattttgccagctgccctgtaattcagctggtgaggaaactgaggcacagactgaggtagaatgattcgccagtcactcagcaagtcagcagacggggaggactgaatcccagcctgagagcaccgaagcttgtatccctgcaataccgagccccaagcctgcgagccccggtgcccatctctgagttaggccgtcttggaagggttcccttcctcctacaagatggtgtgtgaggagccttcaatacgacccggggtgtaaagtgtccaactctagtaggggcctgatggcatccccgccgagtcccaggagagagagagaagaccccttcctggagtccagggctcccgggaagaaacactggcatttgtccctttgcttcggcttctggaggcagagactctgagcccagggagagccttctgcagccccatttcctcaaaaatccaacctgcccaggtggcgggtcatgagctgtgctcaggaagctggaatctgaccctggtggcgtcgggcccagtctccatggcagccgagcatttattacccgggcctccacccagcttggcagactttagacttgaggctggaggaaagggaactgaacgcggttctgggagcagcaagcccacgggtagcagccgaggccccagaatggccaagtttctttcccaagaccaaattaatgagtacaaggaatgcttctccctgtatgacaagcagcagagggggaagataaaagccaccgacctcatggtggccatgaggtgcctgggggccagcccgacgccaggggaggtgcagcggcacctgcagacccacgggatagacggaaatggagagctggatttctccacttttctgaccattatgcacatgcaaataaaacaagaagacccaaagaaagaaattcttctagccatgttgatggtggacaaggagaagaaaggttacgtcatggcgtccgacctgcggtcaaaactcacgagtctgggggagaagctcacccacaaggaagtggatgatctcttcagggaagcagatatcgaacccaatggcaaagtgaagtatgatgaatttatccacaagatcacccttcctggacgggactattgaaggaggagaatgggagagcctcccctgggcctgaaaacttggagcaattaattttttttaaaaagtgttcttttcacttgggagagatggcaaacacagtggcaagacaacattacccaactatagaagagaggctaactagcaacaataatagatgatttcagccatggtatgagtagatctttaataaaagatttgtattgat

SEQ ID NO: 294112 - DNA, 1727 bp, Homo sapiens
acagaggcggtcaggaaaggagcggggaggggagagtggggcacaggcagcgcctcccgtctatgcgcctgtgtgcaaagtggcacaatgccccccttcctattggcagtgcagcccctggccagcaaccactcgcacctgggctgggggcctttgtgtagggcacacctgtgcagccacacctacttgtagagcctcatagactcagctgtggacaaaagcctcacgccccaaacagggaaatgggatctcaaggggaagaagctggggaggcctcacaccctgcccccatttcctcctatgtgggggaggggagcagcacgaactcctgaagacttgggagcgtcagcagcttctgcggaaggggtggggctgagggtggagagaggacagggaaggaagaaaaggggagccttcctggccagggtaaccggcactaagaggcctcactccaagcccccgaggagcctgtggtggggctggagacccggctcaggcccctccaccacccttaaagtcctcagaaggtgggaactgaactggcacaggctgggaaccggctgtgcgctggccacttgattttgccagctgccctgtaattcagctggtgaggaaactgaggcacagactgaggtagaatgattcgccagtcactcagcaagtcagcagacggggaggactgaatcccagcctgagagcaccgaagcttgtatccctgcaataccgagccccaagcctgcgagccccggtgcccatctctgagttaggccgtcttggaagggttcccttcctcctacaagatggtgtgtgaggagccttcaatacgacccggggtgtaaagtgtccaactctagtaggggcctgatggcatccccgccgagtcccaggagagagagagaagaccccttcctggagtccagggctcccgggaagaaacactggcatttgtccctttgcttcggcttctggaggcagagactctgagcccagggagagccttctgcagccccatttcctcaaaaatccaacctgcccaggtggcgggtcatgagctgtgctcaggaagctggaatctgaccctggtggcgtcgggcccagtctccatggcagccgagcatttattacccgggcctccacccagcttggcagactttagacttgaggctggaggaaagggaactgaacgcggttctgggagcagcaagcccacgggtagcagccgaggccccagaatgacggaaatggagagctggatttctccacttttctgaccattatgcacatgcaaataaaacaagaagacccaaagaaagaaattcttctagccatgttgatggtggacaaggagaagaaaggttacgtcatggcgtccgacctgcggtcaaaactcacgagtctgggggagaagctcacccacaaggaagtggatgatctcttcagggaagcagatatcgaacccaatggcaaagtgaagtatgatgaatttatccacaagatcacccttcctggacgggactattgaaggaggagaatgggagagcctcccctgggcctgaaaacttggagcaattaattttttttaaaaagtgttcttttcacttgggagagatggcaaacacagtggcaagacaacattacccaactatagaagagaggctaactagcaacaataatagatgatttcagccatggtatgagtagatctttaataaaagatttgtattgat

SEQ ID NO: 294113 - DNA, 1868 bp, Homo sapiens
acagaggcggtcaggaaaggagcggggaggggagagtggggcacaggcagcgcctcccgtctatgcgcctgtgtgcaaagtggcacaatgccccccttcctattggcagtgcagcccctggccagcaaccactcgcacctgggctgggggcctttgtgtagggcacacctgtgcagccacacctacttgtagagcctcatagactcagctgtggacaaaagcctcacgccccaaacagggaaatgggatctcaaggggaagaagctggggaggcctcacaccctgcccccatttcctcctatgtgggggaggggagcagcacgaactcctgaagacttgggagcgtcagcagcttctgcggaaggggtggggctgagggtggagagaggacagggaaggaagaaaaggggagccttcctggccagggtaaccggcactaagaggcctcactccaagcccccgaggagcctgtggtggggctggagacccggctcaggcccctccaccacccttaaagtcctcagaaggtgggaactgaactggcacaggctgggaaccggctgtgcgctggccacttgattttgccagctgccctgtaattcagctggtgaggaaactgaggcacagactgaggtagaatgattcgccagtcactcagcaagtcagcagacggggaggactgaatcccagcctgagagcaccgaagcttgtatccctgcaataccgagccccaagcctgcgagccccggtgcccatctctgagttaggccgtcttggaagggttcccttcctcctacaagatggtgtgtgaggagccttcaatacgacccggggtgtaaagtgtccaactctagtaggggcctgatggcatccccgccgagtcccaggagagagagagaagaccccttcctggagtccagggctcccgggaagaaacactggcatttgtccctttgcttcggcttctggaggcagagactctgagcccagggagagccttctgcagccccatttcctcaaaaatccaacctgcccaggtggcgggtcatgagctgtgctcaggaagctggaatctgaccctggtggcgtcgggcccagtctccatggcagccgagcatttattacccgggcctccacccagcttggcagactttagacttgaggctggaggaaagggaactgaacgcggttctgggagcagcaagcccacgggtagcagccgaggccccagaatgagtacaaggaatgcttctccctgtatgacaagcagcagagggggaagataaaagccaccgacctcatggtggccatgaggtgcctgggggccagcccgacgccaggggaggtgcagcggcacctgcagacccacgggatagacggaaatggagagctggatttctccacttttctgaccattatgcacatgcaaataaaacaagaagacccaaagaaagaaattcttctagccatgttgatggtggacaaggagaagaaaggttacgtcatggcgtccgacctgcggtcaaaactcacgagtctgggggagaagctcacccacaaggaagtggatgatctcttcagggaagcagatatcgaacccaatggcaaagtgaagtatgatgaatttatccacaagatcacccttcctggacgggactattgaaggaggagaatgggagagcctcccctgggcctgaaaacttggagcaattaattttttttaaaaagtgttcttttcacttgggagagatggcaaacacagtggcaagacaacattacccaactatagaagagaggctaactagcaacaataatagatgatttcagccatggtatgagtagatctttaataaaagatttgtattgat

SEQ ID NO: 294114 - DNA, 954 bp, Homo sapiens
tttagaaataccataagatttacaccaggcggggaataactgtgggtcccgagtgaggtgcccacattagttaacccctgcgtgtatatgttattcaatcccaagcctctccctggttcattaattttcctggaacattacaaccctgccacgtactggtccaagtggcgaccttcctcatatttaggacctaggtgatcaaccggcattgctccattccatagcactgtgtttcattccacaagttaatctaagccctagtctaccgtatctgcagctaaagatctttcccctccagcaattactacttgtaggttacaggtgccattgtaattatacccattcattttacccttttcgttgtttgacactatggtcataactcagctcatttatcactagcatctgtatagtatctcgcgagtgtgaatgctaagagcaccgtcggcctgtcgtataaacaacacgtacgggagctagagtgaaccagcgtggaatttcaggaatgagccttgaacccaggaccaggagtaaggtcacagccctgtcctcgggtagaggtattgaatcggcacacattaataggatcttagactcttggaccactcgaatcccttcaatgagcagggagtaccgtgaatgacgacgccccatggttctcatgaccattccacaccacacccgtgtgtttttggcaagttatatttgcagattcctgttaggcaaaatgagattcataaaacttcgctttaacaaccactaggtgggactattcagtgatagaatatagacataccaaagattagatgggagatagataccaatgatttagatggcacaggaagagcaagttctggatataataaatgagggtactttccgtcaaagcttttctatgtctatatttatcactgaatagtcccagtatggttttaaagcaagttttatgaatct

SEQ ID NO: 294115 - DNA, 1718 bp, Homo sapiens
aagatcaaggtttacatccattaagttcttgagccaatgatggcatcaggattagtacccaattcttctgatatcaaagactgacctaaaaactatgcaatagtttttagaaaaactattgctagaaaaaaaatgctgaaagaaaacccatccaagatgttaccaagtggttctctctggtaatgggattatgggtgatttttgttccttttattgtttcctgtattttcaacaatgagaacacatacagcttttcataatcagaaacaagttttatgttttgttttgctttttctaagaaaaaaagtagtttcagagcctggggttgctgtttgcattgggggctggacactcaggaaggagggactggcgcaggggaagggcatccgctgggaatagcacttgacccggagcccataggctgctgctcagtctcaggtcaccagcttcctcatctcaggggggtcaccaccatctgctagggttaccagaggccccactagaggatgcctgcagttgcgctgggagcccaccctggggcaggccacgctgggcccaggtgggcctctgaaagcctgcagcctggcggtgggttgctcagtggtctgatacctgagatcccccatgtccagctccaaaggggtggtggtttccttgatttctgtcccctccaaacaggaagttgtagtccagggaagttttgatttcctgcagttacatcccagccagggcccgtggaggaggggctgggatggagactgcagtgaggggaaggcaggtgagcagcccagcctgcgactgaggcttgagaccccaggtgggggtgctgatccatcctggtaagatgtactgtggtggctgtcaaaggtggaatgcacacatggacctgtttccctccagttcagggcaggagggaagcgctagaagggagcagaggagcccagtcctccatctgtggttgggaacccactttcttgagctttggggtgatgataagcatcgtcactgaggacgttgctgaaatgaagaatgtccagtccagtgaggggcctgtcgtgggaactcggtgggaggggatgcatcctcttcactgtgaccactgccacatcctggcattccctggtcagttgaccttgaaccggctgtgcaggtccagcaggaggccagctggcttcctaggagtctttttccctctgctcactctgctgtgtttgcgggtttcctagacggaaatggagagctggatttctccacttttctgaccattatgcacatgcaaataaaacaagaagacccaaagaaagaaattcttctagccatgttgatggtggacaaggagaagaaaggttacgtcatggcgtccgacctgcggtcaaaactcacgagtctgggggagaagctcacccacaaggaagtggatgatctcttcagggaagcagatatcgaacccaatggcaaagtgaagtatgatgaatttatccacaagatcacccttcctggacgggactattgaaggaggagaatgggagagcctcccctgggcctgaaaacttggagcaattaattttttttaaaaagtgttcttttcacttgggagagatggcaaacacagtggcaagacaacattacccaactatagaagagaggctaactagcaacaataatagatgatttcagccatggtatgagtagatctttaataaaagatttgtattgat

SEQ ID NO: 294116 - DNA, 914 bp, Homo sapiens
gaatttcagacaaacaacaaatacttttccaatagaagtatatgtcctatgcaaaatttggggcatacaataaaagtatattcagtgtttatctgaattcggtttaacttggcagtcctgtattttcatttgctgtatctagcacccttgggaggggagagagggatggagggagtaggcaaaaggaaggggaaaagagggagaagagactaaggatggggagggcggcatgggcggagagtgaccagacgctgctgaccctccctctgggccgtgtgcagagtacaaggaatgcttctccctgtatgacaagcagcagagggggaagataaaagccaccgacctcatggtggccatgaggtgcctgggggccagcccgacgccaggggaggtgcagcggcacctgcagacccacgggatagacggaaatggagagctggatttctccacttttctgaccattatgcacatgcaaataaaacaagaagacccaaagaaagaaattcttctagccatgttgatggtggacaaggagaagaaaggttacgtcatggcgtccgacctgcggtcaaaactcacgagtctgggggagaagctcacccacaaggaagtggatgatctcttcagggaagcagatatcgaacccaatggcaaagtgaagtatgatgaatttatccacaagatcacccttcctggacgggactattgaaggaggagaatgggagagcctcccctgggcctgaaaacttggagcaattaattttttttaaaaagtgttcttttcacttgggagagatggcaaacacagtggcaagacaacattacccaactatagaagagaggctaactagcaacaataatagatgatttcagccatggtatgagtagatctttaataaaagatttgtattgat

SEQ ID NO: 294117 - DNA, 768 bp, Homo sapiens
  misc_feature (19)..(19): n is a, c, g, or t
  misc_feature (31)..(31): n is a, c, g, or t
  misc_feature (39)..(39): n is a, c, g, or t
  misc_feature (42)..(42): n is a, c, g, or t
  misc_feature (48)..(48): n is a, c, g, or t
  misc_feature (59)..(59): n is a, c, g, or t
  misc_feature (76)..(76): n is a, c, g, or t
  misc_feature (78)..(78): n is a, c, g, or t
aaaggcaaggggctggagntaaaccggaggntccccggnggnaaaatntccactcgcgngccaatggcgaatgccnangtcagccacgggtagcagcgaggccagaatggcaagttctttccaagacaaattatgagtacaaggaatgcttctccctgtatgacaagcagcagagggggaagataaaagccaccgacctcatggtggccatgaggtgcctgggggccagcccgacgccaggggaggtgcagcggcacctgcagacccacgggatagacggaaatggagagctggatttctccacttttctgaccattatgcacatgcaaataaaacaagaagacccaaagaaagaaattcttctagccatgttgatggtggacaaggagaagaaaggttacgtcatggcgtccgacctgcggtcaaaactcacgagtctgggggagaagctcacccacaaggaagtggatgatctcttcagggaagcagatatcgaacccaatggcaaagtgaagtatgatgaatttatccacaagatcacccttcctggacgggactattgaaggaggagaatgggagagcctcccctgggcctgaaaacttggagcaattaattttttttaaaaagtgttcttttcacttgggagagatggcaaacacagtggcaagacaacattacccaactatagaagagaggctaactagcaacaataatagatgatttcagccatggtatgagtagatctttaataaaagatttgtattgat

SEQ ID NO: 294118 - DNA, 1064 bp, Homo sapiens
agttcgatggcgaagttccgatgcgaagttgtagtccagggaagttttgatttcctgcagttacatcccagccagggcccgtggaggaggggctgggatggagactgcagtgaggggaaggcaggtgagcagcccagcctgcgactgaggcttgagaccccaggtgggggtgctgatccatcctggtaagatgtactgtggtggctgtcaaaggtggaatgcacacatggacctgtttccctccagttcagggcaggagggaagcgctagaagggagcagaggagcccagtcctccatctgtggttgggaacccactttcttgagctttggggtgatgataagcatcgtcactgaggacgttgctgaaatgaagaatgtccagtccagtgaggggcctgtcgtgggaactcggtgggaggggatgcatcctcttcactgtgaccactgccacatcctggcattccctggtcagttgaccttgaaccggctgtgcaggtccagcaggaggccagctggcttcctaggagtctttttccctctgctcactctgctgtgtttgcgggtttcctagacggaaatggagagctggatttctccacttttctgaccattatgcacatgcaaataaaacaagaagacccaaagaaagaaattcttctagccatgttgatggtggacaaggagaagaaaggttacgtcatggcgtccgacctgcggtcaaaactcacgagtctgggggagaagctcacccacaaggaagtggatgatctcttcagggaagcagatatcgaacccaatggcaaagtgaagtatgatgaatttatccacaagatcacccttcctggacgggactattgaaggaggagaatgggagagcctcccctgggcctgaaaacttggagcaattaattttttttaaaaagtgttcttttcacttgggagagatggcaaacacagtggcaagacaacattacccaactatagaagagaggctaactagcaacaataatagatgatttcagccatggtatgagtagatctttaataaaagatttgtattgat

SEQ ID NO: 294119 - DNA, 3543 bp, Homo sapiens
aagatcaaggtttacatccattaagttcttgagccaatgatggcatcaggattagtacccaattcttctgatatcaaagactgacctaaaaactatgcaatagtttttagaaaaactattgctagaaaaaaaatgctgaaagaaaacccatccaagatgttaccaagtggttctctctggtaatgggattatgggtgatttttgttccttttattgtttcctgtattttcaacaatgagaacacatacagcttttcataatcagaaacaagttttatgttttgttttgctttttctaagaaaaaaagtagtttcagagcctggggttgctgtttgcattgggggctggacactcaggaaggagggactggcgcaggggaagggcatccgctgggaatagcacttgacccggagcccataggctgctgctcagtctcaggtcaccagcttcctcatctcaggggggtcaccaccatctgctagggttaccagaggccccactagaggatgcctgcagttgcgctgggagcccaccctggggcaggccacgctgggcccaggtgggcctctgaaagcctgcagcctggcggtgggttgctcagtggtctgatacctgagatcccccatgtccagctccaaaggggtggtggtttccttgatttctgtcccctccaaacaggaagttgtagtccagggaagttttgatttcctgcagttacatcccagccagggcccgtggaggaggggctgggatggagactgcagtgaggggaaggcaggtgagcagcccagcctgcgactgaggcttgagaccccaggtgggggtgctgatccatcctggtaagatgtactgtggtggctgtcaaaggtggaatgcacacatggacctgtttccctccagttcagggcaggagggaagcgctagaagggagcagaggagcccagtcctccatctgtggttgggaacccactttcttgagctttggggtgatgataagcatcgtcactgaggacgttgctgaaatgaagaatgtccagtccagtgaggggcctgtcgtgggaactcggtgggaggggatgcatcctcttcactgtgaccactgccacatcctggcattccctggtcagttgaccttgaaccggctgtgcaggtccagcaggaggccagctggcttcctaggagtctttttccctctgctcactctgctgtgtttgcgggtttcctagacggaaatggagagctggatttctccacttttctgaccattatgcacatgcaaataaaacaagaagacccaaagaaagaaattcttctagccatgttgatggtggacaaggagaagaaaggttacgtcatggcgtccgacctgcggtcaaaactcacgagtctgggggagaagctcacccacaaggaagtggatgatctcttcagggaagcagatatcgaacccaatggcaaagtgaagtatgatgaatttatccacaagatcacccttcctggacgggactattgaaggaggagaatgggagagcctcccctgggcctgaaaacttggagcaattaattttttttaaaaagtgttcttttcacttgggagagatggcaaacacagtggcaagacaacattacccaactatagaagagaggctaactagcaacaataatagatgatttcagccatggtatgagtagatctttaataaaagatttgtattgatctcttattaactaccgtgagtccggccctttcaagcatggaaggagcctgcggtttggagtctggcctgggttccagtcctggctctgctgcttcccactgtgactttgggcaaatcatttcactcctcaaagcccccccacacaagctggattcccacttcttacctcatggagcctgttgaggaaggattgagctgatgacttaagggcaatctaccaagagacttattctgtatttgggggctagaaccatcttccatatttccaagattttccaagatgaagccagtgctagctgagaagcagcaatgaacagaaagctgtaacacttatgacaacaattcttgcagtgccagaggcccatttacaaattctcatttccatctcaacagatatagtgacatagctcaggctattcattcataaacacagagtgtagagtgaaaacactagagtgaaaacacatgctacaatgaggcagcatcagctgagagcaggaagagcgatctactttacaccccacaccaaaggaaaccagatgtgagctgctaaattgactggccttgcagagctcaagaagggggcttccaatgctgtgagaattccgagctgttccctgggctctgttaacaggcagagaggttccgggatggtctgctcaagtggcccacactggtcattgccttaagccacctccccaggacttacggagagaaataaggggatgtaaccagcaatggccagggtacaacagccctggaaaacagtagtaggagcactaggctttctgggagtccatccagctggagtggctttgagtgagttacacagctagaaggtgccaggttggtgctgccagagattcagaggtgccatacacttgtcaaatctggatcattcgtagtgccagcacagtcctaaaagggctggagtaccacaccaacacaggtaggggtgcagggcttcaagtacaaagatttgcatccatgtatgtatcaaaagtgggttctctgggctgtggctttgtctagtagtaccacagtggctaaagtagaagaaaaccaaatcaaatgggatgtgtcttttgggaggatgtacaagacacaaatctttcactaggcaccgggcacagggaaaactgcagggaacaagagttgtagtgttagtgcaactgtctcaacgatgctgtgtggcttcagacccaaacaaggccctgaggaaggagactctcatttccccaagcataactgcaaggagaggaggaattcctaggagccaaagagttttgtggggtgagggtaaataaatggcccaaatgccaactaggtgaagttgtgaccatctggctgggaagcccaggtccacacagtgtaggagcagatgttttgtggggtctgaggtttacgagatttggctgccttaagaatacaaaaacagaaatgcagaatttctggggctgctcctaggaccagaacaagtgaagggtcctggtgcttaaacttcattaccttcatggtaaatccaccagagggccggttagatgctggccccgccgagagaactgctgtcactttcaggcaaagctcaaaggtcctaggcccacagttcttttgagctccagtcatggacattaggaagtaaatcctgcacagccaacctggaataccaaagattagatgggagatagataccaatgatttagatggcacaggaagagcaagttctggatataataaatgagggtactttccgtcaaagcttttctatgtctatatttatcactgaatagtcccagtatggttttaaagcaagttttatgaatct

SEQ ID NO: 294120 - DNA, 3693 bp, Homo sapiens
acagaggcggtcaggaaaggagcggggaggggagagtggggcacaggcagcgcctcccgtctatgcgcctgtgtgcaaagtggcacaatgccccccttcctattggcagtgcagcccctggccagcaaccactcgcacctgggctgggggcctttgtgtagggcacacctgtgcagccacacctacttgtagagcctcatagactcagctgtggacaaaagcctcacgccccaaacagggaaatgggatctcaaggggaagaagctggggaggcctcacaccctgcccccatttcctcctatgtgggggaggggagcagcacgaactcctgaagacttgggagcgtcagcagcttctgcggaaggggtggggctgagggtggagagaggacagggaaggaagaaaaggggagccttcctggccagggtaaccggcactaagaggcctcactccaagcccccgaggagcctgtggtggggctggagacccggctcaggcccctccaccacccttaaagtcctcagaaggtgggaactgaactggcacaggctgggaaccggctgtgcgctggccacttgattttgccagctgccctgtaattcagctggtgaggaaactgaggcacagactgaggtagaatgattcgccagtcactcagcaagtcagcagacggggaggactgaatcccagcctgagagcaccgaagcttgtatccctgcaataccgagccccaagcctgcgagccccggtgcccatctctgagttaggccgtcttggaagggttcccttcctcctacaagatggtgtgtgaggagccttcaatacgacccggggtgtaaagtgtccaactctagtaggggcctgatggcatccccgccgagtcccaggagagagagagaagaccccttcctggagtccagggctcccgggaagaaacactggcatttgtccctttgcttcggcttctggaggcagagactctgagcccagggagagccttctgcagccccatttcctcaaaaatccaacctgcccaggtggcgggtcatgagctgtgctcaggaagctggaatctgaccctggtggcgtcgggcccagtctccatggcagccgagcatttattacccgggcctccacccagcttggcagactttagacttgaggctggaggaaagggaactgaacgcggttctgggagcagcaagcccacgggtagcagccgaggccccagaatgagtacaaggaatgcttctccctgtatgacaagcagcagagggggaagataaaagccaccgacctcatggtggccatgaggtgcctgggggccagcccgacgccaggggaggtgcagcggcacctgcagacccacgggatagacggaaatggagagctggatttctccacttttctgaccattatgcacatgcaaataaaacaagaagacccaaagaaagaaattcttctagccatgttgatggtggacaaggagaagaaaggttacgtcatggcgtccgacctgcggtcaaaactcacgagtctgggggagaagctcacccacaaggaagtggatgatctcttcagggaagcagatatcgaacccaatggcaaagtgaagtatgatgaatttatccacaagatcacccttcctggacgggactattgaaggaggagaatgggagagcctcccctgggcctgaaaacttggagcaattaattttttttaaaaagtgttcttttcacttgggagagatggcaaacacagtggcaagacaacattacccaactatagaagagaggctaactagcaacaataatagatgatttcagccatggtatgagtagatctttaataaaagatttgtattgatctcttattaactaccgtgagtccggccctttcaagcatggaaggagcctgcggtttggagtctggcctgggttccagtcctggctctgctgcttcccactgtgactttgggcaaatcatttcactcctcaaagcccccccacacaagctggattcccacttcttacctcatggagcctgttgaggaaggattgagctgatgacttaagggcaatctaccaagagacttattctgtatttgggggctagaaccatcttccatatttccaagattttccaagatgaagccagtgctagctgagaagcagcaatgaacagaaagctgtaacacttatgacaacaattcttgcagtgccagaggcccatttacaaattctcatttccatctcaacagatatagtgacatagctcaggctattcattcataaacacagagtgtagagtgaaaacactagagtgaaaacacatgctacaatgaggcagcatcagctgagagcaggaagagcgatctactttacaccccacaccaaaggaaaccagatgtgagctgctaaattgactggccttgcagagctcaagaagggggcttccaatgctgtgagaattccgagctgttccctgggctctgttaacaggcagagaggttccgggatggtctgctcaagtggcccacactggtcattgccttaagccacctccccaggacttacggagagaaataaggggatgtaaccagcaatggccagggtacaacagccctggaaaacagtagtaggagcactaggctttctgggagtccatccagctggagtggctttgagtgagttacacagctagaaggtgccaggttggtgctgccagagattcagaggtgccatacacttgtcaaatctggatcattcgtagtgccagcacagtcctaaaagggctggagtaccacaccaacacaggtaggggtgcagggcttcaagtacaaagatttgcatccatgtatgtatcaaaagtgggttctctgggctgtggctttgtctagtagtaccacagtggctaaagtagaagaaaaccaaatcaaatgggatgtgtcttttgggaggatgtacaagacacaaatctttcactaggcaccgggcacagggaaaactgcagggaacaagagttgtagtgttagtgcaactgtctcaacgatgctgtgtggcttcagacccaaacaaggccctgaggaaggagactctcatttccccaagcataactgcaaggagaggaggaattcctaggagccaaagagttttgtggggtgagggtaaataaatggcccaaatgccaactaggtgaagttgtgaccatctggctgggaagcccaggtccacacagtgtaggagcagatgttttgtggggtctgaggtttacgagatttggctgccttaagaatacaaaaacagaaatgcagaatttctggggctgctcctaggaccagaacaagtgaagggtcctggtgcttaaacttcattaccttcatggtaaatccaccagagggccggttagatgctggccccgccgagagaactgctgtcactttcaggcaaagctcaaaggtcctaggcccacagttcttttgagctccagtcatggacattaggaagtaaatcctgcacagccaacctggaataccaaagattagatgggagatagataccaatgatttagatggcacaggaagagcaagttctggatataataaatgagggtactttccgtcaaagcttttctatgtctatatttatcactgaatagtcccagtatggttttaaagcaagttttatgaatct

SEQ ID NO: 294121 - DNA, 206 bp, Homo sapiens
aaaattaaatgtgatttattgcagtggatgatctcttcagggaagcagatatcgaacccaatggcaaagtgaagtatgatgaatttatccacaagatcacccttcctggacgggactattgaaggaggagaatgggagagcctcccctgggcctgaaaacttggagcaattaattttttttaaaaagtgttcttttcacttgggag

SEQ ID NO: 294122 - DNA, 532 bp, Homo sapiens
cccggggtgtaaagtgtccaactctagtaggggcctgatggcatccccgccgagtcccaggagagagagagaagaccccttcctggagtccagggctcccgggaagaaacactggcatttgtccctttgcttcggcttctggaggcagagactctgagcccagggagagccttctgcagccccatttcctcaaaaatccaacctgcccaggtggcgggtcatgagctgtgctcaggaagctggaatctgaccctggtggcgtcgggcccagtctccatggcagccgagcatttattacccgggcctccacccagcttggcagactttagacttgaggctggaggaaagggaactgaacgcggttctgggagcagcaagcccacgggtagcagccgaggccccagaatggtgagtgtgagggtctgtgtcggcctggccagggctgggggcgtgaacctcaggtggagccctcccctgactgttttcctttctctgctgcaggccaagtttctttcccaagaccaaattaatg

SEQ ID NO: 294123 - DNA, 408 bp, Homo sapiens
ctcagtactgtaaaagggcggaaacagacagagatgaaaactcactatgctgcccagactcgtctcgaactcctgggtgtcacgcgtgtccgtatagaagaccacctaaacaggctttgtgttcacgtgttgaaatcctaactccaaatatgatgataggaggagatggggccttcgggaggtgatgaggtcatgagggtggaatcctcatgaatggtctcaacgcccttagaaaagagaccccagagacctcgctcccgctttctactgtgggagaatgcagcaagaagtcagccgtctatgaacaaggaagcaggtcctctccaggcactgaatgtaccagtgccttgatcttggacttcccagcctccagaactatgacaataaattctgttgtttaagctacat

SEQ ID NO: 294124 - DNA, 1424 bp, Homo sapiens
  misc_feature (3)..(3): n is a, c, g, or t
ggnaagcaagggccctacacagacccgcactgacctggaaaagcttcgggagcggcgacgggaaggcagcaggaggtggtgcggggacccgaggcgcctcgtacccggccgggctgacgcggccccgctacacacaaagcgcttcagctgcacagggcgctattttccgaaaatgccgcgtctggtcggcgcccaaaatccccaccgaaaagtcccccgtgctgcgcgcggagggacacatggtgtgcgagtgagtcaagctcccagcatccctcccggacccggccctcttcagctcatcgcccgaggattttccgcctctgccctcgtcggcagatcctgctcctacccactccctagctgtgttcccgcggggagagaggggaaagagggtctgattttttaacgaagggaaagaaaatatgccatttctagcgcttcagccacacaaagaaagcggcggaatgatccgctctcggcgaccgcaagtcccggctcgcccggcgcctgcgcggcagcgggggtgggagctgcggacggccatgtgcgcggcggagaggccgggtggccaccgaaccttcccgcctgttctgcggtgggtaggagtttggaaactaatgttcctgtgctaaccttcgtgtctctgtgacatgactgttgaaagacggagagtgcggaatctttggagttttaagcttgccaactgtgcggcctagcagaatcctgggagacggaaggacagccaagaggctaggatttacctttaagtgtccctagattcaactaggcagactgggacgggagacgctgtgaaggtaccagggaaggaacgagtgaggttccttttccactttttcataaactcaacagtcaggttcatgacgaagatatagatatttctgtagattttttccccaacattctaattatgcctcatgtttcgtagatcctagtaactgcttggattactgccacctcagaggtagagatctgtttttccgtggctggaatgccaaaaattttgttgtattttattaagaaagtagcaaaagtttggagatttgcaaagttaaaaaaaaaaaaagcattatgaacttaatctagatgtgatttgctaaggaacttaatatattgatatgtttttcacaggggcgtctgggcatggctttcccaacctagtaactgcaacttttagcatcctacatgtaggacttgggaatatgtgagacagcgccaagaatttaatccaggagaattgacaagcttaaatgaaatccatattgcccactgattttgtgcagcttcagataagtaatctttctccacttagccttttgtaacaattgatgtaataaaggtttgtagtctttgtgtaatttattaaagcattgtgcctaaaatagaaaaaaagcataggaaccata

SEQ ID NO: 294125 - DNA, 1387 bp, Homo sapiens
  misc_feature (3)..(3): n is a, c, g, or t
ggnaagcaagggccctacacagacccgcactgacctggaaaagcttcgggagcggcgacgggaaggcagcaggaggtggtgcggggacccgaggcgcctcgtacccggccgggctgacgcggccccgctacacacaaagcgcttcagctgcacagggcgctattttccgaaaatgccgcgtctggtcggcgcccaaaatccccaccgaaaagtcccccgtgctgcgcgcggagggacacatggtgtgcgagtgagtcaagctcccagcatccctcccggacccggcccctcgtcggcagatcctgctcctacccactccctagctgtgttcccgcggggagagaggggaaagagggtctgattttttaacgaagggaaagaaaatatgccatttctagcgcttcagccacacaaagaaagcggcggaatgatccgctctcggcgaccgcaagtcccggctcgcccggcgcctgcgcggcagcgggggtgggagctgcggacggccatgtgcgcggcggagaggccgggtggccaccgaaccttcccgcctgttctgcggtgggtaggagtttggaaactaatgttcctgtgctaaccttcgtgtctctgtgacatgactgttgaaagacggagagtgcggaatctttggagttttaagcttgccaactgtgcggcctagcagaatcctgggagacggaaggacagccaagaggctaggatttacctttaagtgtccctagattcaactaggcagactgggacgggagacgctgtgaaggtaccagggaaggaacgagtgaggttccttttccactttttcataaactcaacagtcaggttcatgacgaagatatagatatttctgtagattttttccccaacattctaattatgcctcatgtttcgtagatcctagtaactgcttggattactgccacctcagaggtagagatctgtttttccgtggctggaatgccaaaaattttgttgtattttattaagaaagtagcaaaagtttggagatttgcaaagttaaaaaaaaaaaaagcattatgaacttaatctagatgtgatttgctaaggaacttaatatattgatatgtttttcacaggggcgtctgggcatggctttcccaacctagtaactgcaacttttagcatcctacatgtaggacttgggaatatgtgagacagcgccaagaatttaatccaggagaattgacaagcttaaatgaaatccatattgcccactgattttgtgcagcttcagataagtaatctttctccacttagccttttgtaacaattgatgtaataaaggtttgtagtctttgtgtaatttattaaagcattgtgcctaaaatagaaaaaaagcataggaaccata

SEQ ID NO: 294126 - DNA, 1090 bp, Homo sapiens
  misc_feature (3)..(3): n is a, c, g, or t
ggnaagcaagggccctacacagacccgcactgacctggaaaagcttcgggagcggcgacgggaaggcagcaggaggtggtgcggggacccgaggcgcctcgtacccggccgggctgacgcggccccgctacacacaaagcgcttcagctgcacagggcgctattttccgaaaatgccgcgtctggtcggcgcccaaaatccccaccgaaaagtcccccgtgctgcgcgcggagggacacatggtgtgcgagtgagtcaagctcccagcatccctcccggacccggccctcttcagctcatcgcccgaggattttccgcctctgccctcgtcggcagatcctgctcctacccactccctagctgtgttcccgcggggagagaggggaaagagggtctgattttttaacgaagggaaagaaaatatgccatttctagcgcttcagccacacaaagaaagcggcggaatgatccgctctcggcgaccgcaagtcccggctcgcccggcgcctgcgcggcagcgggggtgggagctgcggacggccatgtgcgcggcggagaggccgggtggccaccgaaccttcccgcctgttctgcggtgggtaggagtttggaaactaatgttcctgtgctaaccttcgtgtctctgtgacatgactgttgaaagacggagagtgcggaatctttggagttttaagcttgccaactgtgcggcctagcagaatcctgggagacggaaggacagccaagaggctaggatttacctttaagtgtccctagattcaactaggcagactgggacgggagacgctgtgaaggggcgtctgggcatggctttcccaacctagtaactgcaacttttagcatcctacatgtaggacttgggaatatgtgagacagcgccaagaatttaatccaggagaattgacaagcttaaatgaaatccatattgcccactgattttgtgcagcttcagataagtaatctttctccacttagccttttgtaacaattgatgtaataaaggtttgtagtctttgtgtaatttattaaagcattgtgcctaaaatagaaaaaaagcataggaaccata

SEQ ID NO: 294127 - DNA, 870 bp, Homo sapiens
  misc_feature (3)..(3): n is a, c, g, or t
ggnaagcaagggccctacacagacccgcactgacctggaaaagcttcgggagcggcgacgggaaggcagcaggaggtggtgcggggacccgaggcgcctcgtacccggccgggctgacgcggccccgctacacacaaagcgcttcagctgcacagggcgctattttccgaaaatgccgcgtctggtcggcgcccaaaatccccaccgaaaagtcccccgtgctgcgcgcggagggacacatggtgtgcgagtgagtcaagctcccagcatccctcccggacccggccctcttcagctcatcgcccgaggattttccgcctctgccctcgtcggcagatcctgctcctacccactccctagctgtgttcccgcggggagagaggggaaagagggtctgattttttaacgaagggaaagaaaatatgccatttctagcgcttcagccacacaaagaaagcggcggaatgatccgctctcggcgaccgcaagtcccggctcgcccggcgcctgcgcggcagcgggggtgggagctgcggacggccatgtgcgcggcggagaggccgggtggccaccgaaccttcccgcctgttctgcggggcgtctgggcatggctttcccaacctagtaactgcaacttttagcatcctacatgtaggacttgggaatatgtgagacagcgccaagaatttaatccaggagaattgacaagcttaaatgaaatccatattgcccactgattttgtgcagcttcagataagtaatctttctccacttagccttttgtaacaattgatgtaataaaggtttgtagtctttgtgtaatttattaaagcattgtgcctaaaatagaaaaaaagcataggaaccata

SEQ ID NO: 294128 - DNA, 742 bp, Homo sapiens
tctcatgctggatgcttcctgaccttgaacatcagactccaagttcttcagttttggaacttggactggctctccttgctcctcagcctgcagttggcctgttgtgggaccttgtgatcgtgtcctgcagagcaaaagaggagagagaaaaagagaatgagttacatgggcccactgtatgttatagctgactgctgatggtatcagagagttttatggttttgtgtccagcattggttccttctggtgggttcttggtccctctgacttcaagaatgaagccacggaccctcacggtttcagaatcactggaccattagaccacatcagcactggacccagctaaagggcagagattcagagatccccaactgtgactagttgtgcaagaagcatgcagaatgatgagaaacctacagctcagaaaagaaacaaatcgtctatatggaagtccagtcttgctgtggaaaggctcagaaaaacaagacccttagcatatctcagggaactgaaaggctgtggggaaaccaacagcttgctgcaaccacagccacaagtcaggtaagcattgagcctgacagctcaggaaaatgacccacttcttgccaactcagacaaaaaggcttcacttaggcctagggaaactgtctctaataaggccatctgttaaccgtgtcgcctgagtccctctcagcaattcctcattccctccctttccaccttccaccctgaagccagacat

SEQ ID NO: 294129 - DNA, 862 bp, Homo sapiens
cgagaagatctgggaaggagtcagtcagagagccttgggccagagttccaggggctctgggagtggctgccaggtcctgcagagcaaaagaggagagagaaaaagagaatgagttacatgggcccactgtatgttatagctgactgctgatggtatcagagattttaacactgcagtcaactgcagacaaagccgcaatcttgtgacttcacagagcctcatgggcttttgagttgaccaacttgagaaaaatttctgacttgatgcatgaaatgaaacgaaggcaggtgacacataaaggaaatgacaagacacgattgaaaactattgaccctcaagttatcacaaatggttatgaaatggaaatggaatgggaaggagtatgaaaaaataagctgaatactgacaaacctaaggtttcagaatcactggaccattagaccacatcagcactggacccagctaaagggcagagattcagagatccccaactgtgactagttgtgcaagaagcatgcagaatgatgagaaacctacagctcagaaaagaaacaaatcgtctatatggaagtccagtcttgctgtggaaaggctcagaaaaacaagacccttagcatatctcagggaactgaaaggctgtggggaaaccaacagcttgctgcaaccacagccacaagtcaggtaagcattgagcctgacagctcaggaaaatgacccacttcttgccaactcagacaaaaaggcttcacttaggcctagggaaactgtctctaataaggccatctgttaaccgtgtcgcctgagtccctctcagcaattcctcattccctccctttccaccttccaccctgaagccagacat

SEQ ID NO: 294130 - DNA, 402 bp, Homo sapiens
tctcatgctggatgcttcctgaccttgaacatcagactccaagttcttcagttttggaacttggactggctctccttgctcctcagcctgcagttggcctgttgtgggaccttgtgatcgtgtcctgcagagcaaaagaggagagagaaaaagagaatgagttacatgggcccactgtatgttatagctgactgctgatggtatcagagattttaacactgcagtcaactgcagacaaagccgcaatcttgtgacttcacagagcctcatgggcttttgagttgaccaacttgagaaaaatttctgacttgatgcatgaaatgaaacgaaggcaggtgacacataaaggaaatgacaaggtattttttttttgccaaggagtttgcttctcacaaagtttct

SEQ ID NO: 294131 - DNA, 7094 bp, Homo sapiens
aaaactcagagtgagactaagagctaccgcaacactgaaaatcctggagcaccttggggattctcagcagatcttagttgacaattaactggtggactctaagtgaatcttgttagcgaagtgttggccttgtctaaattcttaactcctgtggctttgcataacaacttggtgtttcttttctgaggctttgatgtttatataacactctcaacttattttgaaaacatttacatagtgattagttaacccaacagaccaatcctgggaagacagccagagcctgcagcaccttagtaacagaaaaactgataattaggagaagagacctgtccaagaccaggaacctggaccaaaattgtgccatgttgctttactttaatgagtggccccagtaaaaactgagctgtatggcagagctgttcacatttatcttctgtgtccacccagttctgctgaaacccctggcaagatcgtggccctgttgtagcttgtcatgttttgaacagctgtctatggaaagaaagcaaacacaacctagagcaacattgatttgttttagaaagctcttttattttcagttctggctgtgttcaacatcttagcttacgtttttcatgttgtaatgatctgccgtacggacgatcacctctaagttagagagttctgtaatttggcttggattaaagatgcttggttagtgaaagctgctgctttttttatagtcaaaggactggttctgagagccttgttgcagatggctgaggtcaccgtcccaagggtgtatgtcgtgtttggcatccattgcatcatggcgaaggcatcttcagatgtgcaggtttcaggctttcatcggaaaatccagcacgttaaaaatgaactttgccacatgttgagcttggaggaggtggccccagtgctgcagcagacattacttcaggacaacctcttgggcagggtacattttgaccaatttaaagaagcattaatactcatcttgtccagaactctgtcaaatgaagaacactttcaagaaccagactgctcactagaagctcagcccaaatatgttagaggtgggaagcgttacggacgaaggtccttgcccgagttccaagagtccgtggaggagtttcctgaagtgacggtgattgagccactggatgaagaagcgcggccttcacacatcccagccggtgactgcagtgagcactggaagacgcaacgcagtgaggagtatgaagcggaaggccagttaaggttttggaacccagatgacttgaatgcttcacagagtggatcttcccctccccaagactggatagaagagaaactgcaagaagtttgtgaagatttggggatcacccgtgatggtcacctgaaccggaagaagctggtctccatctgtgagcagtatggtttacagaatgtggatggagagatgctcgaggaagtattccataatcttgatcctgacggtacaatgagtgtagaagattttttctatggtttgtttaaaaatggaaaatctcttacaccatcagcatctactccatatagacaactaaaaaggcacctttccatgcagtctttcgatgagagtggacgacgtaccacaacctcatcagcaatgacaagtaccattggctttcgggtcttctcctgcctggatgatgggatgggccatgcatctgtggagagaatactcgacacctggcaggaagagggcattgagaacagccaggagatcctgaaggccttggatttcagcctcgatggaaacatcaatttgacagaattaacactggcccttgaaaatgaacttttggttaccaagaacagcattcaccaggcggctctggccagctttaaggctgaaatccggcatttgttggaacgagttgatcaggtggtcagagaaaaagagaagctacggtcagatctggacaaggccgagaagctcaagtctttaatggcctcggaggtggatgatcaccatgcggccatagagcggcggaatgagtacaacctcaggaaactggatgaagagtacaaggagcgaatagcagccttaaaaaatgaactccgaaaagagagagagcagatcctgcagcaggcaggcaagcagcgtttagaacttgaacaggaaattgaaaaggcaaaaacagaagagaactatatccgggaccgccttgccctctctttaaaggaaaacagtcgtctggaaaatgagcttctagaaaatgcagagaatgttggcagaatatgagaatctgacaaacaaacttcagagaaatttggaaaatgtgttagcagaaaagtttggtgacctcgatcctagcagtgctgagttcttcctgcaagaagagagactgacacagatgagaaatgaatatgagcggcagtgcagggtactacaagaccaagtagatgaactccagtctgagctggaagaatatcgtgcacaaggcagagtgctcaggcttccgttgaagaactcaccgtcagaagaagttgaggctaacagcggtggcattgagcccgaacacgggctcggttctgaagaatgcaatccattgaatatgagcattgaggcagagctggtcattgaacagatgaaagaacaacatcacagggacatatgttgcctcagactggagctcgaagataaagtgcgccattatgaaaagcagctggacgaaaccgtggtcagctgcaagaaggcacaggagaacatgaagcaaaggcatgagaacgaaacgcacaccttagaaaaacaaataagtgaccttaaaaatgaaattgctgaacttcaggggcaagcagcagtgctcaaggaggcacatcatgaggccacttgcaggcatgaggaggagaaaaaacaactgcaagtgaagcttgaggaggaaaagactcacctgcaggagaagctgaggctgcaacatgagatggagctcaaggctagactgacacaggctcaagcaagctttgagcgggagagggaaggccttcagagtagcgcctggacagaagagaaggtgagaggcttgactcaggaactagagcagtttcaccaggagcagctgacaagcctggtggagaaacacactcttgagaaagaggagttaagaaaagagctcttggaaaagcaccaaagggagcttcaggagggaagggaaaaaatggaaacagagtgtaatagaagaacctctcaaatagaagcccagtttcagtctgattgtcagaaagtcactgagaggtgtgaaagcgctctgcaaagcctggaggggcgctaccgccaagagctgaaggacctccaggaacagcagcgtgaggagaaatcccagtgggaatttgagaaggacgagctcacccaggagtgtgcggaagcccaggagctgctgaaagagactcttaagagagagaaaacaacttctctggtcctgacccaggagagagagatgctggagaaaacatacaaagaacatttgaacagcatggtcgtcgagagacagcagctactccaagacctggaagacctaagaaatgtatctgaaacccagcaaagcctgctgtctgaccagatacttgagctgaagagcagtcacaaaagggaactgagggagcgtgaggaggtcctgtgccaggcaggggcttcggagcagctggccagccagcggctggaaagactagaaatggaacatgaccaggaaaggcaggaaatgatgtccaagcttctagccatggagaacattcacaaagcgacctgtgagacagcagatcgagaaagagccgagatgagcacagaaatctccagacttcagagtaaaataaaggaaatgcagcaggcaacatctcctctctctatgcttcagagtggttgccaggtgataggagaggaggaggtggaaggagatggagccctgtccctgcttcagcaaggggagcagctgttggaagaaaatggggacgtcctcttaagcctgcagagagctcatgaacaggcagtgaaggaaaatgtgaaaatggctactgaaatttctagattgcaacagaggctacaaaagttagagccagggttagtaatgtcttcttgtttggatgagccagctactgagttttttggaaatactgcggaacaaacagagccgtttttacagcaaaaccgaacgaagcaagtagaaggtgtgaccaggcggcatgtcctaagtgacctggaagatgatgaggtccgggacctgggaagtacagggacgagctctgttcagagacaggaagtcaaaatagaggagtctgaagcttcagtagagggtttttctgagcttgaaaacagtgaagagaccaggactgaatcctgggagctgaagaatcagattagtcagcttcaggaacagctaatgatgttatgtgcggactgtgatcgagcttctgaaaagaaacaggacctactttttgatgtttctgtgctaaaaaagaaactgaagatgcttgagagaatccctgaggcttctcccaaatataagctgttgtatgaagatgtgagccgagaaaatgactgccttcaggaagagctgagaatgatggagacacgctacgatgaggcactagaaaataacaaagaactcactgcagaggttttcaggttgcaggatgagctgaagaaaatggaggaagtcactgaaacattcctcagcctggaaaagagttacgatgaggtcaaaatagaaaatgaggagctgaatgttctggttttgagacttcaaggcaagattgagaagcttcaggaaagcgtggtccagcggtgtgactgctgcttatgggaagccagtttagagaacctggaaatcgaacctgatggaaatatactccagctcaatcagacactggaagagtgtgtgcccagggttaggagtgtacatcatgtcatagaggaatgtaagcaagaaaaccagtaccttgaggggaacacacagctcttggaaaaagtaaaagcacatgaaattgcctggttacatggaacaattcagacacatcaagaaaggccaagagtacagaatcaagttatactggaggaaaacactactctcctaggctttcaagacaaacattttcagcatcaggccaccatagcagagttagaactggagaaaacaaagttacaggagctgactaggaagttgaaggagagagtcactattttagttaagcaaaaagatgtactttctcacggagaaaaggaggaagagctgaaggcaatgatgcatgacttgcagatcacgtgcagtgagatgcagcaaaaagttgaacttctgagatatgaatctgaaaagcttcaacaggaaaattctattttgagaaatgaaattactactttaaatgaagaagatagcatttctaacctgaaattagggacattaaatggatctcaggaagaaatgtggcaaaaaacggaaactgtaaaacaagaaaatgctgcagttcagaagatggttgaaaatttaaagaaacagatttcagaattaaaaatcaaaaaccaacaattggatttggaaaatacagaacttagccaaaagaactctcaaaaccaggaaaaactgcaagaacttaatcaacgtctaacagaaatgctatgccagaaggaaaaagagccaggaaacagtgcattggaggaacgggaacaagagaagtttaatctgaaagaagaactggaacgttgtaaagtgcagtcctccactttagtgtcttctctggaggcggagctctctgaagttaaaatacagacccatattgtgcaacaggaaaaccaccttctcaaagatgaactggagaaaatgaaacagctgcacagatgtcccgatctctctgacttccagcaaaaaatctctagtgttctaagctacaacgaaaaactgctgaaagaaaaggaagctctgagtgaggaattaaatagctgtgtcgataagttggcaaaatcaagtcttttagagcatagaattgcgacgatgaagcaggaacagaaatcctgggaacatcagagtgcgagcttaaagtcacagctggtggcttctcaggaaaaggttcagaatttagaagacaccgtgcagaatgtaaacctgcaaatgtcccggatgaaatctgacctacgagtgactcagcaggaaaaggaggctttaaaacaagaagtgatgtctttacataagcaacttcagaatgctggtggcaagagctgggccccagagatagctactcatccatcagggctccataaccagcagaaaaggctgtcctgggacaagttggatcatctgatgaatgaggaacagcagctgctttggcaagagaatgagaggctccagaccatggtacagaacaccaaagccgaactcacgcactcccgggagaaggtccgtcaattggaatccaatcttcttcccaagcaccaaaaacatctaaacccatcaggtaccatgaatcccacagagcaagaaaaattgagcttaaagagagagtgtgatcagtttcagaaagaacaatctcctgctaacaggaaggtcagtcagatgaattcccttgaacaagaattagaaacaattcatttggaaaatgaaggcctgaaaaagaaacaagtaaaactggatgagcagctcatggagatgcagcacctgaggtccactgcgacgcctagcccgtcccctcatgcttgggatttgcagctgctccagcagcaagcctgtccgatggtgcccagggagcagtttctgcagcttcaacgccagctgctgcaggcagaaaggataaaccagcacctgcaggaggaacttgaaaacaggacctccgaaaccaacacaccacagggaaaccaggaacaactggtaactgtcatggaggaacgaatgatagaagttgaacagaaactgaaactagtgaaaaggcttcttcaagagaaagtgaatcagctcaaagaacaagtgagcctacccggtcatctctgttcacccacctcacattccagctttaactccagttttacatccctttattgccattaactcgttaacttatgttgtctaataaaggcaaattctattataaaa

SEQ ID NO: 294132 - DNA, 6464 bp, Homo sapiens
tcgcggccgcccgagccgggagccgagcgcgctgggcgcggccgtcccgctgccgccgccaagcccggagtgcgccagcggccatggttcccgcggcggcgccgggcgcctgagccccgggacgcaagcgctggaggcgggctgccggctgtgcgggcgctccggagagaccgacagaaggtgagcactgtgggctatgggatggatgagttggaccaggaccagcatggccgactcaaggacctgtttgacagttttgacacgacgggcacagggtccctggggcaggaggaactcaccgacctttgccacatgttgagcttggaggaggtggccccagtgctgcagcagacattacttcaggacaacctcttgggcagggtacattttgaccaatttaaagaagcattaatactcatcttgtccagaactctgtcaaatgaagaacactttcaagaaccagactgctcactagaagctcagcccaaatatgttagaggtgggaagcgttacggacgaaggtccttgcccgagttccaagagtccgtggaggagtttcctgaagtgacggtgattgagccactggatgaagaagcgcggccttcacacatcccagccggtgactgcagtgagcactggaagacgcaacgcagtgaggagtatgaagcggaaggccagttaaggttttggaacccagatgacttgaatgcttcacagagtggatcttcccctccccaagactggatagaagagaaactgcaagaagtttgtgaagatttggggatcacccgtgatggtcacctgaaccggaagaagctggtctccatctgtgagcagtatggtttacagaatgtggatggagagatgctcgaggaagtattccataatcttgatcctgacggtacaatgagtgtagaagattttttctatggtttgtttaaaaatggaaaatctcttacaccatcagcatctactccatatagacaactaaaaaggcacctttccatgcagtctttcgatgagagtggacgacgtaccacaacctcatcagcaatgacaagtaccattggctttcgggtcttctcctgcctggatgatgggatgggccatgcatctgtggagagaatactcgacacctggcaggaagagggcattgagaacagccaggagatcctgaaggccttggatttcagcctcgatggaaacatcaatttgacagaattaacactggcccttgaaaatgaacttttggttaccaagaacagcattcaccaggcggctctggccagctttaaggctgaaatccggcatttgttggaacgagttgatcaggtggtcagagaaaaagagaagctacggtcagatctggacaaggccgagaagctcaagtctttaatggcctcggaggtggatgatcaccatgcggccatagagcggcggaatgagtacaacctcaggaaactggatgaagagtacaaggagcgaatagcagccttaaaaaatgaactccgaaaagagagagagcagatcctgcagcaggcaggcaagcagcgtttagaacttgaacaggaaattgaaaaggcaaaaacagaagagaactatatccgggaccgccttgccctctctttaaaggaaaacagtcgtctggaaaatgagcttctagaaaatgcagagaatgttggcagaatatgtttggtgacctcgatcctagcagtgctgagttcttcctgcaagaagagagactgacacagatgagaaatgaatatgagcggcagtgcagggtactacaagaccaagtagatgaactccagtctgagctggaagaatatcgtgcacaaggcagagtgctcaggcttccgttgaagaactcaccgtcagaagaagttgaggctaacagcggtggcattgagcccgaacacgggctcggttctgaagaatgcaatccattgaatatgagcattgaggcagagctggtcattgaacagatgaaagaacaacatcacagggacatatgttgcctcagactggagctcgaagataaagtgcgccattatgaaaagcagctggacgaaaccgtggtcagctgcaagaaggcacaggagaacatgaagcaaaggcatgagaacgaaacgcacaccttagaaaaacaaataagtgaccttaaaaatgaaattgctgaacttcaggggcaagcagcagtgctcaaggaggcacatcatgaggccacttgcaggcatgaggaggagaaaaaacaactgcaagtgaagcttgaggaggaaaagactcacctgcaggagaagctgaggctgcaacatgagatggagctcaaggctagactgacacaggctcaagcaagctttgagcgggagagggaaggccttcagagtagcgcctggacagaagagaaggtgagaggcttgactcaggaactagagcagtttcaccaggagcagctgacaagcctggtggagaaacacactcttgagaaagaggagttaagaaaagagctcttggaaaagcaccaaagggagcttcaggagggaagggaaaaaatggaaacagagtgtaatagaagaacctctcaaatagaagcccagtttcagtctgattgtcagaaagtcactgagaggtgtgaaagcgctctgcaaagcctggaggggcgctaccgccaagagctgaaggacctccaggaacagcagcgtgaggagaaatcccagtgggaatttgagaaggacgagctcacccaggagtgtgcggaagcccaggagctgctgaaagagactcttaagagagagaaaacaacttctctggtcctgacccaggagagagagatgctggagaaaacatacaaagaacatttgaacagcatggtcgtcgagagacagcagctactccaagacctggaagacctaagaaatgtatctgaaacccagcaaagcctgctgtctgaccagatacttgagctgaagagcagtcacaaaagggaactgagggagcgtgaggaggtcctgtgccaggcaggggcttcggagcagctggccagccagcggctggaaagactagaaatggaacatgaccaggaaaggcaggaaatgatgtccaagcttctagccatggagaacattcacaaagcgacctgtgagacagcagatcgagaaagagccgagatgagcacagaaatctccagacttcagagtaaaataaaggaaatgcagcaggcaacatctcctctctctatgcttcagagtggttgccaggtgataggagaggaggaggtggaaggagatggagccctgtccctgcttcagcaaggggagcagctgttggaagaaaatggggacgtcctcttaagcctgcagagagctcatgaacaggcagtgaaggaaaatgtgaaaatggctactgaaatttctagattgcaacagaggctacaaaagttagagccagggttagtaatgtcttcttgtttggatgagccagctactgagttttttggaaatactgcggaacaaacagagccgtttttacagcaaaaccgaacgaagcaagtagaaggtgtgaccaggcggcatgtcctaagtgacctggaagatgatgaggtccgggacctgggaagtacagggacgagctctgttcagagacaggaagtcaaaatagaggagtctgaagcttcagtagagggtttttctgagcttgaaaacagtgaagagaccaggactgaatcctgggagctgaagaatcagattagtcagcttcaggaacagctaatgatgttatgtgcggactgtgatcgagcttctgaaaagaaacaggacctactttttgatgtttctgtgctaaaaaagaaactgaagatgcttgagagaatccctgaggcttctcccaaatataagctgttgtatgaagatgtgagccgagaaaatgactgccttcaggaagagctgagaatgatggagacacgctacgatgaggcactagaaaataacaaagaactcactgcagaggttttcaggttgcaggatgagctgaagaaaatggaggaagtcactgaaacattcctcagcctggaaaagagttacgatgaggtcaaaatagaaaatgaggagctgaatgttctggttttgagacttcaaggcaagattgagaagcttcaggaaagcgtggtccagcggtgtgactgctgcttatgggaagccagtttagagaacctggaaatcgaacctgatggaaatatactccagctcaatcagacactggaagagtgtgtgcccagggttaggagtgtacatcatgtcatagaggaatgtaagcaagaaaaccagtaccttgaggggaacacacagctcttggaaaaagtaaaagcacatgaaattgcctggttacatggaacaattcagacacatcaagaaaggccaagagtacagaatcaagttatactggaggaaaacactactctcctaggctttcaagacaaacattttcagcatcaggccaccatagcagagttagaactggagaaaacaaagttacaggagctgactaggaagttgaaggagagagtcactattttagttaagcaaaaagatgtactttctcacggagaaaaggaggaagagctgaaggcaatgatgcatgacttgcagatcacgtgcagtgagatgcagcaaaaagttgaacttctgagatatgaatctgaaaagcttcaacaggaaaattctattttgagaaatgaaattactactttaaatgaagaagatagcatttctaacctgaaattagggacattaaatggatctcaggaagaaatgtggcaaaaaacggaaactgtaaaacaagaaaatgctgcagttcagaagatggttgaaaatttaaagaaacagatttcagaattaaaaatcaaaaaccaacaattggatttggaaaatacagaacttagccaaaagaactctcaaaaccaggaaaaactgcaagaacttaatcaacgtctaacagaaatgctatgccagaaggaaaaagagccaggaaacagtgcattggaggaacgggaacaagagaagtttaatctgaaagaagaactggaacgttgtaaagtgcagtcctccactttagtgtcttctctggaggcggagctctctgaagttaaaatacagacccatattgtgcaacaggaaaaccaccttctcaaagatgaactggagaaaatgaaacagctgcacagatgtcccgatctctctgacttccagcaaaaaatctctagtgttctaagctacaacgaaaaactgctgaaagaaaaggaagctctgagtgaggaattaaatagctgtgtcgataagttggcaaaatcaagtcttttagagcatagaattgcgacgatgaagcaggaacagaaatcctgggaacatcagagtgcgagcttaaagtcacagctggtggcttctcaggaaaaggttcagaatttagaagacaccgtgcagaatgtaaacctgcaaatgtcccggatgaaatctgacctacgagtgactcagcaggaaaaggaggctttaaaacaagaagtgatgtctttacataagcaacttcagaatgctggtggcaagagctgggccccagagatagctactcatccatcagggctccataaccagcagaaaaggctgtcctgggacaagttggatcatctgatgaatgaggaacagcagctgctttggcaagagaatgagaggctccagaccatggtacagaacaccaaagccgaactcacgcactcccgggagaaggtccgtcaattggaatccaatcttcttcccaagcaccaaaaacatctaaacccatcaggtaccatgaatcccacagagcaagaaaaattgagcttaaagagagagtgtgatcagtttcagaaagaacaatctcctgctaacaggaaggtcagtcagatgaattcccttgaacaagaattagaaacaattcatttggaaaatgaaggcctgaaaaagaaacaagtaaaactggatgagcagctcatggagatgcagcacctgaggtccactgcgacgcctagcccgtcccctcatgcttgggatttgcagctgctccagcagcaagcctgtccgatggtgcccagggagcagtttctgcagcttcaacgccagctgctgcaggcagaaaggataaaccagcacctgcaggaggaacttgaaaacaggacctccgaaaccaacacaccacagggaaaccaggaacaactggtaactgtcatggaggaacgaatgatagaagttgaacagaaactgaaactagtgaaaaggcttcttcaagagaaagtgaatcagctcaaagaacaagtgagcctacccggtcatctctgttcacccacctcacattccagctttaactccagttttacatccctttattgccattaactcgttaacttatgttgtctaataaaggcaaattctattataaaa

SEQ ID NO: 294133 - DNA, 6745 bp, Homo sapiens
tcgcggccgcccgagccgggagccgagcgcgctgggcgcggccgtcccgctgccgccgccaagcccggagtgcgccagcggccatggttcccgcggcggcgccgggcgcctgagccccgggacgcaagcgctggaggcgggctgccggctgtgcgggcgctccggagagaccgacagaaggtgagcactgtgggctatgggatggatgagttggaccaggaccagcatggccgactcaaggacctgtttgacagttttgacacgacgggcacagggtccctggggcaggaggaactcaccgacctttgccacatgttgagcttggaggaggtggccccagtgctgcagcagacattacttcaggacaacctcttgggcagggtacattttgaccaatttaaagaagcattaatactcatcttgtccagaactctgtcaaatgaagaacactttcaagaaccagactgctcactagaagctcagcccaaatatgttagaggtgggaagcgttacggacgaaggtccttgcccgagttccaagagtccgtggaggagtttcctgaagtgacggtgattgagccactggatgaagaagcgcggccttcacacatcccagccggtgactgcagtgagcactggaagacgcaacgcagtgaggagtatgaagcggaaggccagttaaggttttggaacccagatgacttgaatgcttcacagagtggatcttcccctccccaagactggatagaagagaaactgcaagaagtttgtgaagatttggggatcacccgtgatggtcacctgaaccggaagaagctggtctccatctgtgagcagtatggtttacagaatgtggatggagagatgctcgaggaagtattccataatcttgatcctgacggtacaatgagtgtagaagattttttctatggtttgtttaaaaatggaaaatctcttacaccatcagcatctactccatatagacaactaaaaaggcacctttccatgcagtctttcgatgagagtggacgacgtaccacaacctcatcagcaatgacaagtaccattggctttcgggtcttctcctgcctggatgatgggatgggccatgcatctgtggagagaatactcgacacctggcaggaagagggcattgagaacagccaggagatcctgaaggccttggatttcagcctcgatggaaacatcaatttgacagaattaacactggcccttgaaaatgaacttttggttaccaagaacagcattcaccaggcggctctggccagctttaaggctgaaatccggcatttgttggaacgagttgatcaggtggtcagagaaaaagagaagctacggtcagatctggacaaggccgagaagctcaagtctttaatggcctcggaggtggatgatcaccatgcggccatagagcggcggaatgagtacaacctcaggaaactggatgaagagtacaaggagcgaatagcagccttaaaaaatgaactccgaaaagagagagagcagatcctgcagcaggcaggcaagcagcgtttagaacttgaacaggaaattgaaaaggcaaaaacagaagagaactatatccgggaccgccttgccctctctttaaaggaaaacagtcgtctggaaaatgagcttctagaaaatgcagagaatgttggcagaatatgtttggtgacctcgatcctagcagtgctgagttcttcctgcaagaagagagactgacacagatgagaaatgaatatgagcggcagtgcagggtactacaagaccaagtagatgaactccagtctgagctggaagaatatcgtgcacaaggcagagtgctcaggcttccgttgaagaactcaccgtcagaagaagttgaggctaacagcggtggcattgagcccgaacacgggctcggttctgaagaatgcaatccattgaatatgagcattgaggcagagctggtcattgaacagatgaaagaacaacatcacagggacatatgttgcctcagactggagctcgaagataaagtgcgccattatgaaaagcagctggacgaaaccgtggtcagctgcaagaaggcacaggagaacatgaagcaaaggcatgagaacgaaacgcacaccttagaaaaacaaataagtgaccttaaaaatgaaattgctgaacttcaggggcaagcagcagtgctcaaggaggcacatcatgaggccacttgcaggcatgaggaggagaaaaaacaactgcaagtgaagcttgaggaggaaaagactcacctgcaggagaagctgaggctgcaacatgagatggagctcaaggctagactgacacaggctcaagcaagctttgagcgggagagggaaggccttcagagtagcgcctggacagaagagaaggtgagaggcttgactcaggaactagagcagtttcaccaggagcagctgacaagcctggtggagaaacacactcttgagaaagaggagttaagaaaagagctcttggaaaagcaccaaagggagcttcaggagggaagggaaaaaatggaaacagagtgtaatagaagaacctctcaaatagaagcccagtttcagtctgattgtcagaaagtcactgagaggtgtgaaagcgctctgcaaagcctggaggggcgctaccgccaagagctgaaggacctccaggaacagcagcgtgaggagaaatcccagtgggaatttgagaaggacgagctcacccaggagtgtgcggaagcccaggagctgctgaaagagactcttaagagagagaaaacaacttctctggtcctgacccaggagagagagatgctggagaaaacatacaaagaacatttgaacagcatggtcgtcgagagacagcagctactccaagacctggaagacctaagaaatgtatctgaaacccagcaaagcctgctgtctgaccagatacttgagctgaagagcagtcacaaaagggaactgagggagcgtgaggaggtcctgtgccaggcaggggcttcggagcagctggccagccagcggctggaaagactagaaatggaacatgaccaggaaaggcaggaaatgatgtccaagcttctagccatggagaacattcacaaagcgacctgtgagacagcagatcgagaaagagccgagatgagcacagaaatctccagacttcagagtaaaataaaggaaatgcagcaggcaacatctcctctctctatgcttcagagtggttgccaggtgataggagaggaggaggtggaaggagatggagccctgtccctgcttcagcaaggggagcagctgttggaagaaaatggggacgtcctcttaagcctgcagagagctcatgaacaggcagtgaaggaaaatgtgaaaatggctactgaaatttctagattgcaacagaggctacaaaagttagagccagggttagtaatgtcttcttgtttggatgagccagctactgagttttttggaaatactgcggaacaaacagagccgtttttacagcaaaaccgaacgaagcaagtagaaggtgtgaccaggcggcatgtcctaagtgacctggaagatgatgaggtccgggacctgggaagtacagggacgagctctgttcagagacaggaagtcaaaatagaggagtctgaagcttcagtagagggtttttctgagcttgaaaacagtgaagagaccaggactgaatcctgggagctgaagaatcagattagtcagcttcaggaacagctaatgatgttatgtgcggactgtgatcgagcttctgaaaagaaacaggacctactttttgatgtttctgtgctaaaaaagaaactgaagatgcttgagagaatccctgaggcttctcccaaatataagctgttgtatgaagatgtgagccgagaaaatgactgccttcaggaagagctgagaatgatggagacacgctacgatgaggcactagaaaataacaaagaactcactgcagaggttttcaggttgcaggatgagctgaagaaaatggaggaagtcactgaaacattcctcagcctggaaaagagttacgatgaggtcaaaatagaaaatgaggagctgaatgttctggttttgagacttcaaggcaagattgagaagcttcaggaaagcgtggtccagcggtgtgactgctgcttatgggaagccagtttagagaacctggaaatcgaacctgatggaaatatactccagctcaatcagacactggaagagtgtgtgcccagggttaggagtgtacatcatgtcatagaggaatgtaagcaagaaaaccagtaccttgaggggaacacacagctcttggaaaaagtaaaagcacatgaaattgcctggttacatggaacaattcagacacatcaagaaaggccaagagtacagaatcaagttatactggaggaaaacactactctcctaggctttcaagacaaacattttcagcatcaggccaccatagcagagttagaactggagaaaacaaagttacaggagctgactaggaagttgaaggagagagtcactattttagttaagcaaaaagatgtactttctcacggagaaaaggaggaagagctgaaggcaatgatgcatgacttgcagatcacgtgcagtgagatgcagcaaaaagttgaacttctgagatatgaatctgaaaagcttcaacaggaaaattctattttgagaaatgaaattactactttaaatgaagaagatagcatttctaacctgaaattagggacattaaatggatctcaggaagaaatgtggcaaaaaacggaaactgtaaaacaagaaaatgctgcagttcagaagatggttgaaaatttaaagaaacagatttcagaattaaaaatcaaaaaccaacaattggatttggaaaatacagaacttagccaaaagaactctcaaaaccaggaaaaactgcaagaacttaatcaacgtctaacagaaatgctatgccagaaggaaaaagagccaggaaacagtgcattggaggaacgggaacaagagaagtttaatctgaaagaagaactggaacgttgtaaagtgcagtcctccactttagtgtcttctctggaggcggagctctctgaagttaaaatacagacccatattgtgcaacaggaaaaccaccttctcaaagatgaactggagaaaatgaaacagctgcacagatgtcccgatctctctgacttccagcaaaaaatctctagtgttctaagctacaacgaaaaactgctgaaagaaaaggaagctctgagtgaggaattaaatagctgtgtcgataagttggcaaaatcaagtcttttagagcatagaattgcgacgatgaagcaggaacagaaatcctgggaacatcagagtgcgagcttaaagtcacagctggtggcttctcaggaaaaggttcagaatttagaagacaccgtgcagaatgtaaacctgcaaatgtcccggatgaaatctgacctacgagtgactcagcaggaaaaggaggctttaaaacaagaagtgatgtctttacataagcaacttcagaatgctggtggcaagagctgggccccagagatagctactcatccatcagggctccataaccagcagaaaaggctgtcctgggacaagttggatcatctgatgaatgaggaacagcagctgctttggcaagagaatgagaggctccagaccatggtacagaacaccaaagccgaactcacgcactcccgggagaaggtccgtcaattggaatccaatcttcttcccaagcaccaaaaacatctaaacccatcaggtaccatgaatcccacagagcaagaaaaattgagcttaaagagagagtgtgatcagtttcagaaagaacaatctcctgctaacaggaaggtcagtcagatgaattcccttgaacaagaattagaaacaattcatttggaaaatgaaggcctgaaaaagaaacaagtaaaactggatgagcagctcatggagatgcagcacctgaggtccactgcgacgcctagcccgtcccctcatgcttgggatttgcagctgctccagcagcaagcctgtccgatggtgcccagggagcagtttctgcagcttcaacgccagctgctgcaggcagaaaggataaaccagcacctgcaggaggaacttgaaaacaggacctccgaaaccaacacaccacaggccttgctaccggagcagcgagcagtgcacgcagattcctacagaaggattgggcacctgtgaaaactgggctgctattgatggcatttcttaccatggcagacagatgcacacacccacccatgcacacacaccacacacagagacataagctaagatatgttggaattaagtgctcttttaaattattttattatttttactgttaaacctttgcagtattatgtctcttatttatttatgtagaaatgacagatcttgtgaatcaaattcacaaacatcagcttgttacaaatcattttatttataccctttaaagagtgtggatttaagattcttgaaaggatgtagtctatatattttctcattccatatgttgtaactatttttaaccaaaggtactacttttatatatggaatttgaagaaaaccaggggtatttatactgttttgtataagatgtacaaatctttttgacaggaaatttttgatgaaacaataaaataaattttaagtataaa

SEQ ID NO: 294134 - DNA, 422 bp, Homo sapiens
tgcgattatcctatagatcagtagaagaagttgaggctaacagcggtggcattgagcccgaacacggtaaacacattcggacaggctgtagataaagcctttactcttgtttttagaaacgtggttcaatataaaattgcaaagctttggcaacttgaaaaaaagaaaaaaaaaaaaagaatttggccatactcttttcttgagctgtttcacttgtggtctcgtttttcatttgtccttgaagtttttatgagaacatttccatctgattttgatatgcgtcaacaaaggaatggaagaatcaaaccacaagggtatttgctttgttaacaaaacaaacaaaaaactggctgcaaatctgggaatccaggccttgggagtgttagaattcagacactgatctatagctgtcctcttcgaag

SEQ ID NO: 294135 - DNA, 935 bp, Homo sapiens
aaaactcagagtgagactaagagctaccgcaacactgaaaatcctggagcaccttggggattctcagcagatcttagttgacaattaactggtggactctaagtgaatcttgttagcgaagtgttggccttgtctaaattcttaactcctgtggctttgcataacaacttggtgtttcttttctgaggctttgatgtttatataacactctcaacttattttgaaaacatttacatagtgattagttaacccaacagaccaatcctgggaagacagccagagcctgcagcaccttagtaacagaaaaactgataattaggagaagagacctgtccaagaccaggaacctggaccaaaattgtgccatgttgctttactttaatgagtggccccagtaaaaactgagctgtatggcagagctgttcacatttatcttctgtgtccacccagttctgctgaaacccctggcaagatcgtggccctgttgtagcttgtcatgttttgaacagctgtctatggaaagaaagcaaacacaacctagagcaacattgatttgttttagaaagctcttttattttcagttctggctgtgttcaacatcttagcttacgtttttcatgttgtaatgatctgccgtacggacgatcacctctaagttagagagttctgtaatttggcttggattaaagatgcttggttagtgaaagctgctgctttttttatagtcaaaggactggttctgagagccttgttgcagatggctgaggtcaccgtcccaagggtgtatgtcgtgtttggcatccattgcatcatggcgaaggcatcttcagatgtgcaggtttcaggctttcatcggaaaatccagcacgttaaaaatgaactgaactctggtctctttttttactgtgatttgattaactattacggtagttgtg

SEQ ID NO: 294136 - DNA, 712 bp, Homo sapiens
aaattgtcttattattgagctataatagtctttatatattctagttacaagtcccttatcagatacttaatttgcaaaacatttctactttcttgatagtgtcctttgaagcacaaaagattttgttttgatgatatccaatttatcttttttgttgttgttgttgcttatgcttttggtgtcacatctaagaccagtgttggtttttaaatcccaggtactacaagaccaagtagatgaactccagtctgagctggaagaatatcgtgcacaaggcagagtgctcaggcttccgttgaagaactcaccgtcagaagaagttgaggctaacagcggtggcattgagcccgaacacggtaaacacattcggacaggctgtagataaagcctttactcttgtttttagaaacgtggttcaatataaaattgcaaagctttggcaacttgaaaaaaagaaaaaaaaaaaaagaatttggccatactcttttcttgagctgtttcacttgtggtctcgtttttcatttgtccttgaagtttttatgagaacatttccatctgattttgatatgcgtcaacaaaggaatggaagaatcaaaccacaagggtatttgctttgttaacaaaacaaacaaaaaactggctgcaaatctgggaatccaggccttgggagtgttagaattcagacactgatctatagctgtcctcttcgaag

SEQ ID NO: 294137 - DNA, 303 bp, Homo sapiens
tatatgtatccacgtccattactaaattaattctatgtagagtgttggcgctatgggaacacaggaaaccaggaacaactggtaactgtcatggaggaacgaatgatagaagttgaacagaaactgaaactagtgaaaaggcttcttcaagagaaagtgaatcagctcaaagaacaagtgagcctacccggtcatctctgttcacccacctcacattccagctttaactccagttttacatccctttattgccattaactcgttaacttatgttgtctaataaaggcaaattctattataaaa

SEQ ID NO: 294138 - DNA, 471 bp, Homo sapiens
gggtgtcagctgccaacaagtagctcgggtgtctgggccgctcctgaatggtcacaagctgacacactgtcttctgataaaagactgctcactagaagctcagcccaaatatgttagaggtgggaagcgttacggacgaaggtccttgcccgagttccaagagtccgtggaggagtttcctgaagtgacggtgattgagccactggatgaagaagcgcggccttcacacatcccagccggtgactgcagtgagtgtgataaagcagctcgaacacttggtttttgcctcaagatactgagcctggggtgctttccagtgcccagcagttgccatggttctttctgctggattccttgcacccaggcctgtctcgttctccagcatgtggagagtcgccagcctccctcatcccccatcttttcattttgcatattgccataatctaccaataaaggaggttcagtaacatt

SEQ ID NO: 294139 - DNA, 489 bp, Homo sapiens
gggatataatttactaagttggttatgaaggagaacattgcctggcactgagaaatgatccctgtgttcattgaacacgtcactctagtgcgttctccccatcacccagttggtgttgttcgtgcttacatgtcacattcctatcatactcaagagactgggtgaataccagaaactgggcctttgctgtgttgggtcaaagaagggcactcgggaaaaatgacagctttgcccttttccccttctagtttggtgacctcgatcctagcagtgctgagttcttcctgcaagaagagagactgacacagatgagaaatgaatatgagcggcagtgcagggtaggtagacaaagagaactgagtaagtgcaggagtgcctgggttcagaccccagcttccccgttccctagctctgtgaccctaagcaagtcacttcatctgtgggtacttccattcctcatgcataaaatggtaaaaataaaagtaccca

SEQ ID NO: 294140 - DNA, 396 bp, Homo sapiens
ggcagctaagaactgagattctcatgtcatgtggcctcaactcttgtctcctctctcagactgctcactagaagctcagcccaaatatgttagaggtgggaagcgttacggacgaaggtccttgcccgagttccaagagtccgtggaggagtttcctgaagtgacggtgattgagccactggatgaagaagcgcggccttcacacatcccagccggtgactgcagtgaggtaaggaatcgggcatgcacgttcatctggatcatgagtgtggagccccacgtcagtgcagcacagagacaggggagctgagggggttgatggcacgatgtgggcttttctcagttaccaactccttgctaatcttattacttgccttttggacatatataatgttt

SEQ ID NO: 294141 - DNA, 10252 bp, Homo sapiens
tcgcggccgcccgagccgggagccgagcgcgctgggcgcggccgtcccgctgccgccgccaagcccggagtgcgccagcggccatggttcccgcggcggcgccgggcgcctgagccccgggacgcaagcgctggaggcgggctgccggctgtgcgggcgctccggagagaccgacagaaggtgagcactgtgggctatgggatggatgagttggaccaggaccagcatggccgactcaaggacctgtttgacagttttgacacgacgggcacagggtccctggggcaggaggaactcaccgacctttgccacatgttgagcttggaggaggtggccccagtgctgcagcagacattacttcaggacaacctcttgggcagggtacattttgaccaatttaaagaagcattaatactcatcttgtccagaactctgtcaaatgaagaacactttcaagaaccagactgctcactagaagctcagcccaaatatgttagaggtgggaagcgttacggacgaaggtccttgcccgagttccaagagtccgtggaggagtttcctgaagtgacggtgattgagccactggatgaagaagcgcggccttcacacatcccagccggtgactgcagtgagcactggaagacgcaacgcagtgaggagtatgaagcggaaggccagttaaggttttggaacccagatgacttgaatgcttcacagagtggatcttcccctccccaagactggatagaagagaaactgcaagaagtttgtgaagatttggggatcacccgtgatggtcacctgaaccggaagaagctggtctccatctgtgagcagtatggtttacagaatgtggatggagagatgctcgaggaagtattccataatcttgatcctgacggtacaatgagtgtagaagattttttctatggtttgtttaaaaatggaaaatctcttacaccatcagcatctactccatatagacaactaaaaaggcacctttccatgcagtctttcgatgagagtggacgacgtaccacaacctcatcagcaatgacaagtaccattggctttcgggtcttctcctgcctggatgatgggatgggccatgcatctgtggagagaatactcgacacctggcaggaagagggcattgagaacagccaggagatcctgaaggccttggatttcagcctcgatggaaacatcaatttgacagaattaacactggcccttgaaaatgaacttttggttaccaagaacagcattcaccaggcggctctggccagctttaaggctgaaatccggcatttgttggaacgagttgatcaggtggtcagagaaaaagagaagctacggtcagatctggacaaggccgagaagctcaagtctttaatggcctcggaggtggatgatcaccatgcggccatagagcggcggaatgagtacaacctcaggaaactggatgaagagtacaaggagcgaatagcagccttaaaaaatgaactccgaaaagagagagagcagatcctgcagcaggcaggcaagcagcgtttagaacttgaacaggaaattgaaaaggcaaaaacagaagagaactatatccgggaccgccttgccctctctttaaaggaaaacagtcgtctggaaaatgagcttctagaaaatgcagagaatgttggcagaatatgtttggtgacctcgatcctagcagtgctgagttcttcctgcaagaagagagactgacacagatgagaaatgaatatgagcggcagtgcagggtactacaagaccaagtagatgaactccagtctgagctggaagaatatcgtgcacaaggcagagtgctcaggcttccgttgaagaactcaccgtcagaagaagttgaggctaacagcggtggcattgagcccgaacacgggctcggttctgaagaatgcaatccattgaatatgagcattgaggcagagctggtcattgaacagatgaaagaacaacatcacagggacatatgttgcctcagactggagctcgaagataaagtgcgccattatgaaaagcagctggacgaaaccgtggtcagctgcaagaaggcacaggagaacatgaagcaaaggcatgagaacgaaacgcacaccttagaaaaacaaataagtgaccttaaaaatgaaattgctgaacttcaggggcaagcagcagtgctcaaggaggcacatcatgaggccacttgcaggcatgaggaggagaaaaaacaactgcaagtgaagcttgaggaggaaaagactcacctgcaggagaagctgaggctgcaacatgagatggagctcaaggctagactgacacaggctcaagcaagctttgagcgggagagggaaggccttcagagtagcgcctggacagaagagaaggtgagaggcttgactcaggaactagagcagtttcaccaggagcagctgacaagcctggtggagaaacacactcttgagaaagaggagttaagaaaagagctcttggaaaagcaccaaagggagcttcaggagggaagggaaaaaatggaaacagagtgtaatagaagaacctctcaaatagaagcccagtttcagtctgattgtcagaaagtcactgagaggtgtgaaagcgctctgcaaagcctggaggggcgctaccgccaagagctgaaggacctccaggaacagcagcgtgaggagaaatcccagtgggaatttgagaaggacgagctcacccaggagtgtgcggaagcccaggagctgctgaaagagactcttaagagagagaaaacaacttctctggtcctgacccaggagagagagatgctggagaaaacatacaaagaacatttgaacagcatggtcgtcgagagacagcagctactccaagacctggaagacctaagaaatgtatctgaaacccagcaaagcctgctgtctgaccagatacttgagctgaagagcagtcacaaaagggaactgagggagcgtgaggaggtcctgtgccaggcaggggcttcggagcagctggccagccagcggctggaaagactagaaatggaacatgaccaggaaaggcaggaaatgatgtccaagcttctagccatggagaacattcacaaagcgacctgtgagacagcagatcgagaaagagccgagatgagcacagaaatctccagacttcagagtaaaataaaggaaatgcagcaggcaacatctcctctctctatgcttcagagtggttgccaggtgataggagaggaggaggtggaaggagatggagccctgtccctgcttcagcaaggggagcagctgttggaagaaaatggggacgtcctcttaagcctgcagagagctcatgaacaggcagtgaaggaaaatgtgaaaatggctactgaaatttctagattgcaacagaggctacaaaagttagagccagggttagtaatgtcttcttgtttggatgagccagctactgagttttttggaaatactgcggaacaaacagagccgtttttacagcaaaaccgaacgaagcaagtagaaggtgtgaccaggcggcatgtcctaagtgacctggaagatgatgaggtccgggacctgggaagtacagggacgagctctgttcagagacaggaagtcaaaatagaggagtctgaagcttcagtagagggtttttctgagcttgaaaacagtgaagagaccaggactgaatcctgggagctgaagaatcagattagtcagcttcaggaacagctaatgatgttatgtgcggactgtgatcgagcttctgaaaagaaacaggacctactttttgatgtttctgtgctaaaaaagaaactgaagatgcttgagagaatccctgaggcttctcccaaatataagctgttgtatgaagatgtgagccgagaaaatgactgccttcaggaagagctgagaatgatggagacacgctacgatgaggcactagaaaataacaaagaactcactgcagaggttttcaggttgcaggatgagctgaagaaaatggaggaagtcactgaaacattcctcagcctggaaaagagttacgatgaggtcaaaatagaaaatgaggagctgaatgttctggttttgagacttcaaggcaagattgagaagcttcaggaaagcgtggtccagcggtgtgactgctgcttatgggaagccagtttagagaacctggaaatcgaacctgatggaaatatactccagctcaatcagacactggaagagtgtgtgcccagggttaggagtgtacatcatgtcatagaggaatgtaagcaagaaaaccagtaccttgaggggaacacacagctcttggaaaaagtaaaagcacatgaaattgcctggttacatggaacaattcagacacatcaagaaaggccaagagtacagaatcaagttatactggaggaaaacactactctcctaggctttcaagacaaacattttcagcatcaggccaccatagcagagttagaactggagaaaacaaagttacaggagctgactaggaagttgaaggagagagtcactattttagttaagcaaaaagatgtactttctcacggagaaaaggaggaagagctgaaggcaatgatgcatgacttgcagatcacgtgcagtgagatgcagcaaaaagttgaacttctgagatatgaatctgaaaagcttcaacaggaaaattctattttgagaaatgaaattactactttaaatgaagaagatagcatttctaacctgaaattagggacattaaatggatctcaggaagaaatgtggcaaaaaacggaaactgtaaaacaagaaaatgctgcagttcagaagatggttgaaaatttaaagaaacagatttcagaattaaaaatcaaaaaccaacaattggatttggaaaatacagaacttagccaaaagaactctcaaaaccaggaaaaactgcaagaacttaatcaacgtctaacagaaatgctatgccagaaggaaaaagagccaggaaacagtgcattggaggaacgggaacaagagaagtttaatctgaaagaagaactggaacgttgtaaagtgcagtcctccactttagtgtcttctctggaggcggagctctctgaagttaaaatacagacccatattgtgcaacaggaaaaccaccttctcaaagatgaactggagaaaatgaaacagctgcacagatgtcccgatctctctgacttccagcaaaaaatctctagtgttctaagctacaacgaaaaactgctgaaagaaaaggaagctctgagtgaggaattaaatagctgtgtcgataagttggcaaaatcaagtcttttagagcatagaattgcgacgatgaagcaggaacagaaatcctgggaacatcagagtgcgagcttaaagtcacagctggtggcttctcaggaaaaggttcagaatttagaagacaccgtgcagaatgtaaacctgcaaatgtcccggatgaaatctgacctacgagtgactcagcaggaaaaggaggctttaaaacaagaagtgatgtctttacataagcaacttcagaatgctggtggcaagagctgggccccagagatagctactcatccatcagggctccataaccagcagaaaaggctgtcctgggacaagttggatcatctgatgaatgaggaacagcagctgctttggcaagagaatgagaggctccagaccatggtacagaacaccaaagccgaactcacgcactcccgggagaaggtccgtcaattggaatccaatcttcttcccaagcaccaaaaacatctaaacccatcaggtaccatgaatcccacagagcaagaaaaattgagcttaaagagagagtgtgatcagtttcagaaagaacaatctcctgctaacaggaaggtcagtcagatgaattcccttgaacaagaattagaaacaattcatttggaaaatgaaggcctgaaaaagaaacaagtaaaactggatgagcagctcatggagatgcagcacctgaggtccactgcgacgcctagcccgtcccctcatgcttgggatttgcagctgctccagcagcaagcctgtccgatggtgcccagggagcagtttctgcagcttcaacgccagctgctgcaggcagaaaggataaaccagcacctgcaggaggaacttgaaaacaggacctccgaaaccaacacaccacagggaaaccaggaacaactggtaactgtcatggaggaacgaatgatagaagttgaacagaaactgaaactagtgaaaaggcttcttcaagagaaagtgaatcagctcaaagaacaactctgcaagaacactaaggcagacgcaatggtgaaggacttgtatgttgaaaatgcccagttgttgaaagctctggaagtgactgaacagcgacagaaaacagcagagaagaaaaattacctcctggaggagaagattgccagcctcagtaatatagttaggaatctgacaccagcgccattgacttctacacctcctttgaggtcatagccaaaccaaagggtacactcatatttgtgcactttactgaaatagatgaacatttcagtaggttctcaacttaaaattaagcctaacctaaaactgccagcaacacaactggagtttccatttatcataattagtttttctaaatagacccttatgggagtttgaaaataaatactcacatatttcactacttaaattattcccaagatttgaatttattttaaaattttaatagccaccaagaatgtggacatatgaaaattcaagaacctaaaaaataccagttttgaatgagtttttgtggttttggttttttaattattacaaatctatgtgtaaaatctagatatttgaagtttgagatctgatgagaatggttgttataaactttattttaaaaccaaatttaggtgttcttacatatttaaatactggaaagtcattataatagttttggttctttgaattggtagacaattagtagagtataattggttaggaggcagggcttattaagtggttattaaccgctgacatcagacaaacccaaatctgtagaattctaaccttctaacacctgtgacagtattaccactcttcttgtattatagatttagaactgatttactcaattgcactcttaactaatgttaaaagcttacttgctttaaacagccttttcttctttctcttaaaagtttcatttggggagctggtcttctaagaaacggataaagccacataattaaagcagttgaactatagggaaagcactgaacaaaccactttggagtaaatagctactcttagaaaagagggataagcagaccatgtaggttttctgtctctcaaatcttagagttcataaatttacttgaggttgcctcaagaactcagggaacaatactgtaaactgtcttcctgaactactgtagggcctctctaagaatttgaaatgtataaaccatgtgacctcatttatttgtcttatatatttacagccatactagaatttttatttctacgtttttagtaaatttaatattctgggggaaaaaaggccttgattttagggttaaaaacctgacttatagaagagtttatttaatataggtcaaaattttctgtgtttcttattccttctatacctcaaatctgattctaagaatttcttactgtgataatcattggcatgccacctgaggtcaaggagtgccaaataggactttccactcatgctcaagatcaaaactttatagaacagtcaacattttagattcggtaaccttttttttcttccaattataatctctgcttctagccacttccgccagcagttggtggaagacttactaggtgcagggcactttccaagttcatcacaacaacctgcttgttttcatgagacaataatccgaaaagttcgctttgatatattcctggagggccaagcccatctatttacaaaaggtgaacagcaaaatcaagcactgctttatgggcaggaacacaagagaaagcaaactgcccaagaagtcatcatgtcagaaactcaatctcaacaaaataatttccatcagggaacttcagggtttcttgggggcttatgagtctcaccggtcaacccaggaggcctcactacaagagccttgacaaggcactgttttttgtgggactgggagttcacactgatgaagcaaacctttgaatttttgcacagctcttgtcagaaagccctgagttccccctggataaagagttaattttaatccttccctataattatacttcaaaatatttgacatctgctattatgccttctttagatctttcttctgtggtgcagacatttctagtaagtgtttgactacttgtatggcattagctttcacagaaaattgtttcacttaaaactgtggattggcctaggctaaggacaaaaataaactaagtacctgtagtgtatttatgtgatatgtgtcaagttactcaaagttattgctgttggaactgaacaataatatttcccagatagctggccttagcatgtgatcacggttgttgtatttttaatttttgtcttttacagtatgagaggtgtaggttaatttgtttatttcctataaatttgtatttatgtgtatataaaatgtacaatgaatgtaaatatgactttctggaaagtttagactacatttagaatctctattcaaaatcaaaatgctgctcaaatgaatttaaccaacatctaggtgcttaatttctcattttatcccacttatgagattgggaaaaagatcaatatgagaaataccatacagataccttaaatgtatgcatttgtgcaacaatttttgagaaggtgagtggcaatttataatttagttggcaatttataatagaacttatagcttttaaaagaccttttaaagacattaaatgtaaacttaaaaatgtttagatcttgtttcaaactttacaatagcattcttcaaaatattaagttatatattttataggcatttagttgcttattaaaagcactgattttcaaactttttgatttaagaacaattatttaagatcgtctcagaagatgggatcttcgtttcaagaaaagggaatcaagtttgcctttgagataatacgttacactaagaaaaggaaaatgtggatagtaaaacccacctctctcatcctattgtactctcttctgctttttagaagcctgcacttaagcttagatttgtgaagggagagtagaaggggagaagtagaaccacagtgttttatttatttttctaaaactcttactaaatccagattttttaaactgttttaaatgtgaattcttcccagaaatttcaatgcattgcatatttagccttcggcatatttttcatgaatagatcatgaagtcataggcttccaaggcataggaagagatcttgcaggtctagtattttaataatgcactattacccagggcagatattatgagaaactgtttcttctctaagggtttatggcagactttgcttttttaacatgtgagaaatgaattttttattttgtgatttatgtgatttcttttgctgagtgaaggaaaggagaaattgttgctattgtcagcatcttaaaggtatttccagtcaaggcaaggctaagtgctttgtgatagtattaagcaagtcatgttttgaatggattacctgtagtgactcattggaatgatataattatacaagtaatgccaaaaaccaagtcaaagcctaattaaccaaagcactcatttaaaaatcatcatgtttggacctatctggacctctcagcactgtaaaatagttttggttttgtggcatatgaatagctgtttaacaaatcaaagttagctttttgcttctcagcttttttgggcaatacaagttaagttcttaatggggagacattatcatggcatgacttaagggaacattggtttgtgaaggaaaaacagattatctaaagccatctctatgtttctgttcagataaagattaatgagttctgtgtttatatcagctttgtatatttcatcttagccattctatcctagaaagattttaatgtgagcttaagatgtaaataaataattttgcaaacatgccttttgttttctatataccctgaccttttaataaagtttcagtgtatttatcattggt

SEQ ID NO: 294142 - DNA, 8512 bp, Homo sapiens
tcgcggccgcccgagccgggagccgagcgcgctgggcgcggccgtcccgctgccgccgccaagcccggagtgcgccagcggccatggttcccgcggcggcgccgggcgcctgagccccgggacgcaagcgctggaggcgggctgccggctgtgcgggcgctccggagagaccgacagaaggtgagcactgtgggctatgggatggatgagttggaccaggaccagcatggccgactcaaggacctgtttgacagttttgacacgacgggcacagggtccctggggcaggaggaactcaccgacctttgccacatgttgagcttggaggaggtggccccagtgctgcagcagacattacttcaggacaacctcttgggcagggtacattttgaccaatttaaagaagcattaatactcatcttgtccagaactctgtcaaatgaagaacactttcaagaaccagactgctcactagaagctcagcccaaatatgttagaggtgggaagcgttacggacgaaggtccttgcccgagttccaagagtccgtggaggagtttcctgaagtgacggtgattgagccactggatgaagaagcgcggccttcacacatcccagccggtgactgcagtgagcactggaagacgcaacgcagtgaggagtatgaagcggaaggccagttaaggttttggaacccagatgacttgaatgcttcacagagtggatcttcccctccccaagactggatagaagagaaactgcaagaagtttgtgaagatttggggatcacccgtgatggtcacctgaaccggaagaagctggtctccatctgtgagcagtatggtttacagaatgtggatggagagatgctcgaggaagtattccataatcttgatcctgacggtacaatgagtgtagaagattttttctatggtttgtttaaaaatggaaaatctcttacaccatcagcatctactccatatagacaactaaaaaggcacctttccatgcagtctttcgatgagagtggacgacgtaccacaacctcatcagcaatgacaagtaccattggctttcgggtcttctcctgcctggatgatgggatgggccatgcatctgtggagagaatactcgacacctggcaggaagagggcattgagaacagccaggagatcctgaaggccttggatttcagcctcgatggaaacatcaatttgacagaattaacactggcccttgaaaatgaacttttggttaccaagaacagcattcaccaggcggctctggccagctttaaggctgaaatccggcatttgttggaacgagttgatcaggtggtcagagaaaaagagaagctacggtcagatctggacaaggccgagaagctcaagtctttaatggcctcggaggtggatgatcaccatgcggccatagagcggcggaatgagtacaacctcaggaaactggatgaagagtacaaggagcgaatagcagccttaaaaaatgaactccgaaaagagagagagcagatcctgcagcaggcaggcaagcagcgtttagaacttgaacaggaaattgaaaaggcaaaaacagaagagaactatatccgggaccgccttgccctctctttaaaggaaaacagtcgtctggaaaatgagcttctagaaaatgcagagaatgttggcagaatatgtttggtgacctcgatcctagcagtgctgagttcttcctgcaagaagagagactgacacagatgagaaatgaatatgagcggcagtgcagggtactacaagaccaagtagatgaactccagtctgagctggaagaatatcgtgcacaaggcagagtgctcaggcttccgttgaagaactcaccgtcagaagaagttgaggctaacagcggtggcattgagcccgaacacgggctcggttctgaagaatgcaatccattgaatatgagcattgaggcagagctggtcattgaacagatgaaagaacaacatcacagggacatatgttgcctcagactggagctcgaagataaagtgcgccattatgaaaagcagctggacgaaaccgtggtcagctgcaagaaggcacaggagaacatgaagcaaaggcatgagaacgaaacgcacaccttagaaaaacaaataagtgaccttaaaaatgaaattgctgaacttcaggggcaagcagcagtgctcaaggaggcacatcatgaggccacttgcaggcatgaggaggagaaaaaacaactgcaagtgaagcttgaggaggaaaagactcacctgcaggagaagctgaggctgcaacatgagatggagctcaaggctagactgacacaggctcaagcaagctttgagcgggagagggaaggccttcagagtagcgcctggacagaagagaaggtgagaggcttgactcaggaactagagcagtttcaccaggagcagctgacaagcctggtggagaaacacactcttgagaaagaggagttaagaaaagagctcttggaaaagcaccaaagggagcttcaggagggaagggaaaaaatggaaacagagtgtaatagaagaacctctcaaatagaagcccagtttcagtctgattgtcagaaagtcactgagaggtgtgaaagcgctctgcaaagcctggaggggcgctaccgccaagagctgaaggacctccaggaacagcagcgtgaggagaaatcccagtgggaatttgagaaggacgagctcacccaggagtgtgcggaagcccaggagctgctgaaagagactcttaagagagagaaaacaacttctctggtcctgacccaggagagagagatgctggagaaaacatacaaagaacatttgaacagcatggtcgtcgagagacagcagctactccaagacctggaagacctaagaaatgtatctgaaacccagcaaagcctgctgtctgaccagatacttgagctgaagagcagtcacaaaagggaactgagggagcgtgaggaggtcctgtgccaggcaggggcttcggagcagctggccagccagcggctggaaagactagaaatggaacatgaccaggaaaggcaggaaatgatgtccaagcttctagccatggagaacattcacaaagcgacctgtgagacagcagatcgagaaagagccgagatgagcacagaaatctccagacttcagagtaaaataaaggaaatgcagcaggcaacatctcctctctctatgcttcagagtggttgccaggtgataggagaggaggaggtggaaggagatggagccctgtccctgcttcagcaaggggagcagctgttggaagaaaatggggacgtcctcttaagcctgcagagagctcatgaacaggcagtgaaggaaaatgtgaaaatggctactgaaatttctagattgcaacagaggctacaaaagttagagccagggttagtaatgtcttcttgtttggatgagccagctactgagttttttggaaatactgcggaacaaacagagccgtttttacagcaaaaccgaacgaagcaagtagaaggtgtgaccaggcggcatgtcctaagtgacctggaagatgatgaggtccgggacctgggaagtacagggacgagctctgttcagagacaggaagtcaaaatagaggagtctgaagcttcagtagagggtttttctgagcttgaaaacagtgaagagaccaggactgaatcctgggagctgaagaatcagattagtcagcttcaggaacagctaatgatgttatgtgcggactgtgatcgagcttctgaaaagaaacaggacctactttttgatgtttctgtgctaaaaaagaaactgaagatgcttgagagaatccctgaggcttctcccaaatataagctgttgtatgaagatgtgagccgagaaaatgactgccttcaggaagagctgagaatgatggagacacgctacgatgaggcactagaaaataacaaagaactcactgcagaggttttcaggttgcaggatgagctgaagaaaatggaggaagtcactgaaacattcctcagcctggaaaagagttacgatgaggtcaaaatagaaaatgaggagctgaatgttctggttttgagacttcaaggcaagattgagaagcttcaggaaagcgtggtccagcggtgtgactgctgcttatgggaagccagtttagagaacctggaaatcgaacctgatggaaatatactccagctcaatcagacactggaagagtgtgtgcccagggttaggagtgtacatcatgtcatagaggaatgtaagcaagaaaaccagtaccttgaggggaacacacagctcttggaaaaagtaaaagcacatgaaattgcctggttacatggaacaattcagacacatcaagaaaggccaagagtacagaatcaagttatactggaggaaaacactactctcctaggctttcaagacaaacattttcagcatcaggccaccatagcagagttagaactggagaaaacaaagttacaggagctgactaggaagttgaaggagagagtcactattttagttaagcaaaaagatgtactttctcacggagaaaaggaggaagagctgaaggcaatgatgcatgacttgcagatcacgtgcagtgagatgcagcaaaaagttgaacttctgagatatgaatctgaaaagcttcaacaggaaaattctattttgagaaatgaaattactactttaaatgaagaagatagcatttctaacctgaaattagggacattaaatggatctcaggaagaaatgtggcaaaaaacggaaactgtaaaacaagaaaatgctgcagttcagaagatggttgaaaatttaaagaaacagatttcagaattaaaaatcaaaaaccaacaattggatttggaaaatacagaacttagccaaaagaactctcaaaaccaggaaaaactgcaagaacttaatcaacgtctaacagaaatgctatgccagaaggaaaaagagccaggaaacagtgcattggaggaacgggaacaagagaagtttaatctgaaagaagaactggaacgttgtaaagtgcagtcctccactttagtgtcttctctggaggcggagctctctgaagttaaaatacagacccatattgtgcaacaggaaaaccaccttctcaaagatgaactggagaaaatgaaacagctgcacagatgtcccgatctctctgacttccagcaaaaaatctctagtgttctaagctacaacgaaaaactgctgaaagaaaaggaagctctgagtgaggaattaaatagctgtgtcgataagttggcaaaatcaagtcttttagagcatagaattgcgacgatgaagcaggaacagaaatcctgggaacatcagagtgcgagcttaaagtcacagctggtggcttctcaggaaaaggttcagaatttagaagacaccgtgcagaatgtaaacctgcaaatgtcccggatgaaatctgacctacgagtgactcagcaggaaaaggaggctttaaaacaagaagtgatgtctttacataagcaacttcagaatgctggtggcaagagctgggccccagagatagctactcatccatcagggctccataaccagcagaaaaggctgtcctgggacaagttggatcatctgatgaatgaggaacagcagctgctttggcaagagaatgagaggctccagaccatggtacagaacaccaaagccgaactcacgcactcccgggagaaggtccgtcaattggaatccaatcttcttcccaagcaccaaaaacatctaaacccatcaggtaccatgaatcccacagagcaagaaaaattgagcttaaagagagagtgtgatcagtttcagaaagaacaatctcctgctaacaggaaggtcagtcagatgaattcccttgaacaagaattagaaacaattcatttggaaaatgaaggcctgaaaaagaaacaagtaaaactggatgagcagctcatggagatgcagcacctgaggtccactgcgacgcctagcccgtcccctcatgcttgggatttgcagctgctccagcagcaagcctgtccgatggtgcccagggagcagtttctgcagcttcaacgccagctgctgcaggcagaaaggataaaccagcacctgcaggaggaacttgaaaacaggacctccgaaaccaacacaccacagggaaaccaggaacaactggtaactgtcatggaggaacgaatgatagaagttgaacagaaactgaaactagtgaaaaggcttcttcaagagaaagtgaatcagctcaaagaacaactctgcaagaacactaaggcagacgcaatggtgaaggacttgtatgttgaaaatgcccagttgttgaaagctctggaagtgactgaacagcgacagaaaacagcagagaagaaaaattacctcctggaggagaagattgccagcctcagtaatatagttaggaatctgacaccagcgccattgacttctacacctcctttgaggtcatagccaaaccaaagggtacactcatatttgtgcactttactgaaatagatgaacatttcagtaggttctcaacttaaaattaagcctaacctaaaactgccagcaacacaactggagtttccatttatcataattagtttttctaaatagacccttatgggagtttgaaaataaatactcacatatttcactacttaaattattcccaagatttgaatttattttaaaattttaatagccaccaagaatgtggacatatgaaaattcaagaacctaaaaaataccagttttgaatgagtttttgtggttttggttttttaattattacaaatctatgtgtaaaatctagatatttgaagtttgagatctgatgagaatggttgttataaactttattttaaaaccaaatttaggtgttcttacatatttaaatactggaaagtcattataatagttttggttctttgaattggtagacaattagtagagtataattggttaggaggcagggcttattaagtggttattaaccgctgacatcagacaaacccaaatctgtagaattctaaccttctaacacctgtgacagtattaccactcttcttgtattatagatttagaactgatttactcaattgcactcttaactaatgttaaaagcttacttgctttaaacagccttttcttctttctcttaaaagtttcatttggggagctggtcttctaagaaacggataaagccacataattaaagcagttgaactatagggaaagcactgaacaaaccactttggagtaaatagctactcttagaaaagagggataagcagaccatgtaggttttctgtctctcaaatcttagagttcataaatttacttgaggttgcctcaagaactcagggaacaatactgtaaactgtcttcctgaactactgtagggcctctctaagaatttgaaatgtataaaccatgtgacctcatttatttgtcttatatatttacagccatactagaatttttatttctacgtttttagtaaatttaatattctgggggaaaaaaggccttgattttagggttaaaaacctgacttatagaagagtttatttaatataggtcaaaattttctgtgtttcttattccttctatacctcaaatctgattctaagaatttcttactgtgataatcattggcatgccacctgaggtcaaggagtgccaaataggactttccactcatgctcaagatcaaaactttatagaacagtcaacattttagattcggtaaccttttttttcttccaattataatctctgcttctagccacttccgccagcagttggtggaagacttactaggtgcagggcactttccaagttcatcacaacaacctgcttgttttcatgagacaataatccgaaaagttcgctttgatatattcctggagggccaagcccatctatttacaaaaggtgaacagcaaaatcaagcactgctttatgggcaggaacacaagagaaagcaaactgcccaagaagtcatcatgtcagaaactcaatctcaacaaaataatttccatcagggaacttcagggtttcttgggggcttatgagtctcaccggtcaacccaggaggcctcactacaagagccttgacaaggcactgttttttgtgggactgggagttcacactgatgaagcaaacctttgaatttttgcacagctcttgtcagaaagccctgagttccccctggataaagagttaattttaatccttccctataattatacttcaaaatatttgacatctgctattatgccttctttagatctttcttctgtggtgcagacatttctagtaagtgtttgactacttgtatggcattagctttcacagaaaattgtttcacttaaaactgtggattggcctaggctaaggacaaaaataaactaagtacctgtagtgt

SEQ ID NO: 294143 - DNA, 10882 bp, Homo sapiens
aaaactcagagtgagactaagagctaccgcaacactgaaaatcctggagcaccttggggattctcagcagatcttagttgacaattaactggtggactctaagtgaatcttgttagcgaagtgttggccttgtctaaattcttaactcctgtggctttgcataacaacttggtgtttcttttctgaggctttgatgtttatataacactctcaacttattttgaaaacatttacatagtgattagttaacccaacagaccaatcctgggaagacagccagagcctgcagcaccttagtaacagaaaaactgataattaggagaagagacctgtccaagaccaggaacctggaccaaaattgtgccatgttgctttactttaatgagtggccccagtaaaaactgagctgtatggcagagctgttcacatttatcttctgtgtccacccagttctgctgaaacccctggcaagatcgtggccctgttgtagcttgtcatgttttgaacagctgtctatggaaagaaagcaaacacaacctagagcaacattgatttgttttagaaagctcttttattttcagttctggctgtgttcaacatcttagcttacgtttttcatgttgtaatgatctgccgtacggacgatcacctctaagttagagagttctgtaatttggcttggattaaagatgcttggttagtgaaagctgctgctttttttatagtcaaaggactggttctgagagccttgttgcagatggctgaggtcaccgtcccaagggtgtatgtcgtgtttggcatccattgcatcatggcgaaggcatcttcagatgtgcaggtttcaggctttcatcggaaaatccagcacgttaaaaatgaactttgccacatgttgagcttggaggaggtggccccagtgctgcagcagacattacttcaggacaacctcttgggcagggtacattttgaccaatttaaagaagcattaatactcatcttgtccagaactctgtcaaatgaagaacactttcaagaaccagactgctcactagaagctcagcccaaatatgttagaggtgggaagcgttacggacgaaggtccttgcccgagttccaagagtccgtggaggagtttcctgaagtgacggtgattgagccactggatgaagaagcgcggccttcacacatcccagccggtgactgcagtgagcactggaagacgcaacgcagtgaggagtatgaagcggaaggccagttaaggttttggaacccagatgacttgaatgcttcacagagtggatcttcccctccccaagactggatagaagagaaactgcaagaagtttgtgaagatttggggatcacccgtgatggtcacctgaaccggaagaagctggtctccatctgtgagcagtatggtttacagaatgtggatggagagatgctcgaggaagtattccataatcttgatcctgacggtacaatgagtgtagaagattttttctatggtttgtttaaaaatggaaaatctcttacaccatcagcatctactccatatagacaactaaaaaggcacctttccatgcagtctttcgatgagagtggacgacgtaccacaacctcatcagcaatgacaagtaccattggctttcgggtcttctcctgcctggatgatgggatgggccatgcatctgtggagagaatactcgacacctggcaggaagagggcattgagaacagccaggagatcctgaaggccttggatttcagcctcgatggaaacatcaatttgacagaattaacactggcccttgaaaatgaacttttggttaccaagaacagcattcaccaggcggctctggccagctttaaggctgaaatccggcatttgttggaacgagttgatcaggtggtcagagaaaaagagaagctacggtcagatctggacaaggccgagaagctcaagtctttaatggcctcggaggtggatgatcaccatgcggccatagagcggcggaatgagtacaacctcaggaaactggatgaagagtacaaggagcgaatagcagccttaaaaaatgaactccgaaaagagagagagcagatcctgcagcaggcaggcaagcagcgtttagaacttgaacaggaaattgaaaaggcaaaaacagaagagaactatatccgggaccgccttgccctctctttaaaggaaaacagtcgtctggaaaatgagcttctagaaaatgcagagaatgttggcagaatatgagaatctgacaaacaaacttcagagaaatttggaaaatgtgttagcagaaaagtttggtgacctcgatcctagcagtgctgagttcttcctgcaagaagagagactgacacagatgagaaatgaatatgagcggcagtgcagggtactacaagaccaagtagatgaactccagtctgagctggaagaatatcgtgcacaaggcagagtgctcaggcttccgttgaagaactcaccgtcagaagaagttgaggctaacagcggtggcattgagcccgaacacgggctcggttctgaagaatgcaatccattgaatatgagcattgaggcagagctggtcattgaacagatgaaagaacaacatcacagggacatatgttgcctcagactggagctcgaagataaagtgcgccattatgaaaagcagctggacgaaaccgtggtcagctgcaagaaggcacaggagaacatgaagcaaaggcatgagaacgaaacgcacaccttagaaaaacaaataagtgaccttaaaaatgaaattgctgaacttcaggggcaagcagcagtgctcaaggaggcacatcatgaggccacttgcaggcatgaggaggagaaaaaacaactgcaagtgaagcttgaggaggaaaagactcacctgcaggagaagctgaggctgcaacatgagatggagctcaaggctagactgacacaggctcaagcaagctttgagcgggagagggaaggccttcagagtagcgcctggacagaagagaaggtgagaggcttgactcaggaactagagcagtttcaccaggagcagctgacaagcctggtggagaaacacactcttgagaaagaggagttaagaaaagagctcttggaaaagcaccaaagggagcttcaggagggaagggaaaaaatggaaacagagtgtaatagaagaacctctcaaatagaagcccagtttcagtctgattgtcagaaagtcactgagaggtgtgaaagcgctctgcaaagcctggaggggcgctaccgccaagagctgaaggacctccaggaacagcagcgtgaggagaaatcccagtgggaatttgagaaggacgagctcacccaggagtgtgcggaagcccaggagctgctgaaagagactcttaagagagagaaaacaacttctctggtcctgacccaggagagagagatgctggagaaaacatacaaagaacatttgaacagcatggtcgtcgagagacagcagctactccaagacctggaagacctaagaaatgtatctgaaacccagcaaagcctgctgtctgaccagatacttgagctgaagagcagtcacaaaagggaactgagggagcgtgaggaggtcctgtgccaggcaggggcttcggagcagctggccagccagcggctggaaagactagaaatggaacatgaccaggaaaggcaggaaatgatgtccaagcttctagccatggagaacattcacaaagcgacctgtgagacagcagatcgagaaagagccgagatgagcacagaaatctccagacttcagagtaaaataaaggaaatgcagcaggcaacatctcctctctctatgcttcagagtggttgccaggtgataggagaggaggaggtggaaggagatggagccctgtccctgcttcagcaaggggagcagctgttggaagaaaatggggacgtcctcttaagcctgcagagagctcatgaacaggcagtgaaggaaaatgtgaaaatggctactgaaatttctagattgcaacagaggctacaaaagttagagccagggttagtaatgtcttcttgtttggatgagccagctactgagttttttggaaatactgcggaacaaacagagccgtttttacagcaaaaccgaacgaagcaagtagaaggtgtgaccaggcggcatgtcctaagtgacctggaagatgatgaggtccgggacctgggaagtacagggacgagctctgttcagagacaggaagtcaaaatagaggagtctgaagcttcagtagagggtttttctgagcttgaaaacagtgaagagaccaggactgaatcctgggagctgaagaatcagattagtcagcttcaggaacagctaatgatgttatgtgcggactgtgatcgagcttctgaaaagaaacaggacctactttttgatgtttctgtgctaaaaaagaaactgaagatgcttgagagaatccctgaggcttctcccaaatataagctgttgtatgaagatgtgagccgagaaaatgactgccttcaggaagagctgagaatgatggagacacgctacgatgaggcactagaaaataacaaagaactcactgcagaggttttcaggttgcaggatgagctgaagaaaatggaggaagtcactgaaacattcctcagcctggaaaagagttacgatgaggtcaaaatagaaaatgaggagctgaatgttctggttttgagacttcaaggcaagattgagaagcttcaggaaagcgtggtccagcggtgtgactgctgcttatgggaagccagtttagagaacctggaaatcgaacctgatggaaatatactccagctcaatcagacactggaagagtgtgtgcccagggttaggagtgtacatcatgtcatagaggaatgtaagcaagaaaaccagtaccttgaggggaacacacagctcttggaaaaagtaaaagcacatgaaattgcctggttacatggaacaattcagacacatcaagaaaggccaagagtacagaatcaagttatactggaggaaaacactactctcctaggctttcaagacaaacattttcagcatcaggccaccatagcagagttagaactggagaaaacaaagttacaggagctgactaggaagttgaaggagagagtcactattttagttaagcaaaaagatgtactttctcacggagaaaaggaggaagagctgaaggcaatgatgcatgacttgcagatcacgtgcagtgagatgcagcaaaaagttgaacttctgagatatgaatctgaaaagcttcaacaggaaaattctattttgagaaatgaaattactactttaaatgaagaagatagcatttctaacctgaaattagggacattaaatggatctcaggaagaaatgtggcaaaaaacggaaactgtaaaacaagaaaatgctgcagttcagaagatggttgaaaatttaaagaaacagatttcagaattaaaaatcaaaaaccaacaattggatttggaaaatacagaacttagccaaaagaactctcaaaaccaggaaaaactgcaagaacttaatcaacgtctaacagaaatgctatgccagaaggaaaaagagccaggaaacagtgcattggaggaacgggaacaagagaagtttaatctgaaagaagaactggaacgttgtaaagtgcagtcctccactttagtgtcttctctggaggcggagctctctgaagttaaaatacagacccatattgtgcaacaggaaaaccaccttctcaaagatgaactggagaaaatgaaacagctgcacagatgtcccgatctctctgacttccagcaaaaaatctctagtgttctaagctacaacgaaaaactgctgaaagaaaaggaagctctgagtgaggaattaaatagctgtgtcgataagttggcaaaatcaagtcttttagagcatagaattgcgacgatgaagcaggaacagaaatcctgggaacatcagagtgcgagcttaaagtcacagctggtggcttctcaggaaaaggttcagaatttagaagacaccgtgcagaatgtaaacctgcaaatgtcccggatgaaatctgacctacgagtgactcagcaggaaaaggaggctttaaaacaagaagtgatgtctttacataagcaacttcagaatgctggtggcaagagctgggccccagagatagctactcatccatcagggctccataaccagcagaaaaggctgtcctgggacaagttggatcatctgatgaatgaggaacagcagctgctttggcaagagaatgagaggctccagaccatggtacagaacaccaaagccgaactcacgcactcccgggagaaggtccgtcaattggaatccaatcttcttcccaagcaccaaaaacatctaaacccatcaggtaccatgaatcccacagagcaagaaaaattgagcttaaagagagagtgtgatcagtttcagaaagaacaatctcctgctaacaggaaggtcagtcagatgaattcccttgaacaagaattagaaacaattcatttggaaaatgaaggcctgaaaaagaaacaagtaaaactggatgagcagctcatggagatgcagcacctgaggtccactgcgacgcctagcccgtcccctcatgcttgggatttgcagctgctccagcagcaagcctgtccgatggtgcccagggagcagtttctgcagcttcaacgccagctgctgcaggcagaaaggataaaccagcacctgcaggaggaacttgaaaacaggacctccgaaaccaacacaccacagggaaaccaggaacaactggtaactgtcatggaggaacgaatgatagaagttgaacagaaactgaaactagtgaaaaggcttcttcaagagaaagtgaatcagctcaaagaacaactctgcaagaacactaaggcagacgcaatggtgaaggacttgtatgttgaaaatgcccagttgttgaaagctctggaagtgactgaacagcgacagaaaacagcagagaagaaaaattacctcctggaggagaagattgccagcctcagtaatatagttaggaatctgacaccagcgccattgacttctacacctcctttgaggtcatagccaaaccaaagggtacactcatatttgtgcactttactgaaatagatgaacatttcagtaggttctcaacttaaaattaagcctaacctaaaactgccagcaacacaactggagtttccatttatcataattagtttttctaaatagacccttatgggagtttgaaaataaatactcacatatttcactacttaaattattcccaagatttgaatttattttaaaattttaatagccaccaagaatgtggacatatgaaaattcaagaacctaaaaaataccagttttgaatgagtttttgtggttttggttttttaattattacaaatctatgtgtaaaatctagatatttgaagtttgagatctgatgagaatggttgttataaactttattttaaaaccaaatttaggtgttcttacatatttaaatactggaaagtcattataatagttttggttctttgaattggtagacaattagtagagtataattggttaggaggcagggcttattaagtggttattaaccgctgacatcagacaaacccaaatctgtagaattctaaccttctaacacctgtgacagtattaccactcttcttgtattatagatttagaactgatttactcaattgcactcttaactaatgttaaaagcttacttgctttaaacagccttttcttctttctcttaaaagtttcatttggggagctggtcttctaagaaacggataaagccacataattaaagcagttgaactatagggaaagcactgaacaaaccactttggagtaaatagctactcttagaaaagagggataagcagaccatgtaggttttctgtctctcaaatcttagagttcataaatttacttgaggttgcctcaagaactcagggaacaatactgtaaactgtcttcctgaactactgtagggcctctctaagaatttgaaatgtataaaccatgtgacctcatttatttgtcttatatatttacagccatactagaatttttatttctacgtttttagtaaatttaatattctgggggaaaaaaggccttgattttagggttaaaaacctgacttatagaagagtttatttaatataggtcaaaattttctgtgtttcttattccttctatacctcaaatctgattctaagaatttcttactgtgataatcattggcatgccacctgaggtcaaggagtgccaaataggactttccactcatgctcaagatcaaaactttatagaacagtcaacattttagattcggtaaccttttttttcttccaattataatctctgcttctagccacttccgccagcagttggtggaagacttactaggtgcagggcactttccaagttcatcacaacaacctgcttgttttcatgagacaataatccgaaaagttcgctttgatatattcctggagggccaagcccatctatttacaaaaggtgaacagcaaaatcaagcactgctttatgggcaggaacacaagagaaagcaaactgcccaagaagtcatcatgtcagaaactcaatctcaacaaaataatttccatcagggaacttcagggtttcttgggggcttatgagtctcaccggtcaacccaggaggcctcactacaagagccttgacaaggcactgttttttgtgggactgggagttcacactgatgaagcaaacctttgaatttttgcacagctcttgtcagaaagccctgagttccccctggataaagagttaattttaatccttccctataattatacttcaaaatatttgacatctgctattatgccttctttagatctttcttctgtggtgcagacatttctagtaagtgtttgactacttgtatggcattagctttcacagaaaattgtttcacttaaaactgtggattggcctaggctaaggacaaaaataaactaagtacctgtagtgtatttatgtgatatgtgtcaagttactcaaagttattgctgttggaactgaacaataatatttcccagatagctggccttagcatgtgatcacggttgttgtatttttaatttttgtcttttacagtatgagaggtgtaggttaatttgtttatttcctataaatttgtatttatgtgtatataaaatgtacaatgaatgtaaatatgactttctggaaagtttagactacatttagaatctctattcaaaatcaaaatgctgctcaaatgaatttaaccaacatctaggtgcttaatttctcattttatcccacttatgagattgggaaaaagatcaatatgagaaataccatacagataccttaaatgtatgcatttgtgcaacaatttttgagaaggtgagtggcaatttataatttagttggcaatttataatagaacttatagcttttaaaagaccttttaaagacattaaatgtaaacttaaaaatgtttagatcttgtttcaaactttacaatagcattcttcaaaatattaagttatatattttataggcatttagttgcttattaaaagcactgattttcaaactttttgatttaagaacaattatttaagatcgtctcagaagatgggatcttcgtttcaagaaaagggaatcaagtttgcctttgagataatacgttacactaagaaaaggaaaatgtggatagtaaaacccacctctctcatcctattgtactctcttctgctttttagaagcctgcacttaagcttagatttgtgaagggagagtagaaggggagaagtagaaccacagtgttttatttatttttctaaaactcttactaaatccagattttttaaactgttttaaatgtgaattcttcccagaaatttcaatgcattgcatatttagccttcggcatatttttcatgaatagatcatgaagtcataggcttccaaggcataggaagagatcttgcaggtctagtattttaataatgcactattacccagggcagatattatgagaaactgtttcttctctaagggtttatggcagactttgcttttttaacatgtgagaaatgaattttttattttgtgatttatgtgatttcttttgctgagtgaaggaaaggagaaattgttgctattgtcagcatcttaaaggtatttccagtcaaggcaaggctaagtgctttgtgatagtattaagcaagtcatgttttgaatggattacctgtagtgactcattggaatgatataattatacaagtaatgccaaaaaccaagtcaaagcctaattaaccaaagcactcatttaaaaatcatcatgtttggacctatctggacctctcagcactgtaaaatagttttggttttgtggcatatgaatagctgtttaacaaatcaaagttagctttttgcttctcagcttttttgggcaatacaagttaagttcttaatggggagacattatcatggcatgacttaagggaacattggtttgtgaaggaaaaacagattatctaaagccatctctatgtttctgttcagataaagattaatgagttctgtgtttatatcagctttgtatatttcatcttagccattctatcctagaaagattttaatgtgagcttaagatgtaaataaataattttgcaaacatgccttttgttttctatataccctgaccttttaataaagtttcagtgtatttatcattggt

SEQ ID NO: 294144 - DNA, 9901 bp, Homo sapiens
ggcagctaagaactgagattctcatgtcatgtggcctcaactcttgtctcctctctcagactgctcactagaagctcagcccaaatatgttagaggtgggaagcgttacggacgaaggtccttgcccgagttccaagagtccgtggaggagtttcctgaagtgacggtgattgagccactggatgaagaagcgcggccttcacacatcccagccggtgactgcagtgagcactggaagacgcaacgcagtgaggagtatgaagcggaaggccagttaaggttttggaacccagatgacttgaatgcttcacagagtggatcttcccctccccaagactggatagaagagaaactgcaagaagtttgtgaagatttggggatcacccgtgatggtcacctgaaccggaagaagctggtctccatctgtgagcagtatggtttacagaatgtggatggagagatgctcgaggaagtattccataatcttgatcctgacggtacaatgagtgtagaagattttttctatggtttgtttaaaaatggaaaatctcttacaccatcagcatctactccatatagacaactaaaaaggcacctttccatgcagtctttcgatgagagtggacgacgtaccacaacctcatcagcaatgacaagtaccattggctttcgggtcttctcctgcctggatgatgggatgggccatgcatctgtggagagaatactcgacacctggcaggaagagggcattgagaacagccaggagatcctgaaggccttggatttcagcctcgatggaaacatcaatttgacagaattaacactggcccttgaaaatgaacttttggttaccaagaacagcattcaccaggcggctctggccagctttaaggctgaaatccggcatttgttggaacgagttgatcaggtggtcagagaaaaagagaagctacggtcagatctggacaaggccgagaagctcaagtctttaatggcctcggaggtggatgatcaccatgcggccatagagcggcggaatgagtacaacctcaggaaactggatgaagagtacaaggagcgaatagcagccttaaaaaatgaactccgaaaagagagagagcagatcctgcagcaggcaggcaagcagcgtttagaacttgaacaggaaattgaaaaggcaaaaacagaagagaactatatccgggaccgccttgccctctctttaaaggaaaacagtcgtctggaaaatgagcttctagaaaatgcagagaatgttggcagaatatgagaatctgacaaacaaacttcagagaaatttggaaaatgtgttagcagaaaagtttggtgacctcgatcctagcagtgctgagttcttcctgcaagaagagagactgacacagatgagaaatgaatatgagcggcagtgcagggtactacaagaccaagtagatgaactccagtctgagctggaagaatatcgtgcacaaggcagagtgctcaggcttccgttgaagaactcaccgtcagaagaagttgaggctaacagcggtggcattgagcccgaacacgggctcggttctgaagaatgcaatccattgaatatgagcattgaggcagagctggtcattgaacagatgaaagaacaacatcacagggacatatgttgcctcagactggagctcgaagataaagtgcgccattatgaaaagcagctggacgaaaccgtggtcagctgcaagaaggcacaggagaacatgaagcaaaggcatgagaacgaaacgcacaccttagaaaaacaaataagtgaccttaaaaatgaaattgctgaacttcaggggcaagcagcagtgctcaaggaggcacatcatgaggccacttgcaggcatgaggaggagaaaaaacaactgcaagtgaagcttgaggaggaaaagactcacctgcaggagaagctgaggctgcaacatgagatggagctcaaggctagactgacacaggctcaagcaagctttgagcgggagagggaaggccttcagagtagcgcctggacagaagagaaggtgagaggcttgactcaggaactagagcagtttcaccaggagcagctgacaagcctggtggagaaacacactcttgagaaagaggagttaagaaaagagctcttggaaaagcaccaaagggagcttcaggagggaagggaaaaaatggaaacagagtgtaatagaagaacctctcaaatagaagcccagtttcagtctgattgtcagaaagtcactgagaggtgtgaaagcgctctgcaaagcctggaggggcgctaccgccaagagctgaaggacctccaggaacagcagcgtgaggagaaatcccagtgggaatttgagaaggacgagctcacccaggagtgtgcggaagcccaggagctgctgaaagagactcttaagagagagaaaacaacttctctggtcctgacccaggagagagagatgctggagaaaacatacaaagaacatttgaacagcatggtcgtcgagagacagcagctactccaagacctggaagacctaagaaatgtatctgaaacccagcaaagcctgctgtctgaccagatacttgagctgaagagcagtcacaaaagggaactgagggagcgtgaggaggtcctgtgccaggcaggggcttcggagcagctggccagccagcggctggaaagactagaaatggaacatgaccaggaaaggcaggaaatgatgtccaagcttctagccatggagaacattcacaaagcgacctgtgagacagcagatcgagaaagagccgagatgagcacagaaatctccagacttcagagtaaaataaaggaaatgcagcaggcaacatctcctctctctatgcttcagagtggttgccaggtgataggagaggaggaggtggaaggagatggagccctgtccctgcttcagcaaggggagcagctgttggaagaaaatggggacgtcctcttaagcctgcagagagctcatgaacaggcagtgaaggaaaatgtgaaaatggctactgaaatttctagattgcaacagaggctacaaaagttagagccagggttagtaatgtcttcttgtttggatgagccagctactgagttttttggaaatactgcggaacaaacagagccgtttttacagcaaaaccgaacgaagcaagtagaaggtgtgaccaggcggcatgtcctaagtgacctggaagatgatgaggtccgggacctgggaagtacagggacgagctctgttcagagacaggaagtcaaaatagaggagtctgaagcttcagtagagggtttttctgagcttgaaaacagtgaagagaccaggactgaatcctgggagctgaagaatcagattagtcagcttcaggaacagctaatgatgttatgtgcggactgtgatcgagcttctgaaaagaaacaggacctactttttgatgtttctgtgctaaaaaagaaactgaagatgcttgagagaatccctgaggcttctcccaaatataagctgttgtatgaagatgtgagccgagaaaatgactgccttcaggaagagctgagaatgatggagacacgctacgatgaggcactagaaaataacaaagaactcactgcagaggttttcaggttgcaggatgagctgaagaaaatggaggaagtcactgaaacattcctcagcctggaaaagagttacgatgaggtcaaaatagaaaatgaggagctgaatgttctggttttgagacttcaaggcaagattgagaagcttcaggaaagcgtggtccagcggtgtgactgctgcttatgggaagccagtttagagaacctggaaatcgaacctgatggaaatatactccagctcaatcagacactggaagagtgtgtgcccagggttaggagtgtacatcatgtcatagaggaatgtaagcaagaaaaccagtaccttgaggggaacacacagctcttggaaaaagtaaaagcacatgaaattgcctggttacatggaacaattcagacacatcaagaaaggccaagagtacagaatcaagttatactggaggaaaacactactctcctaggctttcaagacaaacattttcagcatcaggccaccatagcagagttagaactggagaaaacaaagttacaggagctgactaggaagttgaaggagagagtcactattttagttaagcaaaaagatgtactttctcacggagaaaaggaggaagagctgaaggcaatgatgcatgacttgcagatcacgtgcagtgagatgcagcaaaaagttgaacttctgagatatgaatctgaaaagcttcaacaggaaaattctattttgagaaatgaaattactactttaaatgaagaagatagcatttctaacctgaaattagggacattaaatggatctcaggaagaaatgtggcaaaaaacggaaactgtaaaacaagaaaatgctgcagttcagaagatggttgaaaatttaaagaaacagatttcagaattaaaaatcaaaaaccaacaattggatttggaaaatacagaacttagccaaaagaactctcaaaaccaggaaaaactgcaagaacttaatcaacgtctaacagaaatgctatgccagaaggaaaaagagccaggaaacagtgcattggaggaacgggaacaagagaagtttaatctgaaagaagaactggaacgttgtaaagtgcagtcctccactttagtgtcttctctggaggcggagctctctgaagttaaaatacagacccatattgtgcaacaggaaaaccaccttctcaaagatgaactggagaaaatgaaacagctgcacagatgtcccgatctctctgacttccagcaaaaaatctctagtgttctaagctacaacgaaaaactgctgaaagaaaaggaagctctgagtgaggaattaaatagctgtgtcgataagttggcaaaatcaagtcttttagagcatagaattgcgacgatgaagcaggaacagaaatcctgggaacatcagagtgcgagcttaaagtcacagctggtggcttctcaggaaaaggttcagaatttagaagacaccgtgcagaatgtaaacctgcaaatgtcccggatgaaatctgacctacgagtgactcagcaggaaaaggaggctttaaaacaagaagtgatgtctttacataagcaacttcagaatgctggtggcaagagctgggccccagagatagctactcatccatcagggctccataaccagcagaaaaggctgtcctgggacaagttggatcatctgatgaatgaggaacagcagctgctttggcaagagaatgagaggctccagaccatggtacagaacaccaaagccgaactcacgcactcccgggagaaggtccgtcaattggaatccaatcttcttcccaagcaccaaaaacatctaaacccatcaggtaccatgaatcccacagagcaagaaaaattgagcttaaagagagagtgtgatcagtttcagaaagaacaatctcctgctaacaggaaggtcagtcagatgaattcccttgaacaagaattagaaacaattcatttggaaaatgaaggcctgaaaaagaaacaagtaaaactggatgagcagctcatggagatgcagcacctgaggtccactgcgacgcctagcccgtcccctcatgcttgggatttgcagctgctccagcagcaagcctgtccgatggtgcccagggagcagtttctgcagcttcaacgccagctgctgcaggcagaaaggataaaccagcacctgcaggaggaacttgaaaacaggacctccgaaaccaacacaccacagggaaaccaggaacaactggtaactgtcatggaggaacgaatgatagaagttgaacagaaactgaaactagtgaaaaggcttcttcaagagaaagtgaatcagctcaaagaacaactctgcaagaacactaaggcagacgcaatggtgaaggacttgtatgttgaaaatgcccagttgttgaaagctctggaagtgactgaacagcgacagaaaacagcagagaagaaaaattacctcctggaggagaagattgccagcctcagtaatatagttaggaatctgacaccagcgccattgacttctacacctcctttgaggtcatagccaaaccaaagggtacactcatatttgtgcactttactgaaatagatgaacatttcagtaggttctcaacttaaaattaagcctaacctaaaactgccagcaacacaactggagtttccatttatcataattagtttttctaaatagacccttatgggagtttgaaaataaatactcacatatttcactacttaaattattcccaagatttgaatttattttaaaattttaatagccaccaagaatgtggacatatgaaaattcaagaacctaaaaaataccagttttgaatgagtttttgtggttttggttttttaattattacaaatctatgtgtaaaatctagatatttgaagtttgagatctgatgagaatggttgttataaactttattttaaaaccaaatttaggtgttcttacatatttaaatactggaaagtcattataatagttttggttctttgaattggtagacaattagtagagtataattggttaggaggcagggcttattaagtggttattaaccgctgacatcagacaaacccaaatctgtagaattctaaccttctaacacctgtgacagtattaccactcttcttgtattatagatttagaactgatttactcaattgcactcttaactaatgttaaaagcttacttgctttaaacagccttttcttctttctcttaaaagtttcatttggggagctggtcttctaagaaacggataaagccacataattaaagcagttgaactatagggaaagcactgaacaaaccactttggagtaaatagctactcttagaaaagagggataagcagaccatgtaggttttctgtctctcaaatcttagagttcataaatttacttgaggttgcctcaagaactcagggaacaatactgtaaactgtcttcctgaactactgtagggcctctctaagaatttgaaatgtataaaccatgtgacctcatttatttgtcttatatatttacagccatactagaatttttatttctacgtttttagtaaatttaatattctgggggaaaaaaggccttgattttagggttaaaaacctgacttatagaagagtttatttaatataggtcaaaattttctgtgtttcttattccttctatacctcaaatctgattctaagaatttcttactgtgataatcattggcatgccacctgaggtcaaggagtgccaaataggactttccactcatgctcaagatcaaaactttatagaacagtcaacattttagattcggtaaccttttttttcttccaattataatctctgcttctagccacttccgccagcagttggtggaagacttactaggtgcagggcactttccaagttcatcacaacaacctgcttgttttcatgagacaataatccgaaaagttcgctttgatatattcctggagggccaagcccatctatttacaaaaggtgaacagcaaaatcaagcactgctttatgggcaggaacacaagagaaagcaaactgcccaagaagtcatcatgtcagaaactcaatctcaacaaaataatttccatcagggaacttcagggtttcttgggggcttatgagtctcaccggtcaacccaggaggcctcactacaagagccttgacaaggcactgttttttgtgggactgggagttcacactgatgaagcaaacctttgaatttttgcacagctcttgtcagaaagccctgagttccccctggataaagagttaattttaatccttccctataattatacttcaaaatatttgacatctgctattatgccttctttagatctttcttctgtggtgcagacatttctagtaagtgtttgactacttgtatggcattagctttcacagaaaattgtttcacttaaaactgtggattggcctaggctaaggacaaaaataaactaagtacctgtagtgtatttatgtgatatgtgtcaagttactcaaagttattgctgttggaactgaacaataatatttcccagatagctggccttagcatgtgatcacggttgttgtatttttaatttttgtcttttacagtatgagaggtgtaggttaatttgtttatttcctataaatttgtatttatgtgtatataaaatgtacaatgaatgtaaatatgactttctggaaagtttagactacatttagaatctctattcaaaatcaaaatgctgctcaaatgaatttaaccaacatctaggtgcttaatttctcattttatcccacttatgagattgggaaaaagatcaatatgagaaataccatacagataccttaaatgtatgcatttgtgcaacaatttttgagaaggtgagtggcaatttataatttagttggcaatttataatagaacttatagcttttaaaagaccttttaaagacattaaatgtaaacttaaaaatgtttagatcttgtttcaaactttacaatagcattcttcaaaatattaagttatatattttataggcatttagttgcttattaaaagcactgattttcaaactttttgatttaagaacaattatttaagatcgtctcagaagatgggatcttcgtttcaagaaaagggaatcaagtttgcctttgagataatacgttacactaagaaaaggaaaatgtggatagtaaaacccacctctctcatcctattgtactctcttctgctttttagaagcctgcacttaagcttagatttgtgaagggagagtagaaggggagaagtagaaccacagtgttttatttatttttctaaaactcttactaaatccagattttttaaactgttttaaatgtgaattcttcccagaaatttcaatgcattgcatatttagccttcggcatatttttcatgaatagatcatgaagtcataggcttccaaggcataggaagagatcttgcaggtctagtattttaataatgcactattacccagggcagatattatgagaaactgtttcttctctaagggtttatggcagactttgcttttttaacatgtgagaaatgaattttttattttgtgatttatgtgatttcttttgctgagtgaaggaaaggagaaattgttgctattgtcagcatcttaaaggtatttccagtcaaggcaaggctaagtgctttgtgatagtattaagcaagtcatgttttgaatggattacctgtagtgactcattggaatgatataattatacaagtaatgccaaaaaccaagtcaaagcctaattaaccaaagcactcatttaaaaatcatcatgtttggacctatctggacctctcagcactgtaaaatagttttggttttgtggcatatgaatagctgtttaacaaatcaaagttagctttttgcttctcagcttttttgggcaatacaagttaagttcttaatggggagacattatcatggcatgacttaagggaacattggtttgtgaaggaaaaacagattatctaaagccatctctatgtttctgttcagataaagattaatgagttctgtgtttatatcagctttgtatatttcatcttagccattctatcctagaaagattttaatgtgagcttaagatgtaaataaataattttgcaaacatgccttttgttttctatataccctgaccttttaataaagtttcagtgtatttatcattggt

SEQ ID NO: 294145 - DNA, 8743 bp, Homo sapiens
aaaactcagagtgagactaagagctaccgcaacactgaaaatcctggagcaccttggggattctcagcagatcttagttgacaattaactggtggactctaagtgaatcttgttagcgaagtgttggccttgtctaaattcttaactcctgtggctttgcataacaacttggtgtttcttttctgaggctttgatgtttatataacactctcaacttattttgaaaacatttacatagtgattagttaacccaacagaccaatcctgggaagacagccagagcctgcagcaccttagtaacagaaaaactgataattaggagaagagacctgtccaagaccaggaacctggaccaaaattgtgccatgttgctttactttaatgagtggccccagtaaaaactgagctgtatggcagagctgttcacatttatcttctgtgtccacccagttctgctgaaacccctggcaagatcgtggccctgttgtagcttgtcatgttttgaacagctgtctatggaaagaaagcaaacacaacctagagcaacattgatttgttttagaaagctcttttattttcagttctggctgtgttcaacatcttagcttacgtttttcatgttgtaatgatctgccgtacggacgatcacctctaagttagagagttctgtaatttggcttggattaaagatgcttggttagtgaaagctgctgctttttttatagtcaaaggactggttctgagagccttgttgcagatggctgaggtcaccgtcccaagggtgtatgtcgtgtttggcatccattgcatcatggcgaaggcatcttcagatgtgcaggtttcaggctttcatcggaaaatccagcacgttaaaaatgaactttgccacatgttgagcttggaggaggtggccccagtgctgcagcagacattacttcaggacaacctcttgggcagggtacattttgaccaatttaaagaagcattaatactcatcttgtccagaactctgtcaaatgaagaacactttcaagaaccagactgctcactagaagctcagcccaaatatgttagaggtgggaagcgttacggacgaaggtccttgcccgagttccaagagtccgtggaggagtttcctgaagtgacggtgattgagccactggatgaagaagcgcggccttcacacatcccagccggtgactgcagtgagcactggaagacgcaacgcagtgaggagtatgaagcggaaggccagttaaggttttggaacccagatgacttgaatgcttcacagagtggatcttcccctccccaagactggatagaagagaaactgcaagaagtttgtgaagatttggggatcacccgtgatggtcacctgaaccggaagaagctggtctccatctgtgagcagtatggtttacagaatgtggatggagagatgctcgaggaagtattccataatcttgatcctgacggtacaatgagtgtagaagattttttctatggtttgtttaaaaatggaaaatctcttacaccatcagcatctactccatatagacaactaaaaaggcacctttccatgcagtctttcgatgagagtggacgacgtaccacaacctcatcagcaatgacaagtaccattggctttcgggtcttctcctgcctggatgatgggatgggccatgcatctgtggagagaatactcgacacctggcaggaagagggcattgagaacagccaggagatcctgaaggccttggatttcagcctcgatggaaacatcaatttgacagaattaacactggcccttgaaaatgaacttttggttaccaagaacagcattcaccaggcggctctggccagctttaaggctgaaatccggcatttgttggaacgagttgatcaggtggtcagagaaaaagagaagctacggtcagatctggacaaggccgagaagctcaagtctttaatggcctcggaggtggatgatcaccatgcggccatagagcggcggaatgagtacaacctcaggaaactggatgaagagtacaaggagcgaatagcagccttaaaaaatgaactccgaaaagagagagagcagatcctgcagcaggcaggcaagcagcgtttagaacttgaacaggaaattgaaaaggcaaaaacagaagagaactatatccgggaccgccttgccctctctttaaaggaaaacagtcgtctggaaaatgagcttctagaaaatgcagagaatgttggcagaatatgagaatctgacaaacaaacttcagagaaatttggaaaatgtgttagcagaaaagtttggtgacctcgatcctagcagtgctgagttcttcctgcaagaagagagactgacacagatgagaaatgaatatgagcggcagtgcagggtactacaagaccaagtagatgaactccagtctgagctggaagaatatcgtgcacaaggcagagtgctcaggcttccgttgaagaactcaccgtcagaagaagttgaggctaacagcggtggcattgagcccgaacacgggctcggttctgaagaatgcaatccattgaatatgagcattgaggcagagctggtcattgaacagatgaaagaacaacatcacagggacatatgttgcctcagactggagctcgaagataaagtgcgccattatgaaaagcagctggacgaaaccgtggtcagctgcaagaaggcacaggagaacatgaagcaaaggcatgagaacgaaacgcacaccttagaaaaacaaataagtgaccttaaaaatgaaattgctgaacttcaggggcaagcagcagtgctcaaggaggcacatcatgaggccacttgcaggcatgaggaggagaaaaaacaactgcaagtgaagcttgaggaggaaaagactcacctgcaggagaagctgaggctgcaacatgagatggagctcaaggctagactgacacaggctcaagcaagctttgagcgggagagggaaggccttcagagtagcgcctggacagaagagaaggtgagaggcttgactcaggaactagagcagtttcaccaggagcagctgacaagcctggtggagaaacacactcttgagaaagaggagttaagaaaagagctcttggaaaagcaccaaagggagcttcaggagggaagatatgaatctgaaaagcttcaacaggaaaattctattttgagaaatgaaattactactttaaatgaagaagatagcatttctaacctgaaattagggacattaaatggatctcaggaagaaatgtggcaaaaaacggaaactgtaaaacaagaaaatgctgcagttcagaagatggttgaaaatttaaagaaacagatttcagaattaaaaatcaaaaaccaacaattggatttggaaaatacagaacttagccaaaagaactctcaaaaccaggaaaaactgcaagaacttaatcaacgtctaacagaaatgctatgccagaaggaaaaagagccaggaaacagtgcattggaggaacgggaacaagagaagtttaatctgaaagaagaactggaacgttgtaaagtgcagtcctccactttagtgtcttctctggaggcggagctctctgaagttaaaatacagacccatattgtgcaacaggaaaaccaccttctcaaagatgaactggagaaaatgaaacagctgcacagatgtcccgatctctctgacttccagcaaaaaatctctagtgttctaagctacaacgaaaaactgctgaaagaaaaggaagctctgagtgaggaattaaatagctgtgtcgataagttggcaaaatcaagtcttttagagcatagaattgcgacgatgaagcaggaacagaaatcctgggaacatcagagtgcgagcttaaagtcacagctggtggcttctcaggaaaaggttcagaatttagaagacaccgtgcagaatgtaaacctgcaaatgtcccggatgaaatctgacctacgagtgactcagcaggaaaaggaggctttaaaacaagaagtgatgtctttacataagcaacttcagaatgctggtggcaagagctgggccccagagatagctactcatccatcagggctccataaccagcagaaaaggctgtcctgggacaagttggatcatctgatgaatgaggaacagcagctgctttggcaagagaatgagaggctccagaccatggtacagaacaccaaagccgaactcacgcactcccgggagaaggtccgtcaattggaatccaatcttcttcccaagcaccaaaaacatctaaacccatcaggtaccatgaatcccacagagcaagaaaaattgagcttaaagagagagtgtgatcagtttcagaaagaacaatctcctgctaacaggaaggtcagtcagatgaattcccttgaacaagaattagaaacaattcatttggaaaatgaaggcctgaaaaagaaacaagtaaaactggatgagcagctcatggagatgcagcacctgaggtccactgcgacgcctagcccgtcccctcatgcttgggatttgcagctgctccagcagcaagcctgtccgatggtgcccagggagcagtttctgcagcttcaacgccagctgctgcaggcagaaaggataaaccagcacctgcaggaggaacttgaaaacaggacctccgaaaccaacacaccacagggaaaccaggaacaactggtaactgtcatggaggaacgaatgatagaagttgaacagaaactgaaactagtgaaaaggcttcttcaagagaaagtgaatcagctcaaagaacaactctgcaagaacactaaggcagacgcaatggtgaaggacttgtatgttgaaaatgcccagttgttgaaagctctggaagtgactgaacagcgacagaaaacagcagagaagaaaaattacctcctggaggagaagattgccagcctcagtaatatagttaggaatctgacaccagcgccattgacttctacacctcctttgaggtcatagccaaaccaaagggtacactcatatttgtgcactttactgaaatagatgaacatttcagtaggttctcaacttaaaattaagcctaacctaaaactgccagcaacacaactggagtttccatttatcataattagtttttctaaatagacccttatgggagtttgaaaataaatactcacatatttcactacttaaattattcccaagatttgaatttattttaaaattttaatagccaccaagaatgtggacatatgaaaattcaagaacctaaaaaataccagttttgaatgagtttttgtggttttggttttttaattattacaaatctatgtgtaaaatctagatatttgaagtttgagatctgatgagaatggttgttataaactttattttaaaaccaaatttaggtgttcttacatatttaaatactggaaagtcattataatagttttggttctttgaattggtagacaattagtagagtataattggttaggaggcagggcttattaagtggttattaaccgctgacatcagacaaacccaaatctgtagaattctaaccttctaacacctgtgacagtattaccactcttcttgtattatagatttagaactgatttactcaattgcactcttaactaatgttaaaagcttacttgctttaaacagccttttcttctttctcttaaaagtttcatttggggagctggtcttctaagaaacggataaagccacataattaaagcagttgaactatagggaaagcactgaacaaaccactttggagtaaatagctactcttagaaaagagggataagcagaccatgtaggttttctgtctctcaaatcttagagttcataaatttacttgaggttgcctcaagaactcagggaacaatactgtaaactgtcttcctgaactactgtagggcctctctaagaatttgaaatgtataaaccatgtgacctcatttatttgtcttatatatttacagccatactagaatttttatttctacgtttttagtaaatttaatattctgggggaaaaaaggccttgattttagggttaaaaacctgacttatagaagagtttatttaatataggtcaaaattttctgtgtttcttattccttctatacctcaaatctgattctaagaatttcttactgtgataatcattggcatgccacctgaggtcaaggagtgccaaataggactttccactcatgctcaagatcaaaactttatagaacagtcaacattttagattcggtaaccttttttttcttccaattataatctctgcttctagccacttccgccagcagttggtggaagacttactaggtgcagggcactttccaagttcatcacaacaacctgcttgttttcatgagacaataatccgaaaagttcgctttgatatattcctggagggccaagcccatctatttacaaaaggtgaacagcaaaatcaagcactgctttatgggcaggaacacaagagaaagcaaactgcccaagaagtcatcatgtcagaaactcaatctcaacaaaataatttccatcagggaacttcagggtttcttgggggcttatgagtctcaccggtcaacccaggaggcctcactacaagagccttgacaaggcactgttttttgtgggactgggagttcacactgatgaagcaaacctttgaatttttgcacagctcttgtcagaaagccctgagttccccctggataaagagttaattttaatccttccctataattatacttcaaaatatttgacatctgctattatgccttctttagatctttcttctgtggtgcagacatttctagtaagtgtttgactacttgtatggcattagctttcacagaaaattgtttcacttaaaactgtggattggcctaggctaaggacaaaaataaactaagtacctgtagtgtatttatgtgatatgtgtcaagttactcaaagttattgctgttggaactgaacaataatatttcccagatagctggccttagcatgtgatcacggttgttgtatttttaatttttgtcttttacagtatgagaggtgtaggttaatttgtttatttcctataaatttgtatttatgtgtatataaaatgtacaatgaatgtaaatatgactttctggaaagtttagactacatttagaatctctattcaaaatcaaaatgctgctcaaatgaatttaaccaacatctaggtgcttaatttctcattttatcccacttatgagattgggaaaaagatcaatatgagaaataccatacagataccttaaatgtatgcatttgtgcaacaatttttgagaaggtgagtggcaatttataatttagttggcaatttataatagaacttatagcttttaaaagaccttttaaagacattaaatgtaaacttaaaaatgtttagatcttgtttcaaactttacaatagcattcttcaaaatattaagttatatattttataggcatttagttgcttattaaaagcactgattttcaaactttttgatttaagaacaattatttaagatcgtctcagaagatgggatcttcgtttcaagaaaagggaatcaagtttgcctttgagataatacgttacactaagaaaaggaaaatgtggatagtaaaacccacctctctcatcctattgtactctcttctgctttttagaagcctgcacttaagcttagatttgtgaagggagagtagaaggggagaagtagaaccacagtgttttatttatttttctaaaactcttactaaatccagattttttaaactgttttaaatgtgaattcttcccagaaatttcaatgcattgcatatttagccttcggcatatttttcatgaatagatcatgaagtcataggcttccaaggcataggaagagatcttgcaggtctagtattttaataatgcactattacccagggcagatattatgagaaactgtttcttctctaagggtttatggcagactttgcttttttaacatgtgagaaatgaattttttattttgtgatttatgtgatttcttttgctgagtgaaggaaaggagaaattgttgctattgtcagcatcttaaaggtatttccagtcaaggcaaggctaagtgctttgtgatagtattaagcaagtcatgttttgaatggattacctgtagtgactcattggaatgatataattatacaagtaatgccaaaaaccaagtcaaagcctaattaaccaaagcactcatttaaaaatcatcatgtttggacctatctggacctctcagcactgtaaaatagttttggttttgtggcatatgaatagctgtttaacaaatcaaagttagctttttgcttctcagcttttttgggcaatacaagttaagttcttaatggggagacattatcatggcatgacttaagggaacattggtttgtgaaggaaaaacagattatctaaagccatctctatgtttctgttcagataaagattaatgagttctgtgtttatatcagctttgtatatttcatcttagccattctatcctagaaagattttaatgtgagcttaagatgtaaataaataattttgcaaacatgccttttgttttctatataccctgaccttttaataaagtttcagtgtatttatcattggt

SEQ ID NO: 294146 - DNA, 10943 bp, Homo sapiens
aaaactcagagtgagactaagagctaccgcaacactgaaaatcctggagcaccttggggattctcagcagatcttagttgacaattaactggtggactctaagtgaatcttgttagcgaagtgttggccttgtctaaattcttaactcctgtggctttgcataacaacttggtgtttcttttctgaggctttgatgtttatataacactctcaacttattttgaaaacatttacatagtgattagttaacccaacagaccaatcctgggaagacagccagagcctgcagcaccttagtaacagaaaaactgataattaggagaagagacctgtccaagaccaggaacctggaccaaaattgtgccatgttgctttactttaatgagtggccccagtaaaaactgagctgtatggcagagctgttcacatttatcttctgtgtccacccagttctgctgaaacccctggcaagatcgtggccctgttgtagcttgtcatgttttgaacagctgtctatggaaagaaagcaaacacaacctagagcaacattgatttgttttagaaagctcttttattttcagttctggctgtgttcaacatcttagcttacgtttttcatgttgtaatgatctgccgtacggacgatcacctctaagttagagagttctgtaatttggcttggattaaagatgcttggttagtgaaagctgctgctttttttatagtcaaaggactggttctgagagccttgttgcagatggctgaggtcaccgtcccaagggtgtatgtcgtgtttggcatccattgcatcatggcgaaggcatcttcagatgtgcaggtttcaggctttcatcggaaaatccagcacgttaaaaatgaactttgccacatgttgagcttggaggaggtggccccagtgctgcagcagacattacttcaggacaacctcttgggcagggtacattttgaccaatttaaagaagcattaatactcatcttgtccagaactctgtcaaatgaagaacactttcaagaaccagactgctcactagaagctcagcccaaatatgttagaggtgggaagcgttacggacgaaggtccttgcccgagttccaagagtccgtggaggagtttcctgaagtgacggtgattgagccactggatgaagaagcgcggccttcacacatcccagccggtgactgcagtgagcactggaagacgcaacgcagtgaggagtatgaagcggaaggccagttaaggttttggaacccagatgacttgaatgcttcacagagtggatcttcccctccccaagactggatagaagagaaactgcaagaagtttgtgaagatttggggatcacccgtgatggtcacctgaaccggaagaagctggtctccatctgtgagcagtatggtttacagaatgtggatggagagatgctcgaggaagtattccataatcttgatcctgacggtacaatgagtgtagaagattttttctatggtttgtttaaaaatggaaaatctcttacaccatcagcatctactccatatagacaactaaaaaggcacctttccatgcagtctttcgatgagagtggacgacgtaccacaacctcatcagcaatgacaagtaccattggctttcgggtcttctcctgcctggatgatgggatgggccatgcatctgtggagagaatactcgacacctggcaggaagagggcattgagaacagccaggagatcctgaaggccttggatttcagcctcgatggaaacatcaatttgacagaattaacactggcccttgaaaatgaacttttggttaccaagaacagcattcaccaggcggctctggccagctttaaggctgaaatccggcatttgttggaacgagttgatcaggtggtcagagaaaaagagaagctacggtcagatctggacaaggccgagaagctcaagtctttaatggcctcggaggtggatgatcaccatgcggccatagagcggcggaatgagtacaacctcaggaaactggatgaagagtacaaggagcgaatagcagccttaaaaaatgaactccgaaaagagagagagcagatcctgcagcaggcaggcaagcagcgtttagaacttgaacaggaaattgaaaaggcaaaaacagaagagaactatatccgggaccgccttgccctctctttaaaggaaaacagtcgtctggaaaatgagcttctagaaaatgcagagaatgttggcagaatatgagaatctgacaaacaaacttcagagaaatttggaaaatgtgttagcagaaaagtttggtgacctcgatcctagcagtgctgagttcttcctgcaagaagagagactgacacagatgagaaatgaatatgagcggcagtgcagggtactacaagaccaagtagatgaactccagtctgagctggaagaatatcgtgcacaaggcagagtgctcaggcttccgttgaagaactcaccgtcagaagaagttgaggctaacagcggtggcattgagcccgaacacgggctcggttctgaagaatgcaatccattgaatatgagcattgaggcagagctggtcattgaacagatgaaagaacaacatcacagggacatatgttgcctcagactggagctcgaagataaagtgcgccattatgaaaagcagctggacgaaaccgtggtcagctgcaagaaggcacaggagaacatgaagcaaaggcatgagaacgaaacgcacaccttagaaaaacaaataagtgaccttaaaaatgaaattgctgaacttcaggggcaagcagcagtgctcaaggaggcacatcatgaggccacttgcaggcatgaggaggagaaaaaacaactgcaagtgaagcttgaggaggaaaagactcacctgcaggagaagctgaggctgcaacatgagatggagctcaaggctagactgacacaggctcaagcaagctttgagcgggagagggaaggccttcagagtagcgcctggacagaagagaaggtgagaggcttgactcaggaactagagcagtttcaccaggagcagctgacaagcctggtggagaaacacactcttgagaaagaggagttaagaaaagagctcttggaaaagcaccaaagggagcttcaggagggaagggaaaaaatggaaacagagtgtaatagaagaacctctcaaatagaagcccagtttcagtctgattgtcagaaagtcactgagaggtgtgaaagcgctctgcaaagcctggaggggcgctaccgccaagagctgaaggacctccaggaacagcagcgtgaggagaaatcccagtgggaatttgagaaggacgagctcacccaggagtgtgcggaagcccaggagctgctgaaagagactcttaagagagagaaaacaacttctctggtcctgacccaggagagagagatgctggagaaaacatacaaagaacatttgaacagcatggtcgtcgagagacagcagctactccaagacctggaagacctaagaaatgtatctgaaacccagcaaagcctgctgtctgaccagatacttgagctgaagagcagtcacaaaagggaactgagggagcgtgaggaggtcctgtgccaggcaggggcttcggagcagctggccagccagcggctggaaagactagaaatggaacatgaccaggaaaggcaggaaatgatgtccaagcttctagccatggagaacattcacaaagcgacctgtgagacagcagatcgagaaagagccgagatgagcacagaaatctccagacttcagagtaaaataaaggaaatgcagcaggcaacatctcctctctctatgcttcagagtggttgccaggtgataggagaggaggaggtggaaggagatggagccctgtccctgcttcagcaaggggagcagctgttggaagaaaatggggacgtcctcttaagcctgcagagagctcatgaacaggcagtgaaggaaaatgtgaaaatggctactgaaatttctagattgcaacagaggctacaaaagttagagccagggttagtaatgtcttcttgtttggatgagccagctactgagttttttggaaatactgcggaacaaacagagccgtttttacagcaaaaccgaacgaagcaagtagaaggtgtgaccaggcggcatgtcctaagtgacctggaagatgatgaggtccgggacctgggaagtacagggacgagctctgttcagagacaggaagtcaaaatagaggagtctgaagcttcagtagagggtttttctgagcttgaaaacagtgaagagaccaggactgaatcctgggagctgaagaatcagattagtcagcttcaggaacagctaatgatgttatgtgcggactgtgatcgagcttctgaaaagaaacaggacctactttttgatgtttctgtgctaaaaaagaaactgaagatgcttgagagaatccctgaggcttctcccaaatataagctgttgtatgaagatgtgagccgagaaaatgactgccttcaggaagagctgagaatgatggagacacgctacgatgaggcactagaaaataacaaagaactcactgcagaggttttcaggttgcaggatgagctgaagaaaatggaggaagtcactgaaacattcctcagcctggaaaagagttacgatgaggtcaaaatagaaaatgaggagctgaatgttctggttttgagacttcaaggcaagattgagaagcttcaggaaagcgtggtccagcggtgtgactgctgcttatgggaagccagtttagagaacctggaaatcgaacctgatggaaatatactccagctcaatcagacactggaagagtgtgtgcccagggttaggagtgtacatcatgtcatagaggaatgtaagcaagaaaaccagtaccttgaggggaacacacagctcttggaaaaagtaaaagcacatgaaattgcctggttacatggaacaattcagacacatcaagaaaggccaagagtacagaatcaagttatactggaggaaaacactactctcctaggctttcaagacaaacattttcagcatcaggccaccatagcagagttagaactggagaaaacaaagttacaggagctgactaggaagttgaaggagagagtcactattttagttaagcaaaaagatgtactttctcacggagaaaaggaggaagagctgaaggcaatgatgcatgacttgcagatcacgtgcagtgagatgcagcaaaaagttgaacttctgagatatgaatctgaaaagcttcaacaggaaaattctattttgagaaatgaaattactactttaaatgaagaagatagcatttctaacctgaaattagggacattaaatggatctcaggaagaaatgtggcaaaaaacggaaactgtaaaacaagaaaatgctgcagttcagaagatggttgaaaatttaaagaaacagatttcagaattaaaaatcaaaaaccaacaattggatttggaaaatacagaacttagccaaaagaactctcaaaaccaggaaaaactgcaagaacttaatcaacgtctaacagaaatgctatgccagaaggaaaaagagccaggaaacagtgcattggaggaacgggaacaagagaagtttaatctgaaagaagaactggaacgttgtaaagtgcagtcctccactttagtgtcttctctggaggcggagctctctgaagttaaaatacagacccatattgtgcaacaggaaaaccaccttctcaaagatgaactggagaaaatgaaacagctgcacagatgtcccgatctctctgacttccagcaaaaaatctctagtgttctaagctacaacgaaaaactgctgaaagaaaaggaagctctgagtgaggaattaaatagctgtgtcgataagttggcaaaatcaagtcttttagagcatagaattgcgacgatgaagcaggaacagaaatcctgggaacatcagagtgcgagcttaaagtcacagctggtggcttctcaggaaaaggttcagaatttagaagacaccgtgcagaatgtaaacctgcaaatgtcccggatgaaatctgacctacgagtgactcagcaggaaaaggaggctttaaaacaagaagtgatgtctttacataagcaacttcagaatgctggtggcaagagctgggccccagagatagctactcatccatcagggctccataaccagcagaaaaggctgtcctgggacaagttggatcatctgatgaatgaggaacagcagctgctttggcaagagaatgagaggctccagaccatggtacagaacaccaaagccgaactcacgcactcccgggagaaggtccgtcaattggaatccaatcttcttcccaagcaccaaaaacatctaaacccatcaggtaccatgaatcccacagagcaagaaaaattgagcttaaagagagagtgtgatcagtttcagaaagaacaatctcctgctaacaggaaggtcagtcagatgaattcccttgaacaagaattagaaacaattcatttggaaaatgaaggcctgaaaaagaaacaagtaaaactggatgagcagctcatggagaactcagtggttggaagtagcagagaagggtgcagttctctgcctgagatagtgtgtgaagatgcagcacctgaggtccactgcgacgcctagcccgtcccctcatgcttgggatttgcagctgctccagcagcaagcctgtccgatggtgcccagggagcagtttctgcagcttcaacgccagctgctgcaggcagaaaggataaaccagcacctgcaggaggaacttgaaaacaggacctccgaaaccaacacaccacagggaaaccaggaacaactggtaactgtcatggaggaacgaatgatagaagttgaacagaaactgaaactagtgaaaaggcttcttcaagagaaagtgaatcagctcaaagaacaactctgcaagaacactaaggcagacgcaatggtgaaggacttgtatgttgaaaatgcccagttgttgaaagctctggaagtgactgaacagcgacagaaaacagcagagaagaaaaattacctcctggaggagaagattgccagcctcagtaatatagttaggaatctgacaccagcgccattgacttctacacctcctttgaggtcatagccaaaccaaagggtacactcatatttgtgcactttactgaaatagatgaacatttcagtaggttctcaacttaaaattaagcctaacctaaaactgccagcaacacaactggagtttccatttatcataattagtttttctaaatagacccttatgggagtttgaaaataaatactcacatatttcactacttaaattattcccaagatttgaatttattttaaaattttaatagccaccaagaatgtggacatatgaaaattcaagaacctaaaaaataccagttttgaatgagtttttgtggttttggttttttaattattacaaatctatgtgtaaaatctagatatttgaagtttgagatctgatgagaatggttgttataaactttattttaaaaccaaatttaggtgttcttacatatttaaatactggaaagtcattataatagttttggttctttgaattggtagacaattagtagagtataattggttaggaggcagggcttattaagtggttattaaccgctgacatcagacaaacccaaatctgtagaattctaaccttctaacacctgtgacagtattaccactcttcttgtattatagatttagaactgatttactcaattgcactcttaactaatgttaaaagcttacttgctttaaacagccttttcttctttctcttaaaagtttcatttggggagctggtcttctaagaaacggataaagccacataattaaagcagttgaactatagggaaagcactgaacaaaccactttggagtaaatagctactcttagaaaagagggataagcagaccatgtaggttttctgtctctcaaatcttagagttcataaatttacttgaggttgcctcaagaactcagggaacaatactgtaaactgtcttcctgaactactgtagggcctctctaagaatttgaaatgtataaaccatgtgacctcatttatttgtcttatatatttacagccatactagaatttttatttctacgtttttagtaaatttaatattctgggggaaaaaaggccttgattttagggttaaaaacctgacttatagaagagtttatttaatataggtcaaaattttctgtgtttcttattccttctatacctcaaatctgattctaagaatttcttactgtgataatcattggcatgccacctgaggtcaaggagtgccaaataggactttccactcatgctcaagatcaaaactttatagaacagtcaacattttagattcggtaaccttttttttcttccaattataatctctgcttctagccacttccgccagcagttggtggaagacttactaggtgcagggcactttccaagttcatcacaacaacctgcttgttttcatgagacaataatccgaaaagttcgctttgatatattcctggagggccaagcccatctatttacaaaaggtgaacagcaaaatcaagcactgctttatgggcaggaacacaagagaaagcaaactgcccaagaagtcatcatgtcagaaactcaatctcaacaaaataatttccatcagggaacttcagggtttcttgggggcttatgagtctcaccggtcaacccaggaggcctcactacaagagccttgacaaggcactgttttttgtgggactgggagttcacactgatgaagcaaacctttgaatttttgcacagctcttgtcagaaagccctgagttccccctggataaagagttaattttaatccttccctataattatacttcaaaatatttgacatctgctattatgccttctttagatctttcttctgtggtgcagacatttctagtaagtgtttgactacttgtatggcattagctttcacagaaaattgtttcacttaaaactgtggattggcctaggctaaggacaaaaataaactaagtacctgtagtgtatttatgtgatatgtgtcaagttactcaaagttattgctgttggaactgaacaataatatttcccagatagctggccttagcatgtgatcacggttgttgtatttttaatttttgtcttttacagtatgagaggtgtaggttaatttgtttatttcctataaatttgtatttatgtgtatataaaatgtacaatgaatgtaaatatgactttctggaaagtttagactacatttagaatctctattcaaaatcaaaatgctgctcaaatgaatttaaccaacatctaggtgcttaatttctcattttatcccacttatgagattgggaaaaagatcaatatgagaaataccatacagataccttaaatgtatgcatttgtgcaacaatttttgagaaggtgagtggcaatttataatttagttggcaatttataatagaacttatagcttttaaaagaccttttaaagacattaaatgtaaacttaaaaatgtttagatcttgtttcaaactttacaatagcattcttcaaaatattaagttatatattttataggcatttagttgcttattaaaagcactgattttcaaactttttgatttaagaacaattatttaagatcgtctcagaagatgggatcttcgtttcaagaaaagggaatcaagtttgcctttgagataatacgttacactaagaaaaggaaaatgtggatagtaaaacccacctctctcatcctattgtactctcttctgctttttagaagcctgcacttaagcttagatttgtgaagggagagtagaaggggagaagtagaaccacagtgttttatttatttttctaaaactcttactaaatccagattttttaaactgttttaaatgtgaattcttcccagaaatttcaatgcattgcatatttagccttcggcatatttttcatgaatagatcatgaagtcataggcttccaaggcataggaagagatcttgcaggtctagtattttaataatgcactattacccagggcagatattatgagaaactgtttcttctctaagggtttatggcagactttgcttttttaacatgtgagaaatgaattttttattttgtgatttatgtgatttcttttgctgagtgaaggaaaggagaaattgttgctattgtcagcatcttaaaggtatttccagtcaaggcaaggctaagtgctttgtgatagtattaagcaagtcatgttttgaatggattacctgtagtgactcattggaatgatataattatacaagtaatgccaaaaaccaagtcaaagcctaattaaccaaagcactcatttaaaaatcatcatgtttggacctatctggacctctcagcactgtaaaatagttttggttttgtggcatatgaatagctgtttaacaaatcaaagttagctttttgcttctcagcttttttgggcaatacaagttaagttcttaatggggagacattatcatggcatgacttaagggaacattggtttgtgaaggaaaaacagattatctaaagccatctctatgtttctgttcagataaagattaatgagttctgtgtttatatcagctttgtatatttcatcttagccattctatcctagaaagattttaatgtgagcttaagatgtaaataaataattttgcaaacatgccttttgttttctatataccctgaccttttaataaagtttcagtgtatttatcattggt

SEQ ID NO: 294147 - DNA, 6517 bp, Homo sapiens
tcgcggccgcccgagccgggagccgagcgcgctgggcgcggccgtcccgctgccgccgccaagcccggagtgcgccagcggccatggttcccgcggcggcgccgggcgcctgagccccgggacgcaagcgctggaggcgggctgccggctgtgcgggcgctccggagagaccgacagaaggtgagcactgtgggctatgggatggatgagttggaccaggaccagcatggccgactcaaggacctgtttgacagttttgacacgacgggcacagggtccctggggcaggaggaactcaccgacctttgccacatgttgagcttggaggaggtggccccagtgctgcagcagacattacttcaggacaacctcttgggcagggtacattttgaccaatttaaagaagcattaatactcatcttgtccagaactctgtcaaatgaagaacactttcaagaaccagactgctcactagaagctcagcccaaatatgttagaggtgggaagcgttacggacgaaggtccttgcccgagttccaagagtccgtggaggagtttcctgaagtgacggtgattgagccactggatgaagaagcgcggccttcacacatcccagccggtgactgcagtgagcactggaagacgcaacgcagtgaggagtatgaagcggaaggccagttaaggttttggaacccagatgacttgaatgcttcacagagtggatcttcccctccccaagactggatagaagagaaactgcaagaagtttgtgaagatttggggatcacccgtgatggtcacctgaaccggaagaagctggtctccatctgtgagcagtatggtttacagaatgtggatggagagatgctcgaggaagtattccataatcttgatcctgacggtacaatgagtgtagaagattttttctatggtttgtttaaaaatggaaaatctcttacaccatcagcatctactccatatagacaactaaaaaggcacctttccatgcagtctttcgatgagagtggacgacgtaccacaacctcatcagcaatgacaagtaccattggctttcgggtcttctcctgcctggatgatgggatgggccatgcatctgtggagagaatactcgacacctggcaggaagagggcattgagaacagccaggagatcctgaaggccttggatttcagcctcgatggaaacatcaatttgacagaattaacactggcccttgaaaatgaacttttggttaccaagaacagcattcaccaggcggctctggccagctttaaggctgaaatccggcatttgttggaacgagttgatcaggtggtcagagaaaaagagaagctacggtcagatctggacaaggccgagaagctcaagtctttaatggcctcggaggtggatgatcaccatgcggccatagagcggcggaatgagtacaacctcaggaaactggatgaagagtacaaggagcgaatagcagccttaaaaaatgaactccgaaaagagagagagcagatcctgcagcaggcaggcaagcagcgtttagaacttgaacaggaaattgaaaaggcaaaaacagaagagaactatatccgggaccgccttgccctctctttaaaggaaaacagtcgtctggaaaatgagcttctagaaaatgcagagaatgttggcagaatatgagaatctgacaaacaaacttcagagaaatttggaaaatgtgttagcagaaaagtttggtgacctcgatcctagcagtgctgagttcttcctgcaagaagagagactgacacagatgagaaatgaatatgagcggcagtgcagggtactacaagaccaagtagatgaactccagtctgagctggaagaatatcgtgcacaaggcagagtgctcaggcttccgttgaagaactcaccgtcagaagaagttgaggctaacagcggtggcattgagcccgaacacgggctcggttctgaagaatgcaatccattgaatatgagcattgaggcagagctggtcattgaacagatgaaagaacaacatcacagggacatatgttgcctcagactggagctcgaagataaagtgcgccattatgaaaagcagctggacgaaaccgtggtcagctgcaagaaggcacaggagaacatgaagcaaaggcatgagaacgaaacgcacaccttagaaaaacaaataagtgaccttaaaaatgaaattgctgaacttcaggggcaagcagcagtgctcaaggaggcacatcatgaggccacttgcaggcatgaggaggagaaaaaacaactgcaagtgaagcttgaggaggaaaagactcacctgcaggagaagctgaggctgcaacatgagatggagctcaaggctagactgacacaggctcaagcaagctttgagcgggagagggaaggccttcagagtagcgcctggacagaagagaaggtgagaggcttgactcaggaactagagcagtttcaccaggagcagctgacaagcctggtggagaaacacactcttgagaaagaggagttaagaaaagagctcttggaaaagcaccaaagggagcttcaggagggaagggaaaaaatggaaacagagtgtaatagaagaacctctcaaatagaagcccagtttcagtctgattgtcagaaagtcactgagaggtgtgaaagcgctctgcaaagcctggaggggcgctaccgccaagagctgaaggacctccaggaacagcagcgtgaggagaaatcccagtgggaatttgagaaggacgagctcacccaggagtgtgcggaagcccaggagctgctgaaagagactcttaagagagagaaaacaacttctctggtcctgacccaggagagagagatgctggagaaaacatacaaagaacatttgaacagcatggtcgtcgagagacagcagctactccaagacctggaagacctaagaaatgtatctgaaacccagcaaagcctgctgtctgaccagatacttgagctgaagagcagtcacaaaagggaactgagggagcgtgaggaggtcctgtgccaggcaggggcttcggagcagctggccagccagcggctggaaagactagaaatggaacatgaccaggaaaggcaggaaatgatgtccaagcttctagccatggagaacattcacaaagcgacctgtgagacagcagatcgagaaagagccgagatgagcacagaaatctccagacttcagagtaaaataaaggaaatgcagcaggcaacatctcctctctctatgcttcagagtggttgccaggtgataggagaggaggaggtggaaggagatggagccctgtccctgcttcagcaaggggagcagctgttggaagaaaatggggacgtcctcttaagcctgcagagagctcatgaacaggcagtgaaggaaaatgtgaaaatggctactgaaatttctagattgcaacagaggctacaaaagttagagccagggttagtaatgtcttcttgtttggatgagccagctactgagttttttggaaatactgcggaacaaacagagccgtttttacagcaaaaccgaacgaagcaagtagaaggtgtgaccaggcggcatgtcctaagtgacctggaagatgatgaggtccgggacctgggaagtacagggacgagctctgttcagagacaggaagtcaaaatagaggagtctgaagcttcagtagagggtttttctgagcttgaaaacagtgaagagaccaggactgaatcctgggagctgaagaatcagattagtcagcttcaggaacagctaatgatgttatgtgcggactgtgatcgagcttctgaaaagaaacaggacctactttttgatgtttctgtgctaaaaaagaaactgaagatgcttgagagaatccctgaggcttctcccaaatataagctgttgtatgaagatgtgagccgagaaaatgactgccttcaggaagagctgagaatgatggagacacgctacgatgaggcactagaaaataacaaagaactcactgcagaggttttcaggttgcaggatgagctgaagaaaatggaggaagtcactgaaacattcctcagcctggaaaagagttacgatgaggtcaaaatagaaaatgaggagctgaatgttctggttttgagacttcaaggcaagattgagaagcttcaggaaagcgtggtccagcggtgtgactgctgcttatgggaagccagtttagagaacctggaaatcgaacctgatggaaatatactccagctcaatcagacactggaagagtgtgtgcccagggttaggagtgtacatcatgtcatagaggaatgtaagcaagaaaaccagtaccttgaggggaacacacagctcttggaaaaagtaaaagcacatgaaattgcctggttacatggaacaattcagacacatcaagaaaggccaagagtacagaatcaagttatactggaggaaaacactactctcctaggctttcaagacaaacattttcagcatcaggccaccatagcagagttagaactggagaaaacaaagttacaggagctgactaggaagttgaaggagagagtcactattttagttaagcaaaaagatgtactttctcacggagaaaaggaggaagagctgaaggcaatgatgcatgacttgcagatcacgtgcagtgagatgcagcaaaaagttgaacttctgagatatgaatctgaaaagcttcaacaggaaaattctattttgagaaatgaaattactactttaaatgaagaagatagcatttctaacctgaaattagggacattaaatggatctcaggaagaaatgtggcaaaaaacggaaactgtaaaacaagaaaatgctgcagttcagaagatggttgaaaatttaaagaaacagatttcagaattaaaaatcaaaaaccaacaattggatttggaaaatacagaacttagccaaaagaactctcaaaaccaggaaaaactgcaagaacttaatcaacgtctaacagaaatgctatgccagaaggaaaaagagccaggaaacagtgcattggaggaacgggaacaagagaagtttaatctgaaagaagaactggaacgttgtaaagtgcagtcctccactttagtgtcttctctggaggcggagctctctgaagttaaaatacagacccatattgtgcaacaggaaaaccaccttctcaaagatgaactggagaaaatgaaacagctgcacagatgtcccgatctctctgacttccagcaaaaaatctctagtgttctaagctacaacgaaaaactgctgaaagaaaaggaagctctgagtgaggaattaaatagctgtgtcgataagttggcaaaatcaagtcttttagagcatagaattgcgacgatgaagcaggaacagaaatcctgggaacatcagagtgcgagcttaaagtcacagctggtggcttctcaggaaaaggttcagaatttagaagacaccgtgcagaatgtaaacctgcaaatgtcccggatgaaatctgacctacgagtgactcagcaggaaaaggaggctttaaaacaagaagtgatgtctttacataagcaacttcagaatgctggtggcaagagctgggccccagagatagctactcatccatcagggctccataaccagcagaaaaggctgtcctgggacaagttggatcatctgatgaatgaggaacagcagctgctttggcaagagaatgagaggctccagaccatggtacagaacaccaaagccgaactcacgcactcccgggagaaggtccgtcaattggaatccaatcttcttcccaagcaccaaaaacatctaaacccatcaggtaccatgaatcccacagagcaagaaaaattgagcttaaagagagagtgtgatcagtttcagaaagaacaatctcctgctaacaggaaggtcagtcagatgaattcccttgaacaagaattagaaacaattcatttggaaaatgaaggcctgaaaaagaaacaagtaaaactggatgagcagctcatggagatgcagcacctgaggtccactgcgacgcctagcccgtcccctcatgcttgggatttgcagctgctccagcagcaagcctgtccgatggtgcccagggagcagtttctgcagcttcaacgccagctgctgcaggcagaaaggataaaccagcacctgcaggaggaacttgaaaacaggacctccgaaaccaacacaccacagggaaaccaggaacaactggtaactgtcatggaggaacgaatgatagaagttgaacagaaactgaaactagtgaaaaggcttcttcaagagaaagtgaatcagctcaaagaacaagtgagcctacccggtcatctctgttcacccacctcacattccagctttaactccagttttacatccctttattgccattaactcgttaacttatgttgtctaataaaggcaaattctattataaaa

SEQ ID NO: 294148 - DNA, 5270 bp, Homo sapiens
ctgaagggcagtgatcgtattgggtcatagcagttcctagagtgacactgcatatcggaacgggaacaagagaagtttaatctgaaagaagaactggaacgttgtaaagtgcagtcctccactttagtgtcttctctggaggcggagctctctgaagttaaaatacagacccatattgtgcaacaggaaaaccaccttctcaaagatgaactggagaaaatgaaacagctgcacagatgtcccgatctctctgacttccagcaaaaaatctctagtgttctaagctacaacgaaaaactgctgaaagaaaaggaagctctgagtgaggaattaaatagctgtgtcgataagttggcaaaatcaagtcttttagagcatagaattgcgacgatgaagcaggaacagaaatcctgggaacatcagagtgcgagcttaaagtcacagctggtggcttctcaggaaaaggttcagaatttagaagacaccgtgcagaatgtaaacctgcaaatgtcccggatgaaatctgacctacgagtgactcagcaggaaaaggaggctttaaaacaagaagtgatgtctttacataagcaacttcagaatgctggtggcaagagctgggccccagagatagctactcatccatcagggctccataaccagcagaaaaggctgtcctgggacaagttggatcatctgatgaatgaggaacagcagctgctttggcaagagaatgagaggctccagaccatggtacagaacaccaaagccgaactcacgcactcccgggagaaggtccgtcaattggaatccaatcttcttcccaagcaccaaaaacatctaaacccatcaggtaccatgaatcccacagagcaagaaaaattgagcttaaagagagagtgtgatcagtttcagaaagaacaatctcctgctaacaggaaggtcagtcagatgaattcccttgaacaagaattagaaacaattcatttggaaaatgaaggcctgaaaaagaaacaagtaaaactggatgagcagctcatggagatgcagcacctgaggtccactgcgacgcctagcccgtcccctcatgcttgggatttgcagctgctccagcagcaagcctgtccgatggtgcccagggagcagtttctgcagcttcaacgccagctgctgcaggcagaaaggataaaccagcacctgcaggaggaacttgaaaacaggacctccgaaaccaacacaccacagggaaaccaggaacaactggtaactgtcatggaggaacgaatgatagaagttgaacagaaactgaaactagtgaaaaggcttcttcaagagaaagtgaatcagctcaaagaacaactctgcaagaacactaaggcagacgcaatggtgaaggacttgtatgttgaaaatgcccagttgttgaaagctctggaagtgactgaacagcgacagaaaacagcagagaagaaaaattacctcctggaggagaagattgccagcctcagtaatatagttaggaatctgacaccagcgccattgacttctacacctcctttgaggtcatagccaaaccaaagggtacactcatatttgtgcactttactgaaatagatgaacatttcagtaggttctcaacttaaaattaagcctaacctaaaactgccagcaacacaactggagtttccatttatcataattagtttttctaaatagacccttatgggagtttgaaaataaatactcacatatttcactacttaaattattcccaagatttgaatttattttaaaattttaatagccaccaagaatgtggacatatgaaaattcaagaacctaaaaaataccagttttgaatgagtttttgtggttttggttttttaattattacaaatctatgtgtaaaatctagatatttgaagtttgagatctgatgagaatggttgttataaactttattttaaaaccaaatttaggtgttcttacatatttaaatactggaaagtcattataatagttttggttctttgaattggtagacaattagtagagtataattggttaggaggcagggcttattaagtggttattaaccgctgacatcagacaaacccaaatctgtagaattctaaccttctaacacctgtgacagtattaccactcttcttgtattatagatttagaactgatttactcaattgcactcttaactaatgttaaaagcttacttgctttaaacagccttttcttctttctcttaaaagtttcatttggggagctggtcttctaagaaacggataaagccacataattaaagcagttgaactatagggaaagcactgaacaaaccactttggagtaaatagctactcttagaaaagagggataagcagaccatgtaggttttctgtctctcaaatcttagagttcataaatttacttgaggttgcctcaagaactcagggaacaatactgtaaactgtcttcctgaactactgtagggcctctctaagaatttgaaatgtataaaccatgtgacctcatttatttgtcttatatatttacagccatactagaatttttatttctacgtttttagtaaatttaatattctgggggaaaaaaggccttgattttagggttaaaaacctgacttatagaagagtttatttaatataggtcaaaattttctgtgtttcttattccttctatacctcaaatctgattctaagaatttcttactgtgataatcattggcatgccacctgaggtcaaggagtgccaaataggactttccactcatgctcaagatcaaaactttatagaacagtcaacattttagattcggtaaccttttttttcttccaattataatctctgcttctagccacttccgccagcagttggtggaagacttactaggtgcagggcactttccaagttcatcacaacaacctgcttgttttcatgagacaataatccgaaaagttcgctttgatatattcctggagggccaagcccatctatttacaaaaggtgaacagcaaaatcaagcactgctttatgggcaggaacacaagagaaagcaaactgcccaagaagtcatcatgtcagaaactcaatctcaacaaaataatttccatcagggaacttcagggtttcttgggggcttatgagtctcaccggtcaacccaggaggcctcactacaagagccttgacaaggcactgttttttgtgggactgggagttcacactgatgaagcaaacctttgaatttttgcacagctcttgtcagaaagccctgagttccccctggataaagagttaattttaatccttccctataattatacttcaaaatatttgacatctgctattatgccttctttagatctttcttctgtggtgcagacatttctagtaagtgtttgactacttgtatggcattagctttcacagaaaattgtttcacttaaaactgtggattggcctaggctaaggacaaaaataaactaagtacctgtagtgtatttatgtgatatgtgtcaagttactcaaagttattgctgttggaactgaacaataatatttcccagatagctggccttagcatgtgatcacggttgttgtatttttaatttttgtcttttacagtatgagaggtgtaggttaatttgtttatttcctataaatttgtatttatgtgtatataaaatgtacaatgaatgtaaatatgactttctggaaagtttagactacatttagaatctctattcaaaatcaaaatgctgctcaaatgaatttaaccaacatctaggtgcttaatttctcattttatcccacttatgagattgggaaaaagatcaatatgagaaataccatacagataccttaaatgtatgcatttgtgcaacaatttttgagaaggtgagtggcaatttataatttagttggcaatttataatagaacttatagcttttaaaagaccttttaaagacattaaatgtaaacttaaaaatgtttagatcttgtttcaaactttacaatagcattcttcaaaatattaagttatatattttataggcatttagttgcttattaaaagcactgattttcaaactttttgatttaagaacaattatttaagatcgtctcagaagatgggatcttcgtttcaagaaaagggaatcaagtttgcctttgagataatacgttacactaagaaaaggaaaatgtggatagtaaaacccacctctctcatcctattgtactctcttctgctttttagaagcctgcacttaagcttagatttgtgaagggagagtagaaggggagaagtagaaccacagtgttttatttatttttctaaaactcttactaaatccagattttttaaactgttttaaatgtgaattcttcccagaaatttcaatgcattgcatatttagccttcggcatatttttcatgaatagatcatgaagtcataggcttccaaggcataggaagagatcttgcaggtctagtattttaataatgcactattacccagggcagatattatgagaaactgtttcttctctaagggtttatggcagactttgcttttttaacatgtgagaaatgaattttttattttgtgatttatgtgatttcttttgctgagtgaaggaaaggagaaattgttgctattgtcagcatcttaaaggtatttccagtcaaggcaaggctaagtgctttgtgatagtattaagcaagtcatgttttgaatggattacctgtagtgactcattggaatgatataattatacaagtaatgccaaaaaccaagtcaaagcctaattaaccaaagcactcatttaaaaatcatcatgtttggacctatctggacctctcagcactgtaaaatagttttggttttgtggcatatgaatagctgtttaacaaatcaaagttagctttttgcttctcagcttttttgggcaatacaagttaagttcttaatggggagacattatcatggcatgacttaagggaacattggtttgtgaaggaaaaacagattatctaaagccatctctatgtttctgttcagataaagattaatgagttctgtgtttatatcagctttgtatatttcatcttagccattctatcctagaaagattttaatgtgagcttaagatgtaaataaataattttgcaaacatgccttttgttttctatataccctgaccttttaataaagtttcagtgtatttatcattggt

SEQ ID NO: 294149 - DNA, 5156 bp, Homo sapiens
gtgctttggattctaaaaaaaggatatgattgcatatgtgaaaatgaaagtagagtttagcctgtgaaagcttttgagttggcagtgcatttcagccttctcttttgtcctctgtgaatcaaatgaatatcttctgggcttaaagataacttcgtaagaatgaagcaacttttaagccaccagtctcaatgcatttgggtcctttatggaactgggccttgccctacagtcatattcattattggacatgacatggctgttttgtcaaagaccattttaaacagagactctccaaatctttttgtttaaatcaaacttcaagaatattgttttattcatatttatatgtacatacacatactttcattagaagactgaggggacaattgaaaggtacttattaggagtcgttgtcattgggtaaacatgacacctgtctcaaaccagcaattacccaatagcttgtttttaaggcttacactctgcaattctcttaagagctgggccccagagatagctactcatccatcagggctccataaccagcagaaaaggctgtcctgggacaagttggatcatctgatgaatgaggaacagcagctgctttggcaagagaatgagaggctccagaccatggtacagaacaccaaagccgaactcacgcactcccgggagaaggtccgtcaattggaatccaatcttcttcccaagcaccaaaaacatctaaacccatcaggtaccatgaatcccacagagcaagaaaaattgagcttaaagagagagtgtgatcagtttcagaaagaacaatctcctgctaacaggaaggtcagtcagatgaattcccttgaacaagaattagaaacaattcatttggaaaatgaaggcctgaaaaagaaacaagtaaaactggatgagcagctcatggagatgcagcacctgaggtccactgcgacgcctagcccgtcccctcatgcttgggatttgcagctgctccagcagcaagcctgtccgatggtgcccagggagcagtttctgcagcttcaacgccagctgctgcaggcagaaaggataaaccagcacctgcaggaggaacttgaaaacaggacctccgaaaccaacacaccacagggaaaccaggaacaactggtaactgtcatggaggaacgaatgatagaagttgaacagaaactgaaactagtgaaaaggcttcttcaagagaaagtgaatcagctcaaagaacaactctgcaagaacactaaggcagacgcaatggtgaaggacttgtatgttgaaaatgcccagttgttgaaagctctggaagtgactgaacagcgacagaaaacagcagagaagaaaaattacctcctggaggagaagattgccagcctcagtaatatagttaggaatctgacaccagcgccattgacttctacacctcctttgaggtcatagccaaaccaaagggtacactcatatttgtgcactttactgaaatagatgaacatttcagtaggttctcaacttaaaattaagcctaacctaaaactgccagcaacacaactggagtttccatttatcataattagtttttctaaatagacccttatgggagtttgaaaataaatactcacatatttcactacttaaattattcccaagatttgaatttattttaaaattttaatagccaccaagaatgtggacatatgaaaattcaagaacctaaaaaataccagttttgaatgagtttttgtggttttggttttttaattattacaaatctatgtgtaaaatctagatatttgaagtttgagatctgatgagaatggttgttataaactttattttaaaaccaaatttaggtgttcttacatatttaaatactggaaagtcattataatagttttggttctttgaattggtagacaattagtagagtataattggttaggaggcagggcttattaagtggttattaaccgctgacatcagacaaacccaaatctgtagaattctaaccttctaacacctgtgacagtattaccactcttcttgtattatagatttagaactgatttactcaattgcactcttaactaatgttaaaagcttacttgctttaaacagccttttcttctttctcttaaaagtttcatttggggagctggtcttctaagaaacggataaagccacataattaaagcagttgaactatagggaaagcactgaacaaaccactttggagtaaatagctactcttagaaaagagggataagcagaccatgtaggttttctgtctctcaaatcttagagttcataaatttacttgaggttgcctcaagaactcagggaacaatactgtaaactgtcttcctgaactactgtagggcctctctaagaatttgaaatgtataaaccatgtgacctcatttatttgtcttatatatttacagccatactagaatttttatttctacgtttttagtaaatttaatattctgggggaaaaaaggccttgattttagggttaaaaacctgacttatagaagagtttatttaatataggtcaaaattttctgtgtttcttattccttctatacctcaaatctgattctaagaatttcttactgtgataatcattggcatgccacctgaggtcaaggagtgccaaataggactttccactcatgctcaagatcaaaactttatagaacagtcaacattttagattcggtaaccttttttttcttccaattataatctctgcttctagccacttccgccagcagttggtggaagacttactaggtgcagggcactttccaagttcatcacaacaacctgcttgttttcatgagacaataatccgaaaagttcgctttgatatattcctggagggccaagcccatctatttacaaaaggtgaacagcaaaatcaagcactgctttatgggcaggaacacaagagaaagcaaactgcccaagaagtcatcatgtcagaaactcaatctcaacaaaataatttccatcagggaacttcagggtttcttgggggcttatgagtctcaccggtcaacccaggaggcctcactacaagagccttgacaaggcactgttttttgtgggactgggagttcacactgatgaagcaaacctttgaatttttgcacagctcttgtcagaaagccctgagttccccctggataaagagttaattttaatccttccctataattatacttcaaaatatttgacatctgctattatgccttctttagatctttcttctgtggtgcagacatttctagtaagtgtttgactacttgtatggcattagctttcacagaaaattgtttcacttaaaactgtggattggcctaggctaaggacaaaaataaactaagtacctgtagtgtatttatgtgatatgtgtcaagttactcaaagttattgctgttggaactgaacaataatatttcccagatagctggccttagcatgtgatcacggttgttgtatttttaatttttgtcttttacagtatgagaggtgtaggttaatttgtttatttcctataaatttgtatttatgtgtatataaaatgtacaatgaatgtaaatatgactttctggaaagtttagactacatttagaatctctattcaaaatcaaaatgctgctcaaatgaatttaaccaacatctaggtgcttaatttctcattttatcccacttatgagattgggaaaaagatcaatatgagaaataccatacagataccttaaatgtatgcatttgtgcaacaatttttgagaaggtgagtggcaatttataatttagttggcaatttataatagaacttatagcttttaaaagaccttttaaagacattaaatgtaaacttaaaaatgtttagatcttgtttcaaactttacaatagcattcttcaaaatattaagttatatattttataggcatttagttgcttattaaaagcactgattttcaaactttttgatttaagaacaattatttaagatcgtctcagaagatgggatcttcgtttcaagaaaagggaatcaagtttgcctttgagataatacgttacactaagaaaaggaaaatgtggatagtaaaacccacctctctcatcctattgtactctcttctgctttttagaagcctgcacttaagcttagatttgtgaagggagagtagaaggggagaagtagaaccacagtgttttatttatttttctaaaactcttactaaatccagattttttaaactgttttaaatgtgaattcttcccagaaatttcaatgcattgcatatttagccttcggcatatttttcatgaatagatcatgaagtcataggcttccaaggcataggaagagatcttgcaggtctagtattttaataatgcactattacccagggcagatattatgagaaactgtttcttctctaagggtttatggcagactttgcttttttaacatgtgagaaatgaattttttattttgtgatttatgtgatttcttttgctgagtgaaggaaaggagaaattgttgctattgtcagcatcttaaaggtatttccagtcaaggcaaggctaagtgctttgtgatagtattaagcaagtcatgttttgaatggattacctgtagtgactcattggaatgatataattatacaagtaatgccaaaaaccaagtcaaagcctaattaaccaaagcactcatttaaaaatcatcatgtttggacctatctggacctctcagcactgtaaaatagttttggttttgtggcatatgaatagctgtttaacaaatcaaagttagctttttgcttctcagcttttttgggcaatacaagttaagttcttaatggggagacattatcatggcatgacttaagggaacattggtttgtgaaggaaaaacagattatctaaagccatctctatgtttctgttcagataaagattaatgagttctgtgtttatatcagctttgtatatttcatcttagccattctatcctagaaagattttaatgtgagcttaagatgtaaataaataattttgcaaacatgccttttgttttctatataccctgaccttttaataaagtttcagtgtatttatcattggt

SEQ ID NO: 294150 - DNA, 5185 bp, Homo sapiens
accatcttccaccctcaaaacatgaggcaatagaaaagaaaaataggaaatttccaaaaagaagcaactcctcaaaattagacgtgtaaaacagtctttggtttgtctcgatttggagccaggaagaccatttcctttgaccttgccctgctcccctacataaatagatggtacttgttcttgacaatgtaagtgcaggcatataaattaaggctagctatgtttgcaaaaatgccctcttacctctttttcccttcctgaaacagttggcaaaatcaagtcttttagagcatagaattgcgacgatgaagcaggaacagaaatcctgggaacatcagagtgcgagcttaaagtcacagctggtggcttctcaggaaaaggttcagaatttagaagacaccgtgcagaatgtaaacctgcaaatgtcccggatgaaatctgacctacgagtgactcagcaggaaaaggaggctttaaaacaagaagtgatgtctttacataagcaacttcagaatgctggtggcaagagctgggccccagagatagctactcatccatcagggctccataaccagcagaaaaggctgtcctgggacaagttggatcatctgatgaatgaggaacagcagctgctttggcaagagaatgagaggctccagaccatggtacagaacaccaaagccgaactcacgcactcccgggagaaggtccgtcaattggaatccaatcttcttcccaagcaccaaaaacatctaaacccatcaggtaccatgaatcccacagagcaagaaaaattgagcttaaagagagagtgtgatcagtttcagaaagaacaatctcctgctaacaggaaggtcagtcagatgaattcccttgaacaagaattagaaacaattcatttggaaaatgaaggcctgaaaaagaaacaagtaaaactggatgagcagctcatggagatgcagcacctgaggtccactgcgacgcctagcccgtcccctcatgcttgggatttgcagctgctccagcagcaagcctgtccgatggtgcccagggagcagtttctgcagcttcaacgccagctgctgcaggcagaaaggataaaccagcacctgcaggaggaacttgaaaacaggacctccgaaaccaacacaccacagggaaaccaggaacaactggtaactgtcatggaggaacgaatgatagaagttgaacagaaactgaaactagtgaaaaggcttcttcaagagaaagtgaatcagctcaaagaacaactctgcaagaacactaaggcagacgcaatggtgaaggacttgtatgttgaaaatgcccagttgttgaaagctctggaagtgactgaacagcgacagaaaacagcagagaagaaaaattacctcctggaggagaagattgccagcctcagtaatatagttaggaatctgacaccagcgccattgacttctacacctcctttgaggtcatagccaaaccaaagggtacactcatatttgtgcactttactgaaatagatgaacatttcagtaggttctcaacttaaaattaagcctaacctaaaactgccagcaacacaactggagtttccatttatcataattagtttttctaaatagacccttatgggagtttgaaaataaatactcacatatttcactacttaaattattcccaagatttgaatttattttaaaattttaatagccaccaagaatgtggacatatgaaaattcaagaacctaaaaaataccagttttgaatgagtttttgtggttttggttttttaattattacaaatctatgtgtaaaatctagatatttgaagtttgagatctgatgagaatggttgttataaactttattttaaaaccaaatttaggtgttcttacatatttaaatactggaaagtcattataatagttttggttctttgaattggtagacaattagtagagtataattggttaggaggcagggcttattaagtggttattaaccgctgacatcagacaaacccaaatctgtagaattctaaccttctaacacctgtgacagtattaccactcttcttgtattatagatttagaactgatttactcaattgcactcttaactaatgttaaaagcttacttgctttaaacagccttttcttctttctcttaaaagtttcatttggggagctggtcttctaagaaacggataaagccacataattaaagcagttgaactatagggaaagcactgaacaaaccactttggagtaaatagctactcttagaaaagagggataagcagaccatgtaggttttctgtctctcaaatcttagagttcataaatttacttgaggttgcctcaagaactcagggaacaatactgtaaactgtcttcctgaactactgtagggcctctctaagaatttgaaatgtataaaccatgtgacctcatttatttgtcttatatatttacagccatactagaatttttatttctacgtttttagtaaatttaatattctgggggaaaaaaggccttgattttagggttaaaaacctgacttatagaagagtttatttaatataggtcaaaattttctgtgtttcttattccttctatacctcaaatctgattctaagaatttcttactgtgataatcattggcatgccacctgaggtcaaggagtgccaaataggactttccactcatgctcaagatcaaaactttatagaacagtcaacattttagattcggtaaccttttttttcttccaattataatctctgcttctagccacttccgccagcagttggtggaagacttactaggtgcagggcactttccaagttcatcacaacaacctgcttgttttcatgagacaataatccgaaaagttcgctttgatatattcctggagggccaagcccatctatttacaaaaggtgaacagcaaaatcaagcactgctttatgggcaggaacacaagagaaagcaaactgcccaagaagtcatcatgtcagaaactcaatctcaacaaaataatttccatcagggaacttcagggtttcttgggggcttatgagtctcaccggtcaacccaggaggcctcactacaagagccttgacaaggcactgttttttgtgggactgggagttcacactgatgaagcaaacctttgaatttttgcacagctcttgtcagaaagccctgagttccccctggataaagagttaattttaatccttccctataattatacttcaaaatatttgacatctgctattatgccttctttagatctttcttctgtggtgcagacatttctagtaagtgtttgactacttgtatggcattagctttcacagaaaattgtttcacttaaaactgtggattggcctaggctaaggacaaaaataaactaagtacctgtagtgtatttatgtgatatgtgtcaagttactcaaagttattgctgttggaactgaacaataatatttcccagatagctggccttagcatgtgatcacggttgttgtatttttaatttttgtcttttacagtatgagaggtgtaggttaatttgtttatttcctataaatttgtatttatgtgtatataaaatgtacaatgaatgtaaatatgactttctggaaagtttagactacatttagaatctctattcaaaatcaaaatgctgctcaaatgaatttaaccaacatctaggtgcttaatttctcattttatcccacttatgagattgggaaaaagatcaatatgagaaataccatacagataccttaaatgtatgcatttgtgcaacaatttttgagaaggtgagtggcaatttataatttagttggcaatttataatagaacttatagcttttaaaagaccttttaaagacattaaatgtaaacttaaaaatgtttagatcttgtttcaaactttacaatagcattcttcaaaatattaagttatatattttataggcatttagttgcttattaaaagcactgattttcaaactttttgatttaagaacaattatttaagatcgtctcagaagatgggatcttcgtttcaagaaaagggaatcaagtttgcctttgagataatacgttacactaagaaaaggaaaatgtggatagtaaaacccacctctctcatcctattgtactctcttctgctttttagaagcctgcacttaagcttagatttgtgaagggagagtagaaggggagaagtagaaccacagtgttttatttatttttctaaaactcttactaaatccagattttttaaactgttttaaatgtgaattcttcccagaaatttcaatgcattgcatatttagccttcggcatatttttcatgaatagatcatgaagtcataggcttccaaggcataggaagagatcttgcaggtctagtattttaataatgcactattacccagggcagatattatgagaaactgtttcttctctaagggtttatggcagactttgcttttttaacatgtgagaaatgaattttttattttgtgatttatgtgatttcttttgctgagtgaaggaaaggagaaattgttgctattgtcagcatcttaaaggtatttccagtcaaggcaaggctaagtgctttgtgatagtattaagcaagtcatgttttgaatggattacctgtagtgactcattggaatgatataattatacaagtaatgccaaaaaccaagtcaaagcctaattaaccaaagcactcatttaaaaatcatcatgtttggacctatctggacctctcagcactgtaaaatagttttggttttgtggcatatgaatagctgtttaacaaatcaaagttagctttttgcttctcagcttttttgggcaatacaagttaagttcttaatggggagacattatcatggcatgacttaagggaacattggtttgtgaaggaaaaacagattatctaaagccatctctatgtttctgttcagataaagattaatgagttctgtgtttatatcagctttgtatatttcatcttagccattctatcctagaaagattttaatgtgagcttaagatgtaaataaataattttgcaaacatgccttttgttttctatataccctgaccttttaataaagtttcagtgtatttatcattggt

SEQ ID NO: 294151 - DNA, 4283 bp, Homo sapiens
tttatatcagggggatgatggtaacacaggtaagattcttttgatttttcagtctgatcctttatctgatagggttacttttctgacatatgcaatccatgcagggctcaaaactctcatttcatgagaaatccatccttcctgttacaaaggcaaaacatttgctgtcctttctctaggcatcttgtggggaaaataaaccagtgttttcagtgtgacatgattttcgaataatatacttttcttcccttcaggggaaaccaggaacaactggtaactgtcatggaggaacgaatgatagaagttgaacagaaactgaaactagtgaaaaggcttcttcaagagaaagtgaatcagctcaaagaacaactctgcaagaacactaaggcagacgcaatggtgaaggacttgtatgttgaaaatgcccagttgttgaaagctctggaagtgactgaacagcgacagaaaacagcagagaagaaaaattacctcctggaggagaagattgccagcctcagtaatatagttaggaatctgacaccagcgccattgacttctacacctcctttgaggtcatagccaaaccaaagggtacactcatatttgtgcactttactgaaatagatgaacatttcagtaggttctcaacttaaaattaagcctaacctaaaactgccagcaacacaactggagtttccatttatcataattagtttttctaaatagacccttatgggagtttgaaaataaatactcacatatttcactacttaaattattcccaagatttgaatttattttaaaattttaatagccaccaagaatgtggacatatgaaaattcaagaacctaaaaaataccagttttgaatgagtttttgtggttttggttttttaattattacaaatctatgtgtaaaatctagatatttgaagtttgagatctgatgagaatggttgttataaactttattttaaaaccaaatttaggtgttcttacatatttaaatactggaaagtcattataatagttttggttctttgaattggtagacaattagtagagtataattggttaggaggcagggcttattaagtggttattaaccgctgacatcagacaaacccaaatctgtagaattctaaccttctaacacctgtgacagtattaccactcttcttgtattatagatttagaactgatttactcaattgcactcttaactaatgttaaaagcttacttgctttaaacagccttttcttctttctcttaaaagtttcatttggggagctggtcttctaagaaacggataaagccacataattaaagcagttgaactatagggaaagcactgaacaaaccactttggagtaaatagctactcttagaaaagagggataagcagaccatgtaggttttctgtctctcaaatcttagagttcataaatttacttgaggttgcctcaagaactcagggaacaatactgtaaactgtcttcctgaactactgtagggcctctctaagaatttgaaatgtataaaccatgtgacctcatttatttgtcttatatatttacagccatactagaatttttatttctacgtttttagtaaatttaatattctgggggaaaaaaggccttgattttagggttaaaaacctgacttatagaagagtttatttaatataggtcaaaattttctgtgtttcttattccttctatacctcaaatctgattctaagaatttcttactgtgataatcattggcatgccacctgaggtcaaggagtgccaaataggactttccactcatgctcaagatcaaaactttatagaacagtcaacattttagattcggtaaccttttttttcttccaattataatctctgcttctagccacttccgccagcagttggtggaagacttactaggtgcagggcactttccaagttcatcacaacaacctgcttgttttcatgagacaataatccgaaaagttcgctttgatatattcctggagggccaagcccatctatttacaaaaggtgaacagcaaaatcaagcactgctttatgggcaggaacacaagagaaagcaaactgcccaagaagtcatcatgtcagaaactcaatctcaacaaaataatttccatcagggaacttcagggtttcttgggggcttatgagtctcaccggtcaacccaggaggcctcactacaagagccttgacaaggcactgttttttgtgggactgggagttcacactgatgaagcaaacctttgaatttttgcacagctcttgtcagaaagccctgagttccccctggataaagagttaattttaatccttccctataattatacttcaaaatatttgacatctgctattatgccttctttagatctttcttctgtggtgcagacatttctagtaagtgtttgactacttgtatggcattagctttcacagaaaattgtttcacttaaaactgtggattggcctaggctaaggacaaaaataaactaagtacctgtagtgtatttatgtgatatgtgtcaagttactcaaagttattgctgttggaactgaacaataatatttcccagatagctggccttagcatgtgatcacggttgttgtatttttaatttttgtcttttacagtatgagaggtgtaggttaatttgtttatttcctataaatttgtatttatgtgtatataaaatgtacaatgaatgtaaatatgactttctggaaagtttagactacatttagaatctctattcaaaatcaaaatgctgctcaaatgaatttaaccaacatctaggtgcttaatttctcattttatcccacttatgagattgggaaaaagatcaatatgagaaataccatacagataccttaaatgtatgcatttgtgcaacaatttttgagaaggtgagtggcaatttataatttagttggcaatttataatagaacttatagcttttaaaagaccttttaaagacattaaatgtaaacttaaaaatgtttagatcttgtttcaaactttacaatagcattcttcaaaatattaagttatatattttataggcatttagttgcttattaaaagcactgattttcaaactttttgatttaagaacaattatttaagatcgtctcagaagatgggatcttcgtttcaagaaaagggaatcaagtttgcctttgagataatacgttacactaagaaaaggaaaatgtggatagtaaaacccacctctctcatcctattgtactctcttctgctttttagaagcctgcacttaagcttagatttgtgaagggagagtagaaggggagaagtagaaccacagtgttttatttatttttctaaaactcttactaaatccagattttttaaactgttttaaatgtgaattcttcccagaaatttcaatgcattgcatatttagccttcggcatatttttcatgaatagatcatgaagtcataggcttccaaggcataggaagagatcttgcaggtctagtattttaataatgcactattacccagggcagatattatgagaaactgtttcttctctaagggtttatggcagactttgcttttttaacatgtgagaaatgaattttttattttgtgatttatgtgatttcttttgctgagtgaaggaaaggagaaattgttgctattgtcagcatcttaaaggtatttccagtcaaggcaaggctaagtgctttgtgatagtattaagcaagtcatgttttgaatggattacctgtagtgactcattggaatgatataattatacaagtaatgccaaaaaccaagtcaaagcctaattaaccaaagcactcatttaaaaatcatcatgtttggacctatctggacctctcagcactgtaaaatagttttggttttgtggcatatgaatagctgtttaacaaatcaaagttagctttttgcttctcagcttttttgggcaatacaagttaagttcttaatggggagacattatcatggcatgacttaagggaacattggtttgtgaaggaaaaacagattatctaaagccatctctatgtttctgttcagataaagattaatgagttctgtgtttatatcagctttgtatatttcatcttagccattctatcctagaaagattttaatgtgagcttaagatgtaaataaataattttgcaaacatgccttttgttttctatataccctgaccttttaataaagtttcagtgtatttatcattggt

SEQ ID NO: 294152 - DNA, 6134 bp, Homo sapiens
aaaactcagagtgagactaagagctaccgcaacactgaaaatcctggagcaccttggggattctcagcagatcttagttgacaattaactggtggactctaagtgaatcttgttagcgaagtgttggccttgtctaaattcttaactcctgtggctttgcataacaacttggtgtttcttttctgaggctttgatgtttatataacactctcaacttattttgaaaacatttacatagtgattagttaacccaacagaccaatcctgggaagacagccagagcctgcagcaccttagtaacagaaaaactgataattaggagaagagacctgtccaagaccaggaacctggaccaaaattgtgccatgttgctttactttaatgagtggccccagtaaaaactgagctgtatggcagagctgttcacatttatcttctgtgtccacccagttctgctgaaacccctggcaagatcgtggccctgttgtagcttgtcatgttttgaacagctgtctatggaaagaaagcaaacacaacctagagcaacattgatttgttttagaaagctcttttattttcagttctggctgtgttcaacatcttagcttacgtttttcatgttgtaatgatctgccgtacggacgatcacctctaagttagagagttctgtaatttggcttggattaaagatgcttggttagtgaaagctgctgctttttttatagtcaaaggactggttctgagagccttgttgcagatggctgaggtcaccgtcccaagggtgtatgtcgtgtttggcatccattgcatcatggcgaaggcatcttcagatgtgcaggtttcaggctttcatcggaaaatccagcacgttaaaaatgaactttgccacatgttgagcttggaggaggtggccccagtgctgcagcagacattacttcaggacaacctcttgggcagggtacattttgaccaatttaaagaagcattaatactcatcttgtccagaactctgtcaaatgaagaacactttcaagaaccagactgctcactagaagctcagcccaaatatgttagaggtgggaagcgttacggacgaaggtccttgcccgagttccaagagtccgtggaggagtttcctgaagtgacggtgattgagccactggatgaagaagcgcggccttcacacatcccagccggtgactgcagtgagcactggaagacgcaacgcagtgaggagtatgaagcggaaggccagttaaggttttggaacccagatgacttgaatgcttcacagagtggatcttcccctccccaagactggatagaagagaaactgcaagaagtttgtgaagatttggggatcacccgtgatggtcacctgaaccggaagaagctggtctccatctgtgagcagtatggtttacagaatgtggatggagagatgctcgaggaagtattccataatcttgatcctgacggtacaatgagtgtagaagattttttctatggtttgtttaaaaatggaaaatctcttacaccatcagcatctactccatatagacaactaaaaaggcacctttccatgcagtctttcgatgagagtggacgacgtaccacaacctcatcagcaatgacaagtaccattggctttcgggtcttctcctgcctggatgatgggatgggccatgcatctgtggagagaatactcgacacctggcaggaagagggcattgagaacagccaggagatcctgaaggccttggatttcagcctcgatggaaacatcaatttgacagaattaacactggcccttgaaaatgaacttttggttaccaagaacagcattcaccaggcggctctggccagctttaaggctgaaatccggcatttgttggaacgagttgatcaggtggtcagagaaaaagagaagctacggtcagatctggacaaggccgagaagctcaagtctttaatggcctcggaggtggatgatcaccatgcggccatagagcggcggaatgagtacaacctcaggaaactggatgaagagtacaaggagcgaatagcagccttaaaaaatgaactccgaaaagagagagagcagatcctgcagcaggcaggcaagcagcgtttagaacttgaacaggaaattgaaaaggcaaaaacagaagagaactatatccgggaccgccttgccctctctttaaaggaaaacagtcgtctggaaaatgagcttctagaaaatgcagagaatgttggcagaatatgagaatctgacaaacaaacttcagagaaatttggaaaatgtgttagcagaaaagtttggtgacctcgatcctagcagtgctgagttcttcctgcaagaagagagactgacacagatgagaaatgaatatgagcggcagtgcagggtactacaagaccaagtagatgaactccagtctgagctggaagaatatcgtgcacaaggcagagtgctcaggcttccgttgaagaactcaccgtcagaagaagttgaggctaacagcggtggcattgagcccgaacacgggctcggttctgaagaatgcaatccattgaatatgagcattgaggcagagctggtcattgaacagatgaaagaacaacatcacagggacatatgttgcctcagactggagctcgaagataaagtgcgccattatgaaaagcagctggacgaaaccgtggtcagctgcaagaaggcacaggagaacatgaagcaaaggcatgagaacgaaacgcacaccttagaaaaacaaataagtgaccttaaaaatgaaattgctgaacttcaggggcaagcagcagtgctcaaggaggcacatcatgaggccacttgcaggcatgaggaggagaaaaaacaactgcaagtgaagcttgaggaggaaaagactcacctgcaggagaagctgaggctgcaacatgagatggagctcaaggctagactgacacaggctcaagcaagctttgagcgggagagggaaggccttcagagtagcgcctggacagaagagaaggtgagaggcttgactcaggaactagagcagtttcaccaggagcagctgacaagcctggtggagaaacacactcttgagaaagaggagttaagaaaagagctcttggaaaagcaccaaagggagcttcaggagggaagggaaaaaatggaaacagagtgtaatagaagaacctctcaaatagaagcccagtttcagtctgattgtcagaaagtcactgagaggtgtgaaagcgctctgcaaagcctggaggggcgctaccgccaagagctgaaggacctccaggaacagcagcgtgaggagaaatcccagtgggaatttgagaaggacgagctcacccaggagtgtgcggaagcccaggagctgctgaaagagactcttaagagagagaaaacaacttctctggtcctgacccaggagagagagatgctggagaaaacatacaaagaacatttgaacagcatggtcgtcgagagacagcagctactccaagacctggaagacctaagaaatgtatctgaaacccagcaaagcctgctgtctgaccagatacttgagctgaagagcagtcacaaaagggaactgagggagcgtgaggaggtcctgtgccaggcaggggcttcggagcagctggccagccagcggctggaaagactagaaatggaacatgaccaggaaaggcaggaaatgatgtccaagcttctagccatggagaacattcacaaagcgacctgtgagacagcagatcgagaaagagccgagatgagcacagaaatctccagacttcagagtaaaataaaggaaatgcagcaggcaacatctcctctctctatgcttcagagtggttgccaggtgataggagaggaggaggtggaaggagatggagccctgtccctgcttcagcaaggggagcagctgttggaagaaaatggggacgtcctcttaagcctgcagagagctcatgaacaggcagtgaaggaaaatgtgaaaatggctactgaaatttctagattgcaacagaggctacaaaagttagagccagggttagtaatgtcttcttgtttggatgagccagctactgagttttttggaaatactgcggaacaaacagagccgtttttacagcaaaaccgaacgaagcaagtagaaggtgtgaccaggcggcatgtcctaagtgacctggaagatgatgaggtccgggacctgggaagtacagggacgagctctgttcagagacaggaagtcaaaatagaggagtctgaagcttcagtagagggtttttctgagcttgaaaacagtgaagagaccaggactgaatcctgggagctgaagaatcagattagtcagcttcaggaacagctaatgatgttatgtgcggactgtgatcgagcttctgaaaagaaacaggacctactttttgatgtttctgtgctaaaaaagaaactgaagatgcttgagagaatccctgaggcttctcccaaatataagctgttgtatgaagatgtgagccgagaaaatgactgccttcaggaagagctgagaatgatggagacacgctacgatgaggcactagaaaataacaaagaactcactgcagaggttttcaggttgcaggatgagctgaagaaaatggaggaagtcactgaaacattcctcagcctggaaaagagttacgatgaggtcaaaatagaaaatgaggagctgaatgttctggttttgagacttcaaggcaagattgagaagcttcaggaaagcgtggtccagcggtgtgactgctgcttatgggaagccagtttagagaacctggaaatcgaacctgatggaaatatactccagctcaatcagacactggaagagtgtgtgcccagggttaggagtgtacatcatgtcatagaggaatgtaagcaagaaaaccagtaccttgaggggaacacacagctcttggaaaaagtaaaagcacatgaaattgcctggttacatggaacaattcagacacatcaagaaaggccaagagtacagaatcaagttatactggaggaaaacactactctcctaggctttcaagacaaacattttcagcatcaggccaccatagcagagttagaactggagaaaacaaagttacaggagctgactaggaagttgaaggagagagtcactattttagttaagcaaaaagatgtactttctcacggagaaaaggaggaagagctgaaggcaatgatgcatgacttgcagatcacgtgcagtgagatgcagcaaaaagttgaacttctgagatatgaatctgaaaagcttcaacaggaaaattctattttgagaaatgaaattactactttaaatgaagaagatagcatttctaacctgaaattagggacattaaatggatctcaggaagaaatgtggcaaaaaacggaaactgtaaaacaagaaaatgctgcagttcagaagatggttgaaaatttaaagaaacagatttcagaattaaaaatcaaaaaccaacaattggatttggaaaatacagaacttagccaaaagaactctcaaaaccaggaaaaactgcaagaacttaatcaacgtctaacagaaatgctatgccagaaggaaaaagagccaggaaacagtgcattggaggaacgggaacaagagaagtttaatctgaaagaagaactggaacgttgtaaagtgcagtcctccactttagtgtcttctctggaggcggagctctctgaagttaaaatacagacccatattgtgcaacaggaaaaccaccttctcaaagatgaactggagaaaatgaaacagctgcacagatgtcccgatctctctgacttccagcaaaaaatctctagtgttctaagctacaacgaaaaactgctgaaagaaaaggaagctctgagtgaggaattaaatagctgtgtcgataagttggcaaaatcaagtcttttagagcatagaattgcgacgatgaagcaggaacagaaatcctgggaacatcagagtgcgagcttaaagtcacagctggtggcttctcaggaaaaggttcacgaattgttagtcgatctttacgtacggcatgtctagggcttacgtataact

SEQ ID NO: 294153 - DNA, 6084 bp, Homo sapiens
aaaactcagagtgagactaagagctaccgcaacactgaaaatcctggagcaccttggggattctcagcagatcttagttgacaattaactggtggactctaagtgaatcttgttagcgaagtgttggccttgtctaaattcttaactcctgtggctttgcataacaacttggtgtttcttttctgaggctttgatgtttatataacactctcaacttattttgaaaacatttacatagtgattagttaacccaacagaccaatcctgggaagacagccagagcctgcagcaccttagtaacagaaaaactgataattaggagaagagacctgtccaagaccaggaacctggaccaaaattgtgccatgttgctttactttaatgagtggccccagtaaaaactgagctgtatggcagagctgttcacatttatcttctgtgtccacccagttctgctgaaacccctggcaagatcgtggccctgttgtagcttgtcatgttttgaacagctgtctatggaaagaaagcaaacacaacctagagcaacattgatttgttttagaaagctcttttattttcagttctggctgtgttcaacatcttagcttacgtttttcatgttgtaatgatctgccgtacggacgatcacctctaagttagagagttctgtaatttggcttggattaaagatgcttggttagtgaaagctgctgctttttttatagtcaaaggactggttctgagagccttgttgcagatggctgaggtcaccgtcccaagggtgtatgtcgtgtttggcatccattgcatcatggcgaaggcatcttcagatgtgcaggtttcaggctttcatcggaaaatccagcacgttaaaaatgaactttgccacatgttgagcttggaggaggtggccccagtgctgcagcagacattacttcaggacaacctcttgggcagggtacattttgaccaatttaaagaagcattaatactcatcttgtccagaactctgtcaaatgaagaacactttcaagaaccagactgctcactagaagctcagcccaaatatgttagaggtgggaagcgttacggacgaaggtccttgcccgagttccaagagtccgtggaggagtttcctgaagtgacggtgattgagccactggatgaagaagcgcggccttcacacatcccagccggtgactgcagtgagcactggaagacgcaacgcagtgaggagtatgaagcggaaggccagttaaggttttggaacccagatgacttgaatgcttcacagagtggatcttcccctccccaagactggatagaagagaaactgcaagaagtttgtgaagatttggggatcacccgtgatggtcacctgaaccggaagaagctggtctccatctgtgagcagtatggtttacagaatgtggatggagagatgctcgaggaagtattccataatcttgatcctgacggtacaatgagtgtagaagattttttctatggtttgtttaaaaatggaaaatctcttacaccatcagcatctactccatatagacaactaaaaaggcacctttccatgcagtctttcgatgagagtggacgacgtaccacaacctcatcagcaatgacaagtaccattggctttcgggtcttctcctgcctggatgatgggatgggccatgcatctgtggagagaatactcgacacctggcaggaagagggcattgagaacagccaggagatcctgaaggccttggatttcagcctcgatggaaacatcaatttgacagaattaacactggcccttgaaaatgaacttttggttaccaagaacagcattcaccaggcggctctggccagctttaaggctgaaatccggcatttgttggaacgagttgatcaggtggtcagagaaaaagagaagctacggtcagatctggacaaggccgagaagctcaagtctttaatggcctcggaggtggatgatcaccatgcggccatagagcggcggaatgagtacaacctcaggaaactggatgaagagtacaaggagcgaatagcagccttaaaaaatgaactccgaaaagagagagagcagatcctgcagcaggcaggcaagcagcgtttagaacttgaacaggaaattgaaaaggcaaaaacagaagagaactatatccgggaccgccttgccctctctttaaaggaaaacagtcgtctggaaaatgagcttctagaaaatgcagagaatgttggcagaatatgagaatctgacaaacaaacttcagagaaatttggaaaatgtgttagcagaaaagtttggtgacctcgatcctagcagtgctgagttcttcctgcaagaagagagactgacacagatgagaaatgaatatgagcggcagtgcagggtactacaagaccaagtagatgaactccagtctgagctggaagaatatcgtgcacaaggcagagtgctcaggcttccgttgaagaactcaccgtcagaagaagttgaggctaacagcggtggcattgagcccgaacacgggctcggttctgaagaatgcaatccattgaatatgagcattgaggcagagctggtcattgaacagatgaaagaacaacatcacagggacatatgttgcctcagactggagctcgaagataaagtgcgccattatgaaaagcagctggacgaaaccgtggtcagctgcaagaaggcacaggagaacatgaagcaaaggcatgagaacgaaacgcacaccttagaaaaacaaataagtgaccttaaaaatgaaattgctgaacttcaggggcaagcagcagtgctcaaggaggcacatcatgaggccacttgcaggcatgaggaggagaaaaaacaactgcaagtgaagcttgaggaggaaaagactcacctgcaggagaagctgaggctgcaacatgagatggagctcaaggctagactgacacaggctcaagcaagctttgagcgggagagggaaggccttcagagtagcgcctggacagaagagaaggtgagaggcttgactcaggaactagagcagtttcaccaggagcagctgacaagcctggtggagaaacacactcttgagaaagaggagttaagaaaagagctcttggaaaagcaccaaagggagcttcaggagggaagggaaaaaatggaaacagagtgtaatagaagaacctctcaaatagaagcccagtttcagtctgattgtcagaaagtcactgagaggtgtgaaagcgctctgcaaagcctggaggggcgctaccgccaagagctgaaggacctccaggaacagcagcgtgaggagaaatcccagtgggaatttgagaaggacgagctcacccaggagtgtgcggaagcccaggagctgctgaaagagactcttaagagagagaaaacaacttctctggtcctgacccaggagagagagatgctggagaaaacatacaaagaacatttgaacagcatggtcgtcgagagacagcagctactccaagacctggaagacctaagaaatgtatctgaaacccagcaaagcctgctgtctgaccagatacttgagctgaagagcagtcacaaaagggaactgagggagcgtgaggaggtcctgtgccaggcaggggcttcggagcagctggccagccagcggctggaaagactagaaatggaacatgaccaggaaaggcaggaaatgatgtccaagcttctagccatggagaacattcacaaagcgacctgtgagacagcagatcgagaaagagccgagatgagcacagaaatctccagacttcagagtaaaataaaggaaatgcagcaggcaacatctcctctctctatgcttcagagtggttgccaggtgataggagaggaggaggtggaaggagatggagccctgtccctgcttcagcaaggggagcagctgttggaagaaaatggggacgtcctcttaagcctgcagagagctcatgaacaggcagtgaaggaaaatgtgaaaatggctactgaaatttctagattgcaacagaggctacaaaagttagagccagggttagtaatgtcttcttgtttggatgagccagctactgagttttttggaaatactgcggaacaaacagagccgtttttacagcaaaaccgaacgaagcaagtagaaggtgtgaccaggcggcatgtcctaagtgacctggaagatgatgaggtccgggacctgggaagtacagggacgagctctgttcagagacaggaagtcaaaatagaggagtctgaagcttcagtagagggtttttctgagcttgaaaacagtgaagagaccaggactgaatcctgggagctgaagaatcagattagtcagcttcaggaacagctaatgatgttatgtgcggactgtgatcgagcttctgaaaagaaacaggacctactttttgatgtttctgtgctaaaaaagaaactgaagatgcttgagagaatccctgaggcttctcccaaatataagctgttgtatgaagatgtgagccgagaaaatgactgccttcaggaagagctgagaatgatggagacacgctacgatgaggcactagaaaataacaaagaactcactgcagaggttttcaggttgcaggatgagctgaagaaaatggaggaagtcactgaaacattcctcagcctggaaaagagttacgatgaggtcaaaatagaaaatgaggagctgaatgttctggttttgagacttcaaggcaagattgagaagcttcaggaaagcgtggtccagcggtgtgactgctgcttatgggaagccagtttagagaacctggaaatcgaacctgatggaaatatactccagctcaatcagacactggaagagtgtgtgcccagggttaggagtgtacatcatgtcatagaggaatgtaagcaagaaaaccagtaccttgaggggaacacacagctcttggaaaaagtaaaagcacatgaaattgcctggttacatggaacaattcagacacatcaagaaaggccaagagtacagaatcaagttatactggaggaaaacactactctcctaggctttcaagacaaacattttcagcatcaggccaccatagcagagttagaactggagaaaacaaagttacaggagctgactaggaagttgaaggagagagtcactattttagttaagcaaaaagatgtactttctcacggagaaaaggaggaagagctgaaggcaatgatgcatgacttgcagatcacgtgcagtgagatgcagcaaaaagttgaacttctgagatatgaatctgaaaagcttcaacaggaaaattctattttgagaaatgaaattactactttaaatgaagaagatagcatttctaacctgaaattagggacattaaatggatctcaggaagaaatgtggcaaaaaacggaaactgtaaaacaagaaaatgctgcagttcagaagatggttgaaaatttaaagaaacagatttcagaattaaaaatcaaaaaccaacaattggatttggaaaatacagaacttagccaaaagaactctcaaaaccaggaaaaactgcaagaacttaatcaacgtctaacagaaatgctatgccagaaggaaaaagagccaggaaacagtgcattggaggaacgggaacaagagaagtttaatctgaaagaagaactggaacgttgtaaagtgcaggtatggcctgtagccacctgacagctttttttgaggaaatcccaagaaatagaagaaatgtttgtattaaacttccttaaacataaagccttagtaattaaaacagtatggtcctggcacatgaatagataagtaggtaagtggaatagaaagtctagaattagacccaaatacaaatggaaacgtagtgtataaccagggccacttctcaaaccactggggtaaagatggacttttaaattaatggtgcctgaacaactgagtagacattcggaaatagataaaattagacctatgtttcattccatgcacaaggataaacttaattggattaggagactaaatataaaaaaaaaaa

SEQ ID NO: 294154 - DNA, 2906 bp, Homo sapiens
aaaactcagagtgagactaagagctaccgcaacactgaaaatcctggagcaccttggggattctcagcagatcttagttgacaattaactggtggactctaagtgaatcttgttagcgaagtgttggccttgtctaaattcttaactcctgtggctttgcataacaacttggtgtttcttttctgaggctttgatgtttatataacactctcaacttattttgaaaacatttacatagtgattagttaacccaacagaccaatcctgggaagacagccagagcctgcagcaccttagtaacagaaaaactgataattaggagaagagacctgtccaagaccaggaacctggaccaaaattgtgccatgttgctttactttaatgagtggccccagtaaaaactgagctgtatggcagagctgttcacatttatcttctgtgtccacccagttctgctgaaacccctggcaagatcgtggccctgttgtagcttgtcatgttttgaacagctgtctatggaaagaaagcaaacacaacctagagcaacattgatttgttttagaaagctcttttattttcagttctggctgtgttcaacatcttagcttacgtttttcatgttgtaatgatctgccgtacggacgatcacctctaagttagagagttctgtaatttggcttggattaaagatgcttggttagtgaaagctgctgctttttttatagtcaaaggactggttctgagagccttgttgcagatggctgaggtcaccgtcccaagggtgtatgtcgtgtttggcatccattgcatcatggcgaaggcatcttcagatgtgcaggtttcaggctttcatcggaaaatccagcacgttaaaaatgaactttgccacatgttgagcttggaggaggtggccccagtgctgcagcagacattacttcaggacaacctcttgggcagggtacattttgaccaatttaaagaagcattaatactcatcttgtccagaactctgtcaaatgaagaacactttcaagaaccagactgctcactagaagctcagcccaaatatgttagaggtgggaagcgttacggacgaaggtccttgcccgagttccaagagtccgtggaggagtttcctgaagtgacggtgattgagccactggatgaagaagcgcggccttcacacatcccagccggtgactgcagtgagcactggaagacgcaacgcagtgaggagtatgaagcggaaggccagttaaggttttggaacccagatgacttgaatgcttcacagagtggatcttcccctccccaagactggatagaagagaaactgcaagaagtttgtgaagatttggggatcacccgtgatggtcacctgaaccggaagaagctggtctccatctgtgagcagtatggtttacagaatgtggatggagagatgctcgaggaagtattccataatcttgatcctgacggtacaatgagtgtagaagattttttctatggtttgtttaaaaatggaaaatctcttacaccatcagcatctactccatatagacaactaaaaaggcacctttccatgcagtctttcgatgagagtggacgacgtaccacaacctcatcagcaatgacaagtaccattggctttcgggtcttctcctgcctggatgatgggatgggccatgcatctgtggagagaatactcgacacctggcaggaagagggcattgagaacagccaggagatcctgaaggccttggatttcagcctcgatggaaacatcaatttgacagaattaacactggcccttgaaaatgaacttttggttaccaagaacagcattcaccaggcggctctggccagctttaaggctgaaatccggcatttgttggaacgagttgatcaggtggtcagagaaaaagagaagctacggtcagatctggacaaggccgagaagctcaagtctttaatggcctcggaggtggatgatcaccatgcggccatagagcggcggaatgagtacaacctcaggaaactggatgaagagtacaaggagcgaatagcagccttaaaaaatgaactccgaaaagagagagagcagatcctgcagcaggcaggcaagcagcgtttagaacttgaacaggaaattgaaaaggcaaaaacagaagagaactatatccgggaccgccttgccctctctttaaaggaaaacagtcgtctggaaaatgagcttctagaaaatgcagagaatgttggcagaatatgagaatctgacaaacaaacttcagagaaatttggaaaatgtgttagcagaaaagtttggtgacctcgatcctagcagtgctgagttcttcctgcaagaagagagactgacacagatgagaaatgaatatgagcggcagtgcagggtactacaagaccaagtagatgaactccagtctgagctggaagaatatcgtgcacaaggcagagtgctcaggcttccgttgaagaactcaccgtcagaagaagttgaggctaacagcggtggcattgagcccgaacacggtaaacacattcggacaggctgtagataaagcctttactcttgtttttagaaacgtggttcaatataaaattgcaaagctttggcaacttgaaaaaaagaaaaaaaaaaaaagaatttggccatactcttttcttgagctgtttcacttgtggtctcgtttttcatttgtccttgaagtttttatgagaacatttccatctgattttgatatgcgtcaacaaaggaatggaagaatcaaaccacaagggtatttgctttgttaacaaaacaaacaaaaaactggctgcaaatctgggaatccaggccttgggagtgttagaattcagacactgatctatagctgtcctcttcgaag

SEQ ID NO: 294155 - DNA, 1482 bp, Homo sapiens
aaaactcagagtgagactaagagctaccgcaacactgaaaatcctggagcaccttggggattctcagcagatcttagttgacaattaactggtggactctaagtgaatcttgttagcgaagtgttggccttgtctaaattcttaactcctgtggctttgcataacaacttggtgtttcttttctgaggctttgatgtttatataacactctcaacttattttgaaaacatttacatagtgattagttaacccaacagaccaatcctgggaagacagccagagcctgcagcaccttagtaacagaaaaactgataattaggagaagagacctgtccaagaccaggaacctggaccaaaattgtgccatgttgctttactttaatgagtggccccagtaaaaactgagctgtatggcagagctgttcacatttatcttctgtgtccacccagttctgctgaaacccctggcaagatcgtggccctgttgtagcttgtcatgttttgaacagctgtctatggaaagaaagcaaacacaacctagagcaacattgatttgttttagaaagctcttttattttcagttctggctgtgttcaacatcttagcttacgtttttcatgttgtaatgatctgccgtacggacgatcacctctaagttagagagttctgtaatttggcttggattaaagatgcttggttagtgaaagctgctgctttttttatagtcaaaggactggttctgagagccttgttgcagatggctgaggtcaccgtcccaagggtgtatgtcgtgtttggcatccattgcatcatggcgaaggcatcttcagatgtgcaggtttcaggctttcatcggaaaatccagcacgttaaaaatgaactttgccacatgttgagcttggaggaggtggccccagtgctgcagcagacattacttcaggacaacctcttgggcagggtacattttgaccaatttaaagaagcattaatactcatcttgtccagaactctgtcaaatgaagaacactttcaagaaccagactgctcactagaagctcagcccaaatatgttagaggtgggaagcgttacggacgaaggtccttgcccgagttccaagagtccgtggaggagtttcctgaagtgacggtgattgagccactggatgaagaagcgcggccttcacacatcccagccggtgactgcagtgagcttttggagagctgacatttctgtgcatgcgtcatgtacacatttagagttcagtgtgataaagcagctcgaacacttggtttttgcctcaagatactgagcctggggtgctttccagtgcccagcagttgccatggttctttctgctggattccttgcacccaggcctgtctcgttctccagcatgtggagagtcgccagcctccctcatcccccatcttttcattttgcatattgccataatctaccaataaaggaggttcagtaacatt

SEQ ID NO: 294156 - DNA, 473 bp, Homo sapiens
gaatttccaacactatgttgaataggagtggtgagagagggtatccttgtcttgtgccagttttcaaagggaatgcttccagcttttgcccattatgatactggctgtgggtttgtcataaatagctcttattatttggagatacgttccatcaatacctagtttattgagagtttttagcatgatgttgaattttccatgccatttaagtggaaagtcttttacgataaaaaatggtcataaaacagtgtcattgagttcatattactgtttccttaatatggccttttatgaacctggtaagtttccccagcctaaatatgtatgtctgttatttgactttttcatttttctcttagtcctccactttagtgtcttctctggaggcggagctctctgaagttaaaatacagacccatattgtgcaacaggaaaaccaccttctcaaagatgaactggagaaaatgaaacag

SEQ ID NO: 294157 - DNA, 365 bp, Homo sapiens
ccgtggaggagtttcctgaagtgacggtgattgagccactggatgaagaagcgcggccttcacacatcccagccggtgactgcagtgaggtaaggaatcgggcatgcacgttcatctggatcatgagtgtggagccccacgtcagtgcagcacagagacaggggagctgagggggttgatggcacgatgtgggcttttctcagttaccaactccttgctaatcttattacttgccttttggacatatataatgtttctatcttttgaatgtttttacctcgtttcagcttttggagagctgacatttctgtgcatgcgtcatgtacacatttagagttcaggtatttccacatcatctgaggtct

SEQ ID NO: 294158 - DNA, 185 bp, Homo sapiens
tcacatcactgcactccagcctgggtgacagagcaagacaccatctcaaaaaataatgatgagaatgatttgagacctttcttcttttctaagaaccttcccaactggagatgtgaaacggtcattctccatccactcacctggtttcctgcctctatgtcgttttcgggatcctctagacaccc

SEQ ID NO: 294159 - DNA, 2950 bp, Homo sapiens
gcggccgccagcagacgccgtggcgtaagcgcacccgtctcgcggggtctcctggggcctcggcgagagacttcggctctcgcgagagaggactgcgcctgcgcagagccgaggacgcgtccggcgccgagattcaaactagtggcgggaggctgtgagctgagcggtggggtctgcgtacgcctggagtccttccccgctgtgctcagcatggaccctatccggagcttctgcgggaagctgcggtctctggccagcacgctggactgcgagacggcccggctgcagcgagcgctggacggagaggaaagcggatgatgttaatattcttcttgataaagcaagattggaaaatcaagaaggcattgatttcataaaggcaacaaaagtactaatggaaaaaaattcaatggatattatgaaaataagagagtatttccagaagtatggatatagtccacgtgtcaagaaaaattcagtacacgagcaagaagccattaactctgacccagagttgtctaattgtgaaaattttcagaagactgatgtgaaagatgatctgtctgatcctcctgttgcaagcagttgtatttctgagaagtctccacgtagtccacaactttcagattttggacttgagcggtacatcgtatcccaagttctaccaaaccctccacaggcagtgaacaactataaggaagagcccgtaattgtaaccccacctaccaaacaatcactagtaaaagtactaaaaactccaaaatgtgcactaaaaatggatgattttgagtgtgtaactcctaaattagaacactttggtatctctgaatatactatgtgtttaaatgaagattacacaatgggacttaaaaatgcgaggaataataaaagtgaggaggccatagatacagaatccaggctcaatgataatgtttttgccactcccagccccatcatccagcagttggaaaaaagtgatgccgaatataccaactctcctttggtacctacattctgtactcctggtttgaaaattccatctacaaagaacagcatagctttggtatccacaaattacccattatcaaaaacaaatagttcatcaaatgatttggaagttgaagatcgtacttcgttggttttaaattcagacacatgctttgagaatttaacagatccctcttcacctacgatttcttcttatgagaatctgctcagaacacctacacctccagaagtaactaaaattccagaagatattctccagcttttatcaaaatacaactcaaacctagctactccaatagcaattaaagcagtgccacccagtaaaaggttccttaaacatggacagaacatccgagatgtcagcaacaaagaaaactgaaattccagtggatctatccaacacagaaactgaacaaaatgagatgaaagccgagctggaccgattttaacattcacattgccctgcctctgtccccctttaaacgttgacccattttaaagacaaacatgaacattaacatcataatatgctttttatgaagtttcaataaggtttaaccttagtcttgttgacatgtagcccagtcattcactctttaaggactattagtgtttcattgatactaaattacccagcttaatcaacagaatggtttaagtagtaccaggaagtaggacaagtaatttcaaaaatataaaggtgtttgctactcagatgaggccgcccctgaccttctggccagagagacattgctgccagccagctctgccttcccatcatctcctttcaggaccgtcccacaccttttacttgctcagtgctgtctgaagatgcagttgctgtttgcaaacaacaggaacaccagttaaactaattaggaaaagagggagatttccaggcctgggtaactatatactgtgaccattggaggtagagacaggtctcaacagttggaaccaggaactctgctgtcaggttgtgagttttgtttctcttccagcttttcactgtgtgggggtcttttctcttatgtcagctctttctatcacatggcagctgacctctcacgctccactctgcagcttggacacccagtagaccctgaatttcactctctctaaaaggttctgagggctcatcctgggccaggggccctcctgtgcactgttagctatggccacgggagcctccagagctgcctggtagcttcaggttgacctgcttatcaggcctacgatccttctgatttaagtacagctggaaagtattatctaattaagttcatgatagtgcttttggagaacttgtcaaattacagccaatgagaaaataaggacctagcataccgtggagaaccattaaaaatttgagaagaaacaacaagtattatgtcaacttacttcaaaggcgtagttttgggaatttgatgcagtaaagattaccctgttttatgattgttccttgaaagtcaaatgggggacctgtccattgtgctctattaatcttgtcagaaaactgtcaccaaaacaaaatttgagtttgtccttgttctaggagttactgggtagttgtaagtataatttttattaaatataatgtaaaataaaatgttaagatacttagttttgtttttcaaagtaaagctgtagtcagcgttatgtatgccattgactctgaaatgtataccagcctttcactgtgtaccgtgtgtatataaatccacagaaccggatgagctgcttagggagggaatatattcaaagtgtaccaaggaccaaatcctggagttctcccaactttagaggatggaaaggggcagagtaatctagcaaaggagactgaggccagtgaagtaggaagaaagtatttcaaggagagtgatgattctgtgaatattgctgagaattcaaataaaaagaggactgagaactgaaaaaaggg

SEQ ID NO: 294160 - DNA, 1287 bp, Homo sapiens
gcggccgccagcagacgccgtggcgtaagcgcacccgtctcgcggggtctcctggggcctcggcgagagacttcggctctcgcgagagaggactgcgcctgcgcagagccgaggacgcgtccggcgccgagattcaaactagtggcgggaggctgtgagctgagcggtggggtctgcgtacgcctggagtccttccccgctgtgctcagcatggaccctatccggagcttctgcgggaagctgcggtctctggccagcacgctggactgcgagacggcccggctgcagcgagcgctggacggagaggaaagcggtgcgtgaggcgggcggccagggcacgactttgaagattatccaatgagaattttatatgaccttcattcagaagttcagactctaaaggatgatgttaatattcttcttgataaagcaagattggaaaatcaagaaggcattgatttcataaaggcaacaaaagtactaatggaaaaaaattcaatggatattatgaaaataagagagtatttccagaagtatggatatagtccacgtgtcaagaaaaattcagtacacgagcaagaagccattaactctgacccagagttgtctaattgtgaaaattttcagaagactgatgtgaaagatgatctgtctgatcctcctgttgcaagcagttgtatttctgagaagtctccacgtagtccacaactttcagattttggacttgagcggtacatcgtatcccaagttctaccaaaccctccacaggcagtgaacaactataaggaagagcccgtaattgtaaccccacctaccaaacaatcactagtaaaagtactaaaaactccaaaatgtgcactaaaaatggatgattttgagtgtgtaactcctaaattagaacactttggtatctctgaatatactatgtgtttaaatgaagattacacaatgggacttaaaaatgcgaggaataataaaagtgaggaggccatagatacagaatccaggctcaatgataatgtttttgccactcccagccccatcatccagcagttggaaaaaagtggtggcgaatatccaactctcttggtactacatactggaccggttgaaattcaactaaagaagtatagtggattccattccattatgaagcatgtctactgattggagtcagagaccggggtaacacaaacagtgaaacaacttagtaatatataaagtaacaccctgaaagcagtacttaaacaaccaagtaagaagtagtcaacaaattcaaaaaggatc

SEQ ID NO: 294161 - DNA, 489 bp, Homo sapiens
gcggccgccagcagacgccgtggcgtaagcgcacccgtctcgcggggtctcctggggcctcggcgagagacttcggctctcgcgagagaggactgcgcctgcgcagagccgaggacgcgtccggcgccgagattcaaactagtggcgggaggctgtgagctgagcggtggggtctgcgtacgcctggagtccttccccgctgtgctcagcatggaccctatccggagcttctgcgggaagctgcggtctctggccagcacgctggactgcgagacggcccggctgcagcgagcgctggacggagaggaaagcggtgcgtgaggcgggcggccagggcacggtgcgtggggtgcgccgcgggcggaggggcgtggcgagtggacggtatgtcccacgggaaccgccaggcactgacggcgtggacggctgccaccgaggcgcagggcgggtgctgcgcgtctcactgctcggcgtttggcgttagcgtag

SEQ ID NO: 294162 - DNA, 3012 bp, Homo sapiens
gcggccgccagcagacgccgtggcgtaagcgcacccgtctcgcggggtctcctggggcctcggcgagagacttcggctctcgcgagagaggactgcgcctgcgcagagccgaggacgcgtccggcgccgagattcaaactagtggcgggaggctgtgagctgagcggtggggtctgcgtacgcctggagtccttccccgctgtgctcagcatggaccctatccggagcttctgcgggaagctgcggtctctggccagcacgctggactgcgagacggcccggctgcagcgagcgctggacggagaggaaagcgactttgaagattatccaatgagaattttatatgaccttcattcagaagttcagactctaaaggatgatgttaatattcttcttgataaagcaagattggaaaatcaagaaggcattgatttcataaaggcaacaaaagtactaatggaaaaaaattcaatggatattatgaaaataagagagtatttccagaagtatggatatagtccacgtgtcaagaaaaattcagtacacgagcaagaagccattaactctgacccagagttgtctaattgtgaaaattttcagaagactgatgtgaaagatgatctgtctgatcctcctgttgcaagcagttgtatttctgagaagtctccacgtagtccacaactttcagattttggacttgagcggtacatcgtatcccaagttctaccaaaccctccacaggcagtgaacaactataaggaagagcccgtaattgtaaccccacctaccaaacaatcactagtaaaagtactaaaaactccaaaatgtgcactaaaaatggatgattttgagtgtgtaactcctaaattagaacactttggtatctctgaatatactatgtgtttaaatgaagattacacaatgggacttaaaaatgcgaggaataataaaagtgaggaggccatagatacagaatccaggctcaatgataatgtttttgccactcccagccccatcatccagcagttggaaaaaagtgatgccgaatataccaactctcctttggtacctacattctgtactcctggtttgaaaattccatctacaaagaacagcatagctttggtatccacaaattacccattatcaaaaacaaatagttcatcaaatgatttggaagttgaagatcgtacttcgttggttttaaattcagacacatgctttgagaatttaacagatccctcttcacctacgatttcttcttatgagaatctgctcagaacacctacacctccagaagtaactaaaattccagaagatattctccagcttttatcaaaatacaactcaaacctagctactccaatagcaattaaagcagtgccacccagtaaaaggttccttaaacatggacagaacatccgagatgtcagcaacaaagaaaactgaaattccagtggatctatccaacacagaaactgaacaaaatgagatgaaagccgagctggaccgattttaacattcacattgccctgcctctgtccccctttaaacgttgacccattttaaagacaaacatgaacattaacatcataatatgctttttatgaagtttcaataaggtttaaccttagtcttgttgacatgtagcccagtcattcactctttaaggactattagtgtttcattgatactaaattacccagcttaatcaacagaatggtttaagtagtaccaggaagtaggacaagtaatttcaaaaatataaaggtgtttgctactcagatgaggccgcccctgaccttctggccagagagacattgctgccagccagctctgccttcccatcatctcctttcaggaccgtcccacaccttttacttgctcagtgctgtctgaagatgcagttgctgtttgcaaacaacaggaacaccagttaaactaattaggaaaagagggagatttccaggcctgggtaactatatactgtgaccattggaggtagagacaggtctcaacagttggaaccaggaactctgctgtcaggttgtgagttttgtttctcttccagcttttcactgtgtgggggtcttttctcttatgtcagctctttctatcacatggcagctgacctctcacgctccactctgcagcttggacacccagtagaccctgaatttcactctctctaaaaggttctgagggctcatcctgggccaggggccctcctgtgcactgttagctatggccacgggagcctccagagctgcctggtagcttcaggttgacctgcttatcaggcctacgatccttctgatttaagtacagctggaaagtattatctaattaagttcatgatagtgcttttggagaacttgtcaaattacagccaatgagaaaataaggacctagcataccgtggagaaccattaaaaatttgagaagaaacaacaagtattatgtcaacttacttcaaaggcgtagttttgggaatttgatgcagtaaagattaccctgttttatgattgttccttgaaagtcaaatgggggacctgtccattgtgctctattaatcttgtcagaaaactgtcaccaaaacaaaatttgagtttgtccttgttctaggagttactgggtagttgtaagtataatttttattaaatataatgtaaaataaaatgttaagatacttagttttgtttttcaaagtaaagctgtagtcagcgttatgtatgccattgactctgaaatgtataccagcctttcactgtgtaccgtgtgtatataaatccacagaaccggatgagctgcttagggagggaatatattcaaagtgtaccaaggaccaaatcctggagttctcccaactttagaggatggaaaggggcagagtaatctagcaaaggagactgaggccagtgaagtaggaagaaagtatttcaaggagagtgatgattctgtgaatattgctgagaattcaaataaaaagaggactgagaactgaaaaaaggg

SEQ ID NO: 294163 - DNA, 3039 bp, Homo sapiens
gcggccgccagcagacgccgtggcgtaagcgcacccgtctcgcggggtctcctggggcctcggcgagagacttcggctctcgcgagagaggactgcgcctgcgcagagccgaggacgcgtccggcgccgagattcaaactagtggcgggaggctgtgagctgagcggtggggtctgcgtacgcctggagtccttccccgctgtgctcagcatggaccctatccggagcttctgcgggaagctgcggtctctggccagcacgctggactgcgagacggcccggctgcagcgagcgctggacggagaggaaagcggtgcgtgaggcgggcggccagggcacgactttgaagattatccaatgagaattttatatgaccttcattcagaagttcagactctaaaggatgatgttaatattcttcttgataaagcaagattggaaaatcaagaaggcattgatttcataaaggcaacaaaagtactaatggaaaaaaattcaatggatattatgaaaataagagagtatttccagaagtatggatatagtccacgtgtcaagaaaaattcagtacacgagcaagaagccattaactctgacccagagttgtctaattgtgaaaattttcagaagactgatgtgaaagatgatctgtctgatcctcctgttgcaagcagttgtatttctgagaagtctccacgtagtccacaactttcagattttggacttgagcggtacatcgtatcccaagttctaccaaaccctccacaggcagtgaacaactataaggaagagcccgtaattgtaaccccacctaccaaacaatcactagtaaaagtactaaaaactccaaaatgtgcactaaaaatggatgattttgagtgtgtaactcctaaattagaacactttggtatctctgaatatactatgtgtttaaatgaagattacacaatgggacttaaaaatgcgaggaataataaaagtgaggaggccatagatacagaatccaggctcaatgataatgtttttgccactcccagccccatcatccagcagttggaaaaaagtgatgccgaatataccaactctcctttggtacctacattctgtactcctggtttgaaaattccatctacaaagaacagcatagctttggtatccacaaattacccattatcaaaaacaaatagttcatcaaatgatttggaagttgaagatcgtacttcgttggttttaaattcagacacatgctttgagaatttaacagatccctcttcacctacgatttcttcttatgagaatctgctcagaacacctacacctccagaagtaactaaaattccagaagatattctccagcttttatcaaaatacaactcaaacctagctactccaatagcaattaaagcagtgccacccagtaaaaggttccttaaacatggacagaacatccgagatgtcagcaacaaagaaaactgaaattccagtggatctatccaacacagaaactgaacaaaatgagatgaaagccgagctggaccgattttaacattcacattgccctgcctctgtccccctttaaacgttgacccattttaaagacaaacatgaacattaacatcataatatgctttttatgaagtttcaataaggtttaaccttagtcttgttgacatgtagcccagtcattcactctttaaggactattagtgtttcattgatactaaattacccagcttaatcaacagaatggtttaagtagtaccaggaagtaggacaagtaatttcaaaaatataaaggtgtttgctactcagatgaggccgcccctgaccttctggccagagagacattgctgccagccagctctgccttcccatcatctcctttcaggaccgtcccacaccttttacttgctcagtgctgtctgaagatgcagttgctgtttgcaaacaacaggaacaccagttaaactaattaggaaaagagggagatttccaggcctgggtaactatatactgtgaccattggaggtagagacaggtctcaacagttggaaccaggaactctgctgtcaggttgtgagttttgtttctcttccagcttttcactgtgtgggggtcttttctcttatgtcagctctttctatcacatggcagctgacctctcacgctccactctgcagcttggacacccagtagaccctgaatttcactctctctaaaaggttctgagggctcatcctgggccaggggccctcctgtgcactgttagctatggccacgggagcctccagagctgcctggtagcttcaggttgacctgcttatcaggcctacgatccttctgatttaagtacagctggaaagtattatctaattaagttcatgatagtgcttttggagaacttgtcaaattacagccaatgagaaaataaggacctagcataccgtggagaaccattaaaaatttgagaagaaacaacaagtattatgtcaacttacttcaaaggcgtagttttgggaatttgatgcagtaaagattaccctgttttatgattgttccttgaaagtcaaatgggggacctgtccattgtgctctattaatcttgtcagaaaactgtcaccaaaacaaaatttgagtttgtccttgttctaggagttactgggtagttgtaagtataatttttattaaatataatgtaaaataaaatgttaagatacttagttttgtttttcaaagtaaagctgtagtcagcgttatgtatgccattgactctgaaatgtataccagcctttcactgtgtaccgtgtgtatataaatccacagaaccggatgagctgcttagggagggaatatattcaaagtgtaccaaggaccaaatcctggagttctcccaactttagaggatggaaaggggcagagtaatctagcaaaggagactgaggccagtgaagtaggaagaaagtatttcaaggagagtgatgattctgtgaatattgctgagaattcaaataaaaagaggactgagaactgaaaaaaggg

SEQ ID NO: 294164 - DNA, 2893 bp, Homo sapiens
gcggccgccagcagacgccgtggcgtaagcgcacccgtctcgcggggtctcctggggcctcggcgagagacttcggctctcgcgagagaggactgcgcctgcgcagagccgaggacgcgtccggcgccgagattcaaactagtggcgggaggctgtgagctgagcggtggggtctgcgtacgcctggagtccttccccgctgtgctcagcatggaccctatccggagcttctgcgggaagctgcggtctctggccagcacgctggactgcgagacggcccggctgcagcgagcgctggacggagaggaaagcgactttgaagattatccaatgagaattttatatgaccttcattcagaagttcagactctaaaggatgatgttaatattcttcttgataaagcaagattggaaaatcaagaaggcattgatttcataaaggcaacaaaagtactaatggaaaaaaattcaatggatattatgaaaataagagagtatttccagaagtatggatatagtccacgtgtcaagaaaaattcagtacacgagcaagaagccattaactctgacccagagttgtctaattgtgaaaattttcagaagactgatgtgaaagatgatctgtctgatcctcctgttgcaagcagttgtatttctgagaagtctccacgtagtccacaactttcagattttggacttgagcggtacatcgtatcccaagttctaccaaaccctccacaggcagtgaacaactataaggaagagcccgtaattgtaaccccacctaccaaacaatcactagtaaaagtactaaaaactccaaaatgtgcactaaaaatggatgattttgagtgtgtaactcctaaattagaacactttggtatctctgaatatactatgtgtttaaatgaagattacacaatgggacttaaaaatgcgaggaataataaaagtgaggaggccatagatacagaatccaggctcaatgataatgtttttgccactcccagccccatcatccagcagttggaaaaaagtgatgccgaatataccaactctcctttggtacctacattctgtactcctggtttgaaaattccatctacaaagaacagcatagctttggtatccacaaattacccattatcaaaaacaaatagttcatcaaatgatttggaagttgaagatcgtacttcgttggttttaaattcagacacatgctttgagaatttaacagatccctcttcacctacgatttcttcttatgagaatctgctcagaacacctacacctccagaagtaactaaaattccagaagatattctccagaaattccagtggatctatccaacacagaaactgaacaaaatgagatgaaagccgagctggaccgattttaacattcacattgccctgcctctgtccccctttaaacgttgacccattttaaagacaaacatgaacattaacatcataatatgctttttatgaagtttcaataaggtttaaccttagtcttgttgacatgtagcccagtcattcactctttaaggactattagtgtttcattgatactaaattacccagcttaatcaacagaatggtttaagtagtaccaggaagtaggacaagtaatttcaaaaatataaaggtgtttgctactcagatgaggccgcccctgaccttctggccagagagacattgctgccagccagctctgccttcccatcatctcctttcaggaccgtcccacaccttttacttgctcagtgctgtctgaagatgcagttgctgtttgcaaacaacaggaacaccagttaaactaattaggaaaagagggagatttccaggcctgggtaactatatactgtgaccattggaggtagagacaggtctcaacagttggaaccaggaactctgctgtcaggttgtgagttttgtttctcttccagcttttcactgtgtgggggtcttttctcttatgtcagctctttctatcacatggcagctgacctctcacgctccactctgcagcttggacacccagtagaccctgaatttcactctctctaaaaggttctgagggctcatcctgggccaggggccctcctgtgcactgttagctatggccacgggagcctccagagctgcctggtagcttcaggttgacctgcttatcaggcctacgatccttctgatttaagtacagctggaaagtattatctaattaagttcatgatagtgcttttggagaacttgtcaaattacagccaatgagaaaataaggacctagcataccgtggagaaccattaaaaatttgagaagaaacaacaagtattatgtcaacttacttcaaaggcgtagttttgggaatttgatgcagtaaagattaccctgttttatgattgttccttgaaagtcaaatgggggacctgtccattgtgctctattaatcttgtcagaaaactgtcaccaaaacaaaatttgagtttgtccttgttctaggagttactgggtagttgtaagtataatttttattaaatataatgtaaaataaaatgttaagatacttagttttgtttttcaaagtaaagctgtagtcagcgttatgtatgccattgactctgaaatgtataccagcctttcactgtgtaccgtgtgtatataaatccacagaaccggatgagctgcttagggagggaatatattcaaagtgtaccaaggaccaaatcctggagttctcccaactttagaggatggaaaggggcagagtaatctagcaaaggagactgaggccagtgaagtaggaagaaagtatttcaaggagagtgatgattctgtgaatattgctgagaattcaaataaaaagaggactgagaactgaaaaaaggg

SEQ ID NO: 294165 - DNA, 1996 bp, Homo sapiens
gcggccgccagcagacgccgtggcgtaagcgcacccgtctcgcggggtctcctggggcctcggcgagagacttcggctctcgcgagagaggactgcgcctgcgcagagccgaggacgcgtccggcgccgagattcaaactagtggcgggaggctgtgagctgagcggtggggtctgcgtacgcctggagtccttccccgctgtgctcagcatggaccctatccggagcttctgcgggaagctgcggtctctggccagcacgctggactgcgagacggcccggctgcagcgagcgctggacggagaggaaagcgcttttatcaaaatacaactcaaacctagctactccaatagcaattaaagcagtgccacccagtaaaaggttccttaaacatggacagaacatccgagatgtcagcaacaaagaaaactgaaattccagtggatctatccaacacagaaactgaacaaaatgagatgaaagccgagctggaccgattttaacattcacattgccctgcctctgtccccctttaaacgttgacccattttaaagacaaacatgaacattaacatcataatatgctttttatgaagtttcaataaggtttaaccttagtcttgttgacatgtagcccagtcattcactctttaaggactattagtgtttcattgatactaaattacccagcttaatcaacagaatggtttaagtagtaccaggaagtaggacaagtaatttcaaaaatataaaggtgtttgctactcagatgaggccgcccctgaccttctggccagagagacattgctgccagccagctctgccttcccatcatctcctttcaggaccgtcccacaccttttacttgctcagtgctgtctgaagatgcagttgctgtttgcaaacaacaggaacaccagttaaactaattaggaaaagagggagatttccaggcctgggtaactatatactgtgaccattggaggtagagacaggtctcaacagttggaaccaggaactctgctgtcaggttgtgagttttgtttctcttccagcttttcactgtgtgggggtcttttctcttatgtcagctctttctatcacatggcagctgacctctcacgctccactctgcagcttggacacccagtagaccctgaatttcactctctctaaaaggttctgagggctcatcctgggccaggggccctcctgtgcactgttagctatggccacgggagcctccagagctgcctggtagcttcaggttgacctgcttatcaggcctacgatccttctgatttaagtacagctggaaagtattatctaattaagttcatgatagtgcttttggagaacttgtcaaattacagccaatgagaaaataaggacctagcataccgtggagaaccattaaaaatttgagaagaaacaacaagtattatgtcaacttacttcaaaggcgtagttttgggaatttgatgcagtaaagattaccctgttttatgattgttccttgaaagtcaaatgggggacctgtccattgtgctctattaatcttgtcagaaaactgtcaccaaaacaaaatttgagtttgtccttgttctaggagttactgggtagttgtaagtataatttttattaaatataatgtaaaataaaatgttaagatacttagttttgtttttcaaagtaaagctgtagtcagcgttatgtatgccattgactctgaaatgtataccagcctttcactgtgtaccgtgtgtatataaatccacagaaccggatgagctgcttagggagggaatatattcaaagtgtaccaaggaccaaatcctggagttctcccaactttagaggatggaaaggggcagagtaatctagcaaaggagactgaggccagtgaagtaggaagaaagtatttcaaggagagtgatgattctgtgaatattgctgagaattcaaataaaaagaggactgagaactgaaaaaaggg

SEQ ID NO: 294166 - DNA, 1260 bp, Homo sapiens
gcggccgccagcagacgccgtggcgtaagcgcacccgtctcgcggggtctcctggggcctcggcgagagacttcggctctcgcgagagaggactgcgcctgcgcagagccgaggacgcgtccggcgccgagattcaaactagtggcgggaggctgtgagctgagcggtggggtctgcgtacgcctggagtccttccccgctgtgctcagcatggaccctatccggagcttctgcgggaagctgcggtctctggccagcacgctggactgcgagacggcccggctgcagcgagcgctggacggagaggaaagcgactttgaagattatccaatgagaattttatatgaccttcattcagaagttcagactctaaaggatgatgttaatattcttcttgataaagcaagattggaaaatcaagaaggcattgatttcataaaggcaacaaaagtactaatggaaaaaaattcaatggatattatgaaaataagagagtatttccagaagtatggatatagtccacgtgtcaagaaaaattcagtacacgagcaagaagccattaactctgacccagagttgtctaattgtgaaaattttcagaagactgatgtgaaagatgatctgtctgatcctcctgttgcaagcagttgtatttctgagaagtctccacgtagtccacaactttcagattttggacttgagcggtacatcgtatcccaagttctaccaaaccctccacaggcagtgaacaactataaggaagagcccgtaattgtaaccccacctaccaaacaatcactagtaaaagtactaaaaactccaaaatgtgcactaaaaatggatgattttgagtgtgtaactcctaaattagaacactttggtatctctgaatatactatgtgtttaaatgaagattacacaatgggacttaaaaatgcgaggaataataaaagtgaggaggccatagatacagaatccaggctcaatgataatgtttttgccactcccagccccatcatccagcagttggaaaaaagtggtggcgaatatccaactctcttggtactacatactggaccggttgaaattcaactaaagaagtatagtggattccattccattatgaagcatgtctactgattggagtcagagaccggggtaacacaaacagtgaaacaacttagtaatatataaagtaacaccctgaaagcagtacttaaacaaccaagtaagaagtagtcaacaaattcaaaaaggatc

SEQ ID NO: 294167 - DNA, 2372 bp, Homo sapiens
caggactagagagcgagccgcaaggaagtcggtgcagtcgagacccccctccccatcccagcgcatcgcgtctccgccgagcttgagggcacgccggggacccctccccagagccggccggaccccaggtgccgaggccttggggagcgcggggcgtcccgggtcgcggtgccctcgggacgagacagcccctggcagtgccaccaccgcagccgccgggcgatctccaagcggcgatctctaagcgctgctctctgctcggccgcgggccaggaggggagggtccggccttgccccgcaggcgtccattggcggcttcccccggcctccgcgccatgccgcgggccgtgtgaaaggcggcagcaccggaacccgcaggtgtccgcgggcgcgccaagcccttttgggtagggggcgccttactcgctatgctgcaagggccccgggccttggcttcggccgctgggcagaccccgaaggtggtgcccgcgatgagccccacagagctgtggccatccggcctcagcagcccccagctctgcccagctactgctacctactacacaccgctgtacccgcagacggcgcctcccgcagcggcgccaggcacctgcctcgacgccactccccacggacccgagggccaagttgtgcgatgcctgccggcaggccggctgccggccaaaaggaagctggatctggaggggattgggaggcccgtcgtccctgagttcccaacccccaaggggaagtgcatcagagtggatggcctccccagccccaaaacccccaaatcccccggggagaagactcggtatgacacttcgctggggctgctcaccaagaagttcatttacctcctgagcgagtcagaggatggggtcctggacctgaactgggccgctgaggtgctggacgtgcagaagcggcgcatctatgacatcaccaacgtgctggaaggcatccagctcatccgcaagaaggccaagaacaacatccagtgggtaggcaggggaatgtttgaagaccccaccagacctgggaagcagcaacagctggggcaggagctgaaggagctgatgaacacggagcaggccttggaccagctcatccagagctgctctctgagcttcaagcacctgactgaggacaaggccaacaagaggctggcctatgtgacttaccaggatatccgtgctgttggcaactttaaggagcagacagtgattgccgtcaaggcccctccgcagacgagactggaagtgcccgacaggactgaggacaacctgcagatatatctcaagagcacccaagggcccatcgaagtctacctgtgcccagaggaggtgcaggagccggacagtccttccgaggagcctctcccctctacctccaccctctgccccagccctgactctgcccagcccagcagcagcaccgaccctagcatcatggagcccacagcatcctcagtgccagcaccagcgccaaccccccagcaggccccaccgcctccatccctggtccccttggaggctactgacagcctgctggagctgccgcacccactcctgcagcagactgaggaccagttcctgtccccgaccctggcgtgcagctcccctctgatcagcttctccccatccttggaccaggacgactacctgtggggcttggaggcgggtgagggcatcagcgatctcttcgactcctacgaccttggggacctgttgattaattgagtggccctgcctgcccccagcagcctgcccccgactctacctcctcacagacaggctgacagcccctctgcctgcacagggacattggacactaggtgctgccctcagggcatggggtctcctcgcctttcctgccccagccggcagaagctgtgtggggagatatgaatggtacgggtgaggagtggataaggggtggtcctcaccttcctaatggaagctgggcctagggaggcccatccagtcttctgacttctgacctctcacaagaaggctgcaggtgaggtggccaagtccagggaaaggccctgctacctccttttgaggggtaattaggaccctcgacgtaccaagaagcacataatgcctttgtatttatttcaggttgagttgtttgtttgtcctccctgagttttagcagggaggttgttctagtttttagtgagacctctgcagacaggcccatcactgtccatgttccagggcaggtctgggtttccaagggaggggcccaggctacatccttggtttccccactgtggtgggggctgggactctgaggggctgtccagtctgctagaatgctaattgcacttaggcctcatggttctagtaaacggcagctgtggg

SEQ ID NO: 294168 - DNA, 1473 bp, Homo sapiens
agatgaagcctttacataaggcaacattttttatgatttataatgtaaggcaacattttttatgatttatattcccatttgctttccaaagggatctaaggtagcttatgagattaacaggttacagattgtattatttctaagttgtacaaggagtgagaaagtaatgttcagaggcttaggagaggtgggtgaaggtgctccctggcaggtttggggtttgaattttgaccagacagtcacttttcttgactctcctgccctacgctggcctatgtgacttaccaggatatccgtgctgttggcaactttaaggagcagacagtgattgccgtcaaggcccctccgcagacgagactggaagtgcccgacaggactgaggacaacctgcagatatatctcaagagcacccaagggcccatcgaagtctacctgtgcccagaggaggtgcaggagccggacagtccttccgaggagcctctcccctctacctccaccctctgccccagccctgactctgcccagcccagcagcagcaccgaccctagcatcatggagcccacagcatcctcagtgccagcaccagcgccaaccccccagcaggccccaccgcctccatccctggtccccttggaggctactgacagcctgctggagctgccgcacccactcctgcagcagactgaggaccagttcctgtccccgaccctggcgtgcagctcccctctgatcagcttctccccatccttggaccaggacgactacctgtggggcttggaggcgggtgagggcatcagcgatctcttcgactcctacgaccttggggacctgttgattaattgagtggccctgcctgcccccagcagcctgcccccgactctacctcctcacagacaggctgacagcccctctgcctgcacagggacattggacactaggtgctgccctcagggcatggggtctcctcgcctttcctgccccagccggcagaagctgtgtggggagatatgaatggtacgggtgaggagtggataaggggtggtcctcaccttcctaatggaagctgggcctagggaggcccatccagtcttctgacttctgacctctcacaagaaggctgcaggtgaggtggccaagtccagggaaaggccctgctacctccttttgaggggtaattaggaccctcgacgtaccaagaagcacataatgcctttgtatttatttcaggttgagttgtttgtttgtcctccctgagttttagcagggaggttgttctagtttttagtgagacctctgcagacaggcccatcactgtccatgttccagggcaggtctgggtttccaagggaggggcccaggctacatccttggtttccccactgtggtgggggctgggactctgaggggctgtccagtctgctagaatgctaattgcacttaggcctcatggttctagtaaacggcagctgtggg

SEQ ID NO: 294169 - DNA, 469 bp, Homo sapiens
  misc_feature (460)..(460): n is a, c, g, or t
ttaggctggtggatttcatggagcatgtgaaaggagaagccatcctgggcgaggattttcacttctcttgttgaggcttttcaggaataggaatgctgatttccttagcacctcattctaaaggtattcccttgatgggtaagccccatgagaattcctacttttggttaatttctgattctttcaggtatagagagggcaaccgctcagaagcagcctaggggaaaaaaatatcttgtactttttggaatgaacatctttatacatagtgaaactcagttatggcactacttattacttggatttgaatgggtccccagaagtaatatttgataaatgccttgctaaataccatacaaagctcatgtggtagttcttttacccacattagcctaacatgttctactgtttataataataactcacaacccaatttctccagcctgggcgacagagcagntccgtctca

SEQ ID NO: 294170 - DNA, 2017 bp, Homo sapiens
atggcgccgccagccgcccgcctcgccctgctctccgccgcggcgctcacgctggcggcccggcccgcgcctagccccggcctcggccccgagtgtttcacagccaatggtgcggattataggggaacacagaactggacagcactacaaggcgggaagccatgtctgttttggaacgagactttccagcatccatacaacactctgaaataccccaacggggaggggggcctgggtgagcacaactattgcagaaatccagatggagacgtgagcccctggtgctatgtggcagagcacgaggatggtgtctactggaagtactgtgagatacctgcttgccagatgcctggaaaccttggctgctacaaggatcatggaaacccacctcctctaactggcaccagtaaaacgtccaacaaactcaccatacaaacttgcatcagtttttgtcggagtcagaggttcaagtttgctgggatggagtcaggctatgcttgcttctgtggaaacaatcctgattactggaagtacggggaggcagccagtaccgaatgcaacagcgtctgcttcggggatcacacccaaccctgtggtggcgatggcaggatcatcctctttgatactctcgtgggcgcctgcggtgggaactactcagccatgtcttctgtggtctattcccctgacttccccgacacctatgccacggggagggtctgctactggaccatccgggttccgggggcctcccacatccacttcagcttccccctatttgacatcagggactcggcggacatggtggagcttctggatggctacacccaccgtgtcctagcccgcttccacgggaggagccgcccacctctgtccttcaacgtctctctggacttcgtcatcttgtatttcttctctgatcgcatcaatcaggcccagggatttgctgttttataccaagccgtcaaggaagaactgccacaggagaggcccgctgtcaaccagacggtggccgaggtgatcacggagcaggccaacctcagtgtcagcgctgcccggtcctccaaagtcctctatgtcatcaccaccagccccagccacccacctcagactgtcccaggtagcaattcctgggcgccacccatgggggctggaagccacagagttgaaggatggacagtctatggtctggcaactctcctcatcctcacagtcacagccattgtagcaaagatacttctgcacgtcacattcaaatcccatcgtgttcctgcttcaggggaccttagggattgtcatcaaccagggacttcgggggaaatctggagcattttttacaagccttccacttcaatttccatctttaagaagaaactcaagggtcagagtcaacaagatgaccgcaatccccttgtgagtgactaaaaaccccactgtgcctaggacttgaggtccctctttgagctcaaggctgccgtggtcaacctctcctgtggttcttctctgacagactcttcccctcctctccctctgcctcggcctcttcggggaaaccctcctcctacagactaggaagaggcaccctgctgccagggcaggcagagcctggattcctcctgcttcatcgattgcacttaggagagagactcaaagccctggggcccggccctctctgcatctctctctgatctagctagcagtgggggtgtcaggacagtgaggctgagatgacagaggtggtcatggctggcacagggctcaggtacattctagatggctgtcaggtggtgggtagctttagttacattgaatttttcttgcttctctatttttgtccacacacaaatcagtttctcctgatctttatgtcttggaacagggccagacagggagaactctcaggtactcttgggagttggtcccatacaagtgcggactcctggacattagcgaggtgtaaagagggcagtgtctgtgctgccccggcagctttgctctccagatgctggactagggtggg

SEQ ID NO: 294171 - DNA, 1838 bp, Homo sapiens
atggcgccgccagccgcccgcctcgccctgctctccgccgcggcgctcacgctggcggcccggcccgcgcctagccccggcctcggccccgagtgtttcacagccaatggtgcggattataggggaacacagaactggacagcactacaaggcgggaagccatgtctgttttggaacgagactttccagcatccatacaacactctgaaataccccaacggggaggggggcctgggtgagcacaactattgcagaaatccagatggagacgtgagcccctggtgctatgtggcagagcacgaggatggtgtctactggaagtactgtgagatacctgcttgccagatgcctggaaaccttggctgctacaaggatcatggaaacccacctcctctaactggcaccagtaaaacgtccaacaaactcaccatacaaacttgcatcagtttttgtcggagtcagaggttcaagtttgctgggatggagtcaggctatgcttgcttctgtggaaacaatcctgattactggaagtacggggaggcagccagtaccgaatgcaacagcgtctgcttcggggatcacacccaaccctgtggtggcgatggcaggatcatcctctttgatactctcgtgggcgcctgcggtgggaactactcagccatgtcttctgtggtctattcccctgacttccccgacacctatgccacggggagggtctgctactggaccatccgggttccgggggcctcccacatccacttcagcttccccctatttgacatcagggactcggcggacatggtggagcttctggatggctacacccaccgtgtcctagcccgcttccacgggaggagccgcccacctctgtccttcaacgtctctctggacttcgtcatcttgtatttcttctctgatcgcatcaatcaggcccagggatttgctgttttataccaagccgtcaaggaagaactgccacaggagaggcccgctgtcaaccagacggtggccgaggtgatcacggagcaggccaacctcagtgtcagcgctgcccggtcctccaaagtcctctatgtcatcaccaccagccccagccacccacctcagactgtcccaggtagcaattcctgggcgccacccatgggggctggaagccacagagttgaaggatggacagtctatggtctggcaactctcctcatcctcacagtcacagccattgtagcaaagatacttctgcacgtcacattcaaatcccatcgtgttcctgcttcaggggaccttagggattgtcatcaaccagggacttcgggggaaatctggagcattttttacaagccttccacttcaatttccatctttaagaagaaactcaagggtcagagtcaacaagatgaccgcaatccccttgtgagtgactaaaaaccccactgtgcctaggacttgaggtccctctttgagctcaaggctgccgtggtcaacctctcctgtggttcttctctgacagactcttcccctcctctccctctgcctcggcctcttcggggaaaccctcctcctacagactaggaagaggcaccctgctgccagggcaggcagagcctggattcctcctgcttcatcgattgcacttaggagagagactcaaagccctggggcccggccctctctgcatctctctctgatctagctagcagtgggggtgtcaggacagtgaggctgagatgacagaggtggtcatggctggcacagggctcaggtacattctagatggctgtcaggtggtgggtagctttagttacattgaaccggatagctgaagagatcctgtagatcac

SEQ ID NO: 294172 - DNA, 1966 bp, Homo sapiens
atggcgccgccagccgcccgcctcgccctgctctccgccgcggcgctcacgctggcggcccggcccgcgcctagccccggcctcggccccgagtgtttcacagccaatggtgcggattataggggaacacagaactggacagcactacaaggcgggaagccatgtctgttttggaacgagactttccagcatccatacaacactctgaaataccccaacggggaggggggcctgggtgagcacaactattgcagaaatccagatggagacgtgagcccctggtgctatgtggcagagcacgaggatggtgtctactggaagtactgtgagatacctgcttgccagatgcctggaaaccttggctgctacaaggatcatggaaacccacctcctctaactggcaccagtaaaacgtccaacaaactcaccatacaaacttgcatcagtttttgtcggagtcagaggttcaagtttgctgggatggagtcaggctatgcttgcttctgtggaaacaatcctgattactggaagtacggggaggcagccagtaccgaatgcaacagcgtctgcttcggggatcacacccaaccctgtggtggcgatggcaggatcatcctctttgatactctcgtgggcgcctgcggtgggaactactcagccatgtcttctgtggtctattcccctgacttccccgacacctatgccacggggagggtctgctactggaccatccgggttccgggggcctcccacatccacttcagcttccccctatttgacatcagggactcggcggacatggtggagcttctggatggctacacccaccgtgtcctagcccgcttccacgggaggagccgcccacctctgtccttcaacgtctctctggacttcgtcatcttgtatttcttctctgatcgcatcaatcaggcccagggatttgctgttttataccaagccgtcaaggaagaactgccacaggagaggcccgctgtcaaccagacggtggccgaggtgatcacggagcaggccaacctcagtgtcagcgctgcccggtcctccaaagtcctctatgtcatcaccaccagccccagccacccacctcagactgtcccaggatggacagtctatggtctggcaactctcctcatcctcacagtcacagccattgtagcaaagatacttctgcacgtcacattcaaatcccatcgtgttcctgcttcaggggaccttagggattgtcatcaaccagggacttcgggggaaatctggagcattttttacaagccttccacttcaatttccatctttaagaagaaactcaagggtcagagtcaacaagatgaccgcaatccccttgtgagtgactaaaaaccccactgtgcctaggacttgaggtccctctttgagctcaaggctgccgtggtcaacctctcctgtggttcttctctgacagactcttcccctcctctccctctgcctcggcctcttcggggaaaccctcctcctacagactaggaagaggcaccctgctgccagggcaggcagagcctggattcctcctgcttcatcgattgcacttaggagagagactcaaagccctggggcccggccctctctgcatctctctctgatctagctagcagtgggggtgtcaggacagtgaggctgagatgacagaggtggtcatggctggcacagggctcaggtacattctagatggctgtcaggtggtgggtagctttagttacattgaatttttcttgcttctctatttttgtccacacacaaatcagtttctcctgatctttatgtcttggaacagggccagacagggagaactctcaggtactcttgggagttggtcccatacaagtgcggactcctggacattagcgaggtgtaaagagggcagtgtctgtgctgccccggcagctttgctctccagatgctggactagggtggg

SEQ ID NO: 294173 - DNA, 329 bp, Homo sapiens
atttttgtccacacacaaatcagtttctcctgatctttatgtcttggaacagggccagacagggagaactctcaggtactcttgggagttggtcccatacaagtgcggactcctggacattagcgaggtgtaaagagggcagtgtctgtgctgccccggcagctttgctctccagatgctggactagggtgggcctccttcagcctgggagggtctgagaataagatctagtgacccccatttatatcaaacctgataccttacacatgggcttctttctagattcttctttccatagctcatggagctgcagggaaagctttaagagc

SEQ ID NO: 294174 - DNA, 340 bp, Homo sapiens
gaccaactattagaaataatacagaagctaaagcatttccttttctgtaaaactgaaaagcaatgaaccagttgaattaaaacatcagaagtcatcaattgtgtccttttccccaacagaaatccagatggagacgtgagcccctggtgctatgtggcagagcacgaggatggtgtctactggaagtactgtgagatacctgcttgccagagtaagactgtaatacccaatgtgatggtttacaggactgtgaacactaagagtgcgtagagggaggcccctgccagaggtcaggtagttaggctggtggatttcatggagcatgtgaaaggagaagcca

SEQ ID NO: 294175 - DNA, 527 bp, Homo sapiens
aggtccttcccaagaccttgccccaccccatttcatagatacagtatctcgtgagatggtaggttgtttgcgttgttctaatctattggaaaaaatatttatctgcttgacagatcccatcgtgttcctgcttcaggggaccttagggattgtcatcaaccagggacttcgggggaaatctggagcattttttacaagccttccacttcaatttccatctttaagaagaaactcaagggtcagagtcaacaagatgaccgcaatccccttgtgagtgactaaaaaccccactgtgcctaggacttgaggtccctctttgagctcaaggctgccgtggtcaacctctcctgtggttcttctctgacagactcttcccctcctctccctctgcctcggcctcttcggggaaaccctcctcctacagactaggaagaggcaccctgctgccagggcaggcagagcctggattcctcctgcttcatcgattgcacttaggagagagactcaaagccctggggcccggccct

SEQ ID NO: 294176 - DNA, 2975 bp, Homo sapiens
cgcgcggggcggggcctctaccggcccgatggagcgcgcgggcgctactagccgcgggggccaagcccctggcttcttactgcggcttcatactgagggccgagccgaggcggcgcgggtgcaggagcaggacttacggcagtgggggctgacagggattcacctacgctcttaccagctggagggagtaaactggctcgcccagcgcttccattgtcagaatggctgtatcctgggagatgagatgggcctggggaagacctgccagactattgctctcttcatttatttggcaggaagattaaatgatgaagggccatttctgattctttgtcccttgtctgttttgagcaactggaaagaagaaatgcagagatttgctccaggtctttcctgtgtaacatatgcaggcgacaaggaggaaagagcctgccttcagcaagacctgaaacaggagtcacgttttcatgtgctactgactacctatgagatttgcttgaaagatgcatcatttctaaaatcattcccttggagtgttcttgttgtggatgaagctcacaggttgaaaaaccaaagctccctgctgcataagaccttgtcagagttctcagtagtcttcagtctcctgttgaccggaactcccatccagaacagcctccaagagctctactccctcctcagttttgtggagcctgatctcttttccaaggaagaggtgggagattttattcaacgctaccaggatattgagaaagaatctgagtcagcaagtgaactgcacaaactcttgcagccatttctgctgaggcgagtgaaagctgaggtagctacagagcttcccaagaagacagaagtagtgatataccatggcatgtcagcattgcagaagaaatactacaaggccattttgatgaaagacctagatgcatttgaaaatgagacggcaaagaaagttaaactacagaacattttgtcccagcttcgaaagtgtgtggatcacccatatttgtttgatggtgtggagccggagccttttgaagttggagaccacctgactgaggctagtgggaagcttcacctgctggataagctactagcattcctgtattctgggggccatcgggttttacttttctcccaaatgacccagatgttggatattctccaagactatatggattacagaggctacagctatgagcgtgtggatggttctgtgagaggagaagagagacacttggccattaagaactttggacagcagcccattttcgtttttctcctgagtactagggcaggtggagttggcatgaacttaacagcagcagatactgtgatttttgttgacagtgactttaatcctcagaatgacttgcaagcagctgccagggctcatcgcattggccaaaacaagtctgttaaagttattcggctgattggtcgagacactgtggaagaaatagtctataggaaagcagcctccaaactgcagctcaccaacatgatcatagaaggaggccattttactctgggagcccagaaacccgctgccgatgctgacctccagttgagtgagatactcaaatttggtttggataaactgctggcctctgaggggagcaccatggatgaaatagacctggagtccatcctgggagaaacaaaagatggccagtgggtctctgatgccttgcctgcagcagaaggagggagcagagatcaagaggaaggaaaaaatcatatgtacttatttgaaggtaaagattattctaaagagcccagtaaggaagacagaaaatcatttgaacaactggtaaaccttcagaaaacccttttggagaaagctagtcaagagggccgatcactccgaaataaaggcagtgttctcatcccaggccttgtggagggatctaccaaaaggaagcgggttctgagtccagaagagctggaggacagacagaagaaaagacaagaagcagctgccaagagaaggagactcatagaggagaagaagaggcaaaaggaagaggctgaacataagaaaaagatggcctggtgggaatccaacaattaccagtccttctgcctgccctctgaggagagcgagccagaggaccttgagaatggggaagagagctctgctgagctggattaccaagacccagatgctacttccctcaagtacgttagtggtgatgtcacccaccctcaggctggggccgaggatgctctcattgtgcactgcgtagatgactctggccactggggcagaggtggtttatttacagctctggaaaagcgatccgctgagccaagaaaaatatatgagctggctgggaaaatgaaagacctgagtttgggaggtgtccttttatttcctgttgatgataaagaatcaagaaacaaagggcaagatttgttggccttgattgtggctcagcatcgtgatcgttccaatgtcctgtctggcattaagatggcagccctagaagagggcctgaagaagatatttttagcagcaaaaaagaagaaagcaagtgttcatcttccacgtattggacatgccacgaaaggttttaactggtatggtactgagcgacttattcggaaacatctggctgcaagaggcatcccaacttacatatattattttcctagaagcaagtctgctgtccttcattcacagtcttcatcttcctcctcaagacagctggtgccttaagaattggcccagcctcagatcctgtctttagcaaccagctaatatttacccagaggtactgcaatagagtatttcaaaatggaatcaggatctggtgggcctcagaaattgtctcttttctgagtttcagtttggttctcctggatgttttgctctgttttggtacctgtaatatagggaaacacaactttttttgggaaagccctttgaccccagcttgctagttgcataataataaattttctgttcctaa

SEQ ID NO: 294177 - DNA, 2947 bp, Homo sapiens
cgcgcggggcggggcctctaccggcccgatggagcgcgcgggcgctactagccgcgggggccaagcccctggcttcttactgcggcttcatactgagggccgagccgaggcggcgcgggtgcaggagcaggacttacggcagtgggggctgacagggattcacctacgctcttaccagctggagggagtaaactggctcgcccagcgcttccattgtcagaatggctgtatcctgggagatgagatgggcctggggaagacctgccaggaagattaaatgatgaagggccatttctgattctttgtcccttgtctgttttgagcaactggaaagaagaaatgcagagatttgctccaggtctttcctgtgtaacatatgcaggcgacaaggaggaaagagcctgccttcagcaagacctgaaacaggagtcacgttttcatgtgctactgactacctatgagatttgcttgaaagatgcatcatttctaaaatcattcccttggagtgttcttgttgtggatgaagctcacaggttgaaaaaccaaagctccctgctgcataagaccttgtcagagttctcagtagtcttcagtctcctgttgaccggaactcccatccagaacagcctccaagagctctactccctcctcagttttgtggagcctgatctcttttccaaggaagaggtgggagattttattcaacgctaccaggatattgagaaagaatctgagtcagcaagtgaactgcacaaactcttgcagccatttctgctgaggcgagtgaaagctgaggtagctacagagcttcccaagaagacagaagtagtgatataccatggcatgtcagcattgcagaagaaatactacaaggccattttgatgaaagacctagatgcatttgaaaatgagacggcaaagaaagttaaactacagaacattttgtcccagcttcgaaagtgtgtggatcacccatatttgtttgatggtgtggagccggagccttttgaagttggagaccacctgactgaggctagtgggaagcttcacctgctggataagctactagcattcctgtattctgggggccatcgggttttacttttctcccaaatgacccagatgttggatattctccaagactatatggattacagaggctacagctatgagcgtgtggatggttctgtgagaggagaagagagacacttggccattaagaactttggacagcagcccattttcgtttttctcctgagtactagggcaggtggagttggcatgaacttaacagcagcagatactgtgatttttgttgacagtgactttaatcctcagaatgacttgcaagcagctgccagggctcatcgcattggccaaaacaagtctgttaaagttattcggctgattggtcgagacactgtggaagaaatagtctataggaaagcagcctccaaactgcagctcaccaacatgatcatagaaggaggccattttactctgggagcccagaaacccgctgccgatgctgacctccagttgagtgagatactcaaatttggtttggataaactgctggcctctgaggggagcaccatggatgaaatagacctggagtccatcctgggagaaacaaaagatggccagtgggtctctgatgccttgcctgcagcagaaggagggagcagagatcaagaggaaggaaaaaatcatatgtacttatttgaaggtaaagattattctaaagagcccagtaaggaagacagaaaatcatttgaacaactggtaaaccttcagaaaacccttttggagaaagctagtcaagagggccgatcactccgaaataaaggcagtgttctcatcccaggccttgtggagggatctaccaaaaggaagcgggttctgagtccagaagagctggaggacagacagaagaaaagacaagaagcagctgccaagagaaggagactcatagaggagaagaagaggcaaaaggaagaggctgaacataagaaaaagatggcctggtgggaatccaacaattaccagtccttctgcctgccctctgaggagagcgagccagaggaccttgagaatggggaagagagctctgctgagctggattaccaagacccagatgctacttccctcaagtacgttagtggtgatgtcacccaccctcaggctggggccgaggatgctctcattgtgcactgcgtagatgactctggccactggggcagaggtggtttatttacagctctggaaaagcgatccgctgagccaagaaaaatatatgagctggctgggaaaatgaaagacctgagtttgggaggtgtccttttatttcctgttgatgataaagaatcaagaaacaaagggcaagatttgttggccttgattgtggctcagcatcgtgatcgttccaatgtcctgtctggcattaagatggcagccctagaagagggcctgaagaagatatttttagcagcaaaaaagaagaaagcaagtgttcatcttccacgtattggacatgccacgaaaggttttaactggtatggtactgagcgacttattcggaaacatctggctgcaagaggcatcccaacttacatatattattttcctagaagcaagtctgctgtccttcattcacagtcttcatcttcctcctcaagacagctggtgccttaagaattggcccagcctcagatcctgtctttagcaaccagctaatatttacccagaggtactgcaatagagtatttcaaaatggaatcaggatctggtgggcctcagaaattgtctcttttctgagtttcagtttggttctcctggatgttttgctctgttttggtacctgtaatatagggaaacacaactttttttgggaaagccctttgaccccagcttgctagttgcataataataaattttctgttcctaa

SEQ ID NO: 294178 - DNA, 673 bp, Homo sapiens
agtgaacttggtgttctttatgttgctcctttctgttttacctcagacctgagtttgggaggtgtccttttatttcctgttgatgataaagaatcaagaaacaaagggcaagatttgttggccttgattgtggctcagcatcgtgatcgttccaatgtcctgtctggcattaagatggcagccctagaagagggcctgaagaagatatttttagcagcaaaaaagaagaaagcaagtgttcatcttccacgtattggacatgccacgaaaggttttaactggtatggtactgagcgacttattcggaaacatctggctgcaagaggcatcccaacttacatatattattttcctagaagcaagtctgctgtccttcattcacagtcttcatcttcctcctcaagacagctggtgccttaagaattggcccagcctcagatcctgtctttagcaaccagctaatatttacccagaggtactgcaatagagtatttcaaaatggaatcaggatctggtgggcctcagaaattgtctcttttctgagtttcagtttggttctcctggatgttttgctctgttttggtacctgtaatatagggaaacacaactttttttgggaaagccctttgaccccagcttgctagttgcataataataaattttctgttcctaa

SEQ ID NO: 294179 - DNA, 586 bp, Homo sapiens
ctacaattcttcccccggaatatttttgacattataattatgggctttgagggagatagtcaataataattttctcccatgtgtattttatacccatcaatcaatttttgatgagtgaagacatgtgttcttctcttcataatagcaagtgttcatcttccacgtattggacatgccacgaaaggttttaactggtatggtactgagcgacttattcggaaacatctggctgcaagaggcatcccaacttacatatattattttcctagaagcaagtctgctgtccttcattcacagtcttcatcttcctcctcaagacagctggtgccttaagaattggcccagcctcagatcctgtctttagcaaccagctaatatttacccagaggtactgcaatagagtatttcaaaatggaatcaggatctggtgggcctcagaaattgtctcttttctgagtttcagtttggttctcctggatgttttgctctgttttggtacctgtaatatagggaaacacaactttttttgggaaagccctttgaccccagcttgctagttgcataataataaattttctgttcctaa

SEQ ID NO: 294180 - DNA, 1285 bp, Homo sapiens
ggtggtggtcccagtgtagtattgtacagtcaaaaaagtgtgaattttagagtcaggagatattccagaatcatttcactcttggctttctcatttacctggtttagttacccaacctttcaacttcaacttccttatccatatgatgggacaatatctgtcttatcctctgcacaaggtttttaagagggtgaaatgaagcaacattgataagacaaacaaatcctttgagaaaaagcaaaacttcaagcttgttcccttgcttgacctttgtactttttacttcatctgcctaaaaccctttcttcccaaataaccacatcaagtgttgttcaaatgtctgtttctcagagaggtcttctgtgattacctcatataaaacaggccccatcccccctgttattctctgtcccttctcccatattttcctttatcacacctgtcccacctgacacattacctatgtatttgtttatttgactgttgctttgcattaaaaaatacacttatggcagcaggggttttttcttgttcgctgctgtgactgtggtgcctagaacgatgccttacgtgtaatacatgctaccaaacgtttgtagtgtgaatgaatgactataaatgctaagatactaagcagctttgttagtaccagcttgaataagtcacttaacctttcctgtgtactgtttcataaccttgcctatgtgctgttgcataacctattgcttctactcactctgtaatgttccatctactctccgtccttccgcagtcatttgccaggaatcacagatgcaccacagagattttgctcattgagaaccctaatttttgagatgctttcctgttatcatggccccagctatatcttccagaaaacataaacatatttgggaagtccaacctgtgatattcctaggagataagatattttgtttcttccctttgaaaaatcattcttccacaagtcccttttgtgtgcctttgtttttctaaattgtgcactggacttcacctcctatagatgaaaattttctctttcttcaaacagatgactctggccactggggcagaggtggtttatttacagctctggaaaagcgatccgctgagccaagaaaaatatatgagctggctgggaaaatgaaaggtaagaagcaaagcagagggaaaggttaagggtggaataagagagaagaggacacctaagactgtatcgtgagggttacacagcactagataaggaattagaataaccagttgggaactgaattctgtcataaat

SEQ ID NO: 294181 - DNA, 3052 bp, Homo sapiens
cgcgcggggcggggcctctaccggcccgatggagcgcgcgggcgctactagccgcgggggccaagcccctggcttcttactgcggcttcatactgagggccgagccgaggcggcgcgggtgcaggagcaggacttacggcagtgggggctgacagggattcacctacgctcttaccagctggagggagtaaactggctcgcccagcgcttccattgtcagaatggctgtatcctgggagatgagatgggcctggggaagacctgccagactattgctctcttcatttatttggcaggaagattaaatgatgaagggccatttctgattctttgtcccttgtctgttttgagcaactggaaagaagaaatgcagagatttgctccaggtctttcctgtgtaacatatgcaggcgacaaggaggaaagagcctgccttcagcaagacctgaaacaggagtcacgttttcatgtgctactgactacctatgagatttgcttgaaagatgcatcatttctaaaatcattcccttggagtgttcttgttgtggatgaagctcacaggttgaaaaaccaaagctccctgctgcataagaccttgtcagagttctcagtagtcttcagtctcctgttgaccggaactcccatccagaacagcctccaagagctctactccctcctcagttttgtggagcctgatctcttttccaaggaagaggtgggagattttattcaacgctaccaggatattgagaaagaatctgagtcagcaagtgaactgcacaaactcttgcagccatttctgctgaggcgagtgaaagctgaggtagctacagagcttcccaagaagacagaagtagtgatataccatggcatgtcagcattgcagaagaaatactacaaggccattttgatgaaagacctagatgcatttgaaaatgagacggcaaagaaagttaaactacagaacattttgtcccagcttcgaaagtgtgtggatcacccatatttgtttgatggtgtggagccggagccttttgaagttggagaccacctgactgaggctagtgggaagcttcacctgctggataagctactagcattcctgtattctgggggccatcgggttttacttttctcccaaatgacccagatgttggatattctccaagactatatggattacagaggctacagctatgagcgtgtggatggttctgtgagaggagaagagagacacttggccattaagaactttggacagcagcccattttcgtttttctcctgagtactagggcaggtggagttggcatgaacttaacagcagcagatactgtgatttttgttgacagtgactttaatcctcagaatgacttgcaagcagctgccagggctcatcgcattggccaaaacaagtctgttaaagttattcggctgattggtcgagacactgtggaagaaatagtctataggaaagcagcctccaaactgcagctcaccaacatgatcatagaaggaggccattttactctgggagcccagaaacccgctgccgatgctgacctccagttgagtgagatactcaaatttggtttggataaactgctggcctctgaggggagcaccatggatgaaatagacctggagtccatcctgggagaaacaaaagatggccagtgggtctctgatgccttgcctgcagcagaaggagggagcagagatcaagaggaaggaaaaaatcatatgtacttatttgaaggtaaagattattctaaagagcccagtaaggaagacagaaaatcatttgaacaactggtaaaccttcagaaaacccttttggagaaagctagtcaagagggccgatcactccgaaataaaggcagtgttctcatcccaggccttgtggagggatctaccaaaaggaagcgggttctgagtccagaagagctggaggacagacagaagaaaagacaagaagcagctgccaagagaaggagactcatagaggagaagaagaggcaaaaggaagaggctgaacataagaaaaagatggcctggtgggaatccaacaattaccagtccttctgcctgccctctgaggagagcgagccagaggaccttgagaatggggaagagagctctgctgagctggattaccaagacccagatgctacttccctcaagtacgttagtggtgatgtcacccaccctcaggctggggccgaggatgctctcattgtgcactgcgtagatgactctggccactggggcagaggtggtttatttacagctctggaaaagcgatccgctgagccaagaaaaatatatgagctggctgggaaaatgaaagacctgagtttgggaggtgtccttttatttcctgttgatgataaagaatcaagaaacaaagggcaagatttgttggccttgattgtggctcagcatcgtgatcgttccaatgtcctgtctggcattaagatggcagccctagaagagggcctgaagaagatatttttagcagcaaaaaagaagaaagcaagtgttcatcttccacgtattggacatgccacgaaaggttttaactggtatggtactgagcgacttattcggaaacatctggctgcaagaggcatcccaacttacatatattattttcctagaagcaagtctgctgtccttcattcacagtcttcatcttcctcctcaagacagctggtgccttaagaattggcccagcctcagatcctgtctttagcaaccagctaatatttacccagaggtactgcaatagagtatttcaaaatggaatcaggatctggtgggcctcagaaattgtctcttttctgagtttcagtttggttctcctggatgttttgctctgttttggtacctgtaatatagggaaacacaactttttttgggaaagccctttgaccccagcttgctagttgcataataataaattttctgttcctaaaaaaaagacagaacaaaacagaaaaaaaaaagggggggggcacaaagataccgcaggggacgaataagagacacgaa

SEQ ID NO: 294182 - DNA, 3312 bp, Homo sapiens
cgcgcggggcggggcctctaccggcccgatggagcgcgcgggcgctactagccgcgggggccaagcccctggcttcttactgcggcttcatactgagggccgagccgaggcggcgcgggtgcaggagcaggacttacggcagtgggggctgacagggattcacctacgctcttaccagctggagggagtaaactggctcgcccagcgcttccattgtcagaatggctgtatcctgggagatgagatgggcctggggaagacctgccagactattgctctcttcatttatttggcaggaagattaaatgatgaagggccatttctgattctttgtcccttgtctgttttgagcaactggaaagaagaaatgcagagatttgctccaggtctttcctgtgtaacatatgcaggcgacaaggaggaaagagcctgccttcagcaagacctgaaacaggagtcacgttttcatgtgctactgactacctatgagatttgcttgaaagatgcatcatttctaaaatcattcccttggagtgttcttgttgtggatgaagctcacaggttgaaaaaccaaagctccctgctgcataagaccttgtcagagttctcagtagtcttcagtctcctgttgaccggaactcccatccagaacagcctccaagagctctactccctcctcagttttgtggagcctgatctcttttccaaggaagaggtgggagattttattcaacgctaccaggatattgagaaagaatctgagtcagcaagtgaactgcacaaactcttgcagccatttctgctgaggcgagtgaaagctgaggtagctacagagcttcccaagaagacagaagtagtgatataccatggcatgtcagcattgcagaagaaatactacaaggccattttgatgaaagacctagatgcatttgaaaatgagacggcaaagaaagttaaactacagaacattttgtcccagcttcgaaagtgtgtggatcacccatatttgtttgatggtgtggagccggagccttttgaagttggagaccacctgactgaggctagtgggaagcttcacctgctggataagctactagcattcctgtattctgggggccatcgggttttacttttctcccaaatgacccagatgttggatattctccaagactatatggattacagaggctacagctatgagcgtgtggatggttctgtgagaggagaagagagacacttggccattaagaactttggacagcagcccattttcgtttttctcctgagtactagggcaggtggagttggcatgaacttaacagcagcagatactgtgatttttgttgacagtgactttaatcctcagaatgacttgcaagcagctgccagggctcatcgcattggccaaaacaagtctgttaaagttattcggctgattggtcgagacactgtggaagaaatagtctataggaaagcagcctccaaactgcagctcaccaacatgatcatagaaggaggccattttactctgggagcccagaaacccgctgccgatgctgacctccagttgagtgagatactcaaatttggtttggataaactgctggcctctgaggggagcaccatggatgaaatagacctggagtccatcctgggagaaacaaaagatggccagtgggtctctgatgccttgcctgcagcagaaggagggagcagagatcaagaggaaggaaaaaatcatatgtacttatttgaaggtaaagattattctaaagagcccagtaaggaagacagaaaatcatttgaacaactggtaaaccttcagaaaacccttttggagaaagctagtcaagagggccgatcactccgaaataaaggcagtgttctcatcccaggccttgtggagggatctaccaaaaggaagcgggttctgagtccagaagagctggaggacagacagaagaaaagacaagaagcagctgccaagagaaggagactcatagaggagaagaagaggcaaaaggaagaggctgaacataagaaaaagatggcctggtgggaatccaacaattaccagtccttctgcctgccctctgaggagagcgagccagaggaccttgagaatggggaagagagctctgctgagctggattaccaagacccagatgctacttccctcaagtacgttagtggtgatgtcacccaccctcaggctggggccgaggatgctctcattgtgcactgcgtagatgactctggccactggggcagaggtggtttatttacagctctggaaaagcgatccgctgagccaagaaaaatatatgagctggctgggaaaatgaaagacctgagtttgggaggtgtccttttatttcctgttgatgataaagaatcaagaaacaaagggcaagatttgttggccttgattgtggctcagcatcgtgatcgttccaatgtcctgtctggcattaagatggcagccctagaagagggcctgaagaagatatttttagcagcaaaaaagaagaaagcaagtgttcatcttccacgtattggacatgccacgaaaggttttaactggtatggtactgagcgacttattcggaaacatctggctgcaagaggcatcccaacttacatatattattttcctagaagcaagtctgctgtccttcattcacagtcttcatcttcctcctcaagacagctggtgccttaagaattggcccagcctcagatcctgtctttagcaaccagctaatatttacccagaggtactgcaatagagtatttcaaaatggaatcaggatctggtgggcctcagaaattgtctcttttctgagtttcagtttggttctcctggatgttttgctctgttttggtacctgtaatatagggaaacacaactttttttgggaaagccctttgaccccagcttgctagttgcataataataaattttctgttcctaaaaaaaaaaacaaacaaacaaaaaaaaacctgtttggggcggcacgggaccataaaaaaagtcttcttagacccccatccggtatgaggagcccgcggggccccaagagagttagatggagacagctggccccaacaaacgagctcccccgagagagaaacccgcgggccaggaaccaggaggcgagggggaatctcgtcccccattaataaaaaacgcgccgggggcacaccgagacggtgtctagaaacacaactcccgagaagagaagaccgagagggacgcgaacgcggaacctataaaacgggagagccacggcagctactaaaaaaatgcga

SEQ ID NO: 294183 - DNA, 2363 bp, Homo sapiens
cgcgcggggcggggcctctaccggcccgatggagcgcgcgggcgctactagccgcgggggccaagcccctggcttcttactgcggcttcatactgagggccgagccgaggcggcgcgggtgcaggagcaggacttacggcagtgggggctgacagcaagtgaactgcacaaactcttgcagccatttctgctgaggcgagtgaaagctgaggtagctacagagcttcccaagaagacagaagtagtgatataccatggcatgtcagcattgcagaagaaatactacaaggccattttgatgaaagacctagatgcatttgaaaatgagacggcaaagaaagttaaactacagaacattttgtcccagcttcgaaagtgtgtggatcacccatatttgtttgatggtgtggagccggagccttttgaagttggagaccacctgactgaggctagtgggaagcttcacctgctggataagctactagcattcctgtattctgggggccatcgggttttacttttctcccaaatgacccagatgttggatattctccaagactatatggattacagaggctacagctatgagcgtgtggatggttctgtgagaggagaagagagacacttggccattaagaactttggacagcagcccattttcgtttttctcctgagtactagggcaggtggagttggcatgaacttaacagcagcagatactgtgatttttgttgacagtgactttaatcctcagaatgacttgcaagcagctgccagggctcatcgcattggccaaaacaagtctgttaaagttattcggctgattggtcgagacactgtggaagaaatagtctataggaaagcagcctccaaactgcagctcaccaacatgatcatagaaggaggccattttactctgggagcccagaaacccgctgccgatgctgacctccagttgagtgagatactcaaatttggtttggataaactgctggcctctgaggggagcaccatggatgaaatagacctggagtccatcctgggagaaacaaaagatggccagtgggtctctgatgccttgcctgcagcagaaggagggagcagagatcaagaggaaggaaaaaatcatatgtacttatttgaaggtaaagattattctaaagagcccagtaaggaagacagaaaatcatttgaacaactggtaaaccttcagaaaacccttttggagaaagctagtcaagagggccgatcactccgaaataaaggcagtgttctcatcccaggccttgtggagggatctaccaaaaggaagcgggttctgagtccagaagagctggaggacagacagaagaaaagacaagaagcagctgccaagagaaggagactcatagaggagaagaagaggcaaaaggaagaggctgaacataagaaaaagatggcctggtgggaatccaacaattaccagtccttctgcctgccctctgaggagagcgagccagaggaccttgagaatggggaagagagctctgctgagctggattaccaagacccagatgctacttccctcaagtacgttagtggtgatgtcacccaccctcaggctggggccgaggatgctctcattgtgcactgcgtagatgactctggccactggggcagaggtggtttatttacagctctggaaaagcgatccgctgagccaagaaaaatatatgagctggctgggaaaatgaaagacctgagtttgggaggtgtccttttatttcctgttgatgataaagaatcaagaaacaaagggcaagatttgttggccttgattgtggctcagcatcgtgatcgttccaatgtcctgtctggcattaagatggcagccctagaagagggcctgaagaagatatttttagcagcaaaaaagaagaaagcaagtgttcatcttccacgtattggacatgccacgaaaggttttaactggtatggtactgagcgacttattcggaaacatctggctgcaagaggcatcccaacttacatatattattttcctagaagcaagtctgctgtccttcattcacagtcttcatcttcctcctcaagacagctggtgccttaagaattggcccagcctcagatcctgtctttagcaaccagctaatatttacccagaggtactgcaatagagtatttcaaaatggaatcaggatctggtgggcctcagaaattgtctcttttctgagtttcagtttggttctcctggatgttttgctctgttttggtacctgtaatatagggaaacacaactttttttgggaaagccctttgaccccagcttgctagttgcataataataaattttctgttcctaa

SEQ ID NO: 294184 - DNA, 2050 bp, Homo sapiens
gaggacacttcacttgggaaagaagagagcgcgaaccgaattgtagaagatgatgcaagcataagtagctgtaataaattactaacttcaggtgtggagccggagccttttgaagttggagaccacctgactgaggctagtgggaagcttcacctgctggataagctactagcattcctgtattctgggggccatcgggttttacttttctcccaaatgacccagatgttggatattctccaagactatatggattacagaggctacagctatgagcgtgtggatggttctgtgagaggagaagagagacacttggccattaagaactttggacagcagcccattttcgtttttctcctgagtactagggcaggtggagttggcatgaacttaacagcagcagatactgtgatttttgttgacagtgactttaatcctcagaatgacttgcaagcagctgccagggctcatcgcattggccaaaacaagtctgttaaagttattcggctgattggtcgagacactgtggaagaaatagtctataggaaagcagcctccaaactgcagctcaccaacatgatcatagaaggaggccattttactctgggagcccagaaacccgctgccgatgctgacctccagttgagtgagatactcaaatttggtttggataaactgctggcctctgaggggagcaccatggatgaaatagacctggagtccatcctgggagaaacaaaagatggccagtgggtctctgatgccttgcctgcagcagaaggagggagcagagatcaagaggaaggaaaaaatcatatgtacttatttgaaggtaaagattattctaaagagcccagtaaggaagacagaaaatcatttgaacaactggtaaaccttcagaaaacccttttggagaaagctagtcaagagggccgatcactccgaaataaaggcagtgttctcatcccaggccttgtggagggatctaccaaaaggaagcgggttctgagtccagaagagctggaggacagacagaagaaaagacaagaagcagctgccaagagaaggagactcatagaggagaagaagaggcaaaaggaagaggctgaacataagaaaaagatggcctggtgggaatccaacaattaccagtccttctgcctgccctctgaggagagcgagccagaggaccttgagaatggggaagagagctctgctgagctggattaccaagacccagatgctacttccctcaagtacgttagtggtgatgtcacccaccctcaggctggggccgaggatgctctcattgtgcactgcgtagatgactctggccactggggcagaggtggtttatttacagctctggaaaagcgatccgctgagccaagaaaaatatatgagctggctgggaaaatgaaagacctgagtttgggaggtgtccttttatttcctgttgatgataaagaatcaagaaacaaagggcaagatttgttggccttgattgtggctcagcatcgtgatcgttccaatgtcctgtctggcattaagatggcagccctagaagagggcctgaagaagatatttttagcagcaaaaaagaagaaagcaagtgttcatcttccacgtattggacatgccacgaaaggttttaactggtatggtactgagcgacttattcggaaacatctggctgcaagaggcatcccaacttacatatattattttcctagaagcaagtctgctgtccttcattcacagtcttcatcttcctcctcaagacagctggtgccttaagaattggcccagcctcagatcctgtctttagcaaccagctaatatttacccagaggtactgcaatagagtatttcaaaatggaatcaggatctggtgggcctcagaaattgtctcttttctgagtttcagtttggttctcctggatgttttgctctgttttggtacctgtaatatagggaaacacaactttttttgggaaagccctttgaccccagcttgctagttgcataataataaattttctgttcctaa

SEQ ID NO: 294185 - DNA, 2092 bp, Homo sapiens
acagaacattttgtcccagcttcgaatatgggtgatccacacactttcgaagctgggacaaaatgttctgtagtttaactttctttgccgtctcattttcgaaagtgtgtggatcacccatatttgtttgatggtgtggagccggagccttttgaagttggagaccacctgactgaggctagtgggaagcttcacctgctggataagctactagcattcctgtattctgggggccatcgggttttacttttctcccaaatgacccagatgttggatattctccaagactatatggattacagaggctacagctatgagcgtgtggatggttctgtgagaggagaagagagacacttggccattaagaactttggacagcagcccattttcgtttttctcctgagtactagggcaggtggagttggcatgaacttaacagcagcagatactgtgatttttgttgacagtgactttaatcctcagaatgacttgcaagcagctgccagggctcatcgcattggccaaaacaagtctgttaaagttattcggctgattggtcgagacactgtggaagaaatagtctataggaaagcagcctccaaactgcagctcaccaacatgatcatagaaggaggccattttactctgggagcccagaaacccgctgccgatgctgacctccagttgagtgagatactcaaatttggtttggataaactgctggcctctgaggggagcaccatggatgaaatagacctggagtccatcctgggagaaacaaaagatggccagtgggtctctgatgccttgcctgcagcagaaggagggagcagagatcaagaggaaggaaaaaatcatatgtacttatttgaaggtaaagattattctaaagagcccagtaaggaagacagaaaatcatttgaacaactggtaaaccttcagaaaacccttttggagaaagctagtcaagagggccgatcactccgaaataaaggcagtgttctcatcccaggccttgtggagggatctaccaaaaggaagcgggttctgagtccagaagagctggaggacagacagaagaaaagacaagaagcagctgccaagagaaggagactcatagaggagaagaagaggcaaaaggaagaggctgaacataagaaaaagatggcctggtgggaatccaacaattaccagtccttctgcctgccctctgaggagagcgagccagaggaccttgagaatggggaagagagctctgctgagctggattaccaagacccagatgctacttccctcaagtacgttagtggtgatgtcacccaccctcaggctggggccgaggatgctctcattgtgcactgcgtagatgactctggccactggggcagaggtggtttatttacagctctggaaaagcgatccgctgagccaagaaaaatatatgagctggctgggaaaatgaaagacctgagtttgggaggtgtccttttatttcctgttgatgataaagaatcaagaaacaaagggcaagatttgttggccttgattgtggctcagcatcgtgatcgttccaatgtcctgtctggcattaagatggcagccctagaagagggcctgaagaagatatttttagcagcaaaaaagaagaaagcaagtgttcatcttccacgtattggacatgccacgaaaggttttaactggtatggtactgagcgacttattcggaaacatctggctgcaagaggcatcccaacttacatatattattttcctagaagcaagtctgctgtccttcattcacagtcttcatcttcctcctcaagacagctggtgccttaagaattggcccagcctcagatcctgtctttagcaaccagctaatatttacccagaggtactgcaatagagtatttcaaaatggaatcaggatctggtgggcctcagaaattgtctcttttctgagtttcagtttggttctcctggatgttttgctctgttttggtacctgtaatatagggaaacacaactttttttgggaaagccctttgaccccagcttgctagttgcataataataaattttctgttcctaa

SEQ ID NO: 294186 - DNA, 2377 bp, Homo sapiens
  misc_feature (16)..(16): n is a, c, g, or t
  misc_feature (30)..(30): n is a, c, g, or t
gatctcccaggaagantgggagaacaacgntaccggatattgagaagatctgagtcagcagcaagtgaactgcacaaactcttgcagccatttctgctgaggcgagtgaaagctgaggtagctacagagcttcccaagaagacagaagtagtgatataccatggcatgtcagcattgcagaagaaatactacaaggccattttgatgaaagacctagatgcatttgaaaatgagacggcaaagaaagttaaactacagaacattttgtcccagcttcgaaagtgtgtggatcacccatatttgtttgatggtgtggagccggagccttttgaagttggagaccacctgactgaggctagtgggaagcttcacctgctggataagctactagcattcctgtattctgggggccatcgggttttacttttctcccaaatgacccagatgttggatattctccaagactatatggattacagaggtgacaccttttggccactacattacctaaggctctgttagacttaacagtccagataggtccatgaagaataatatgggatatgagaatattacaaaggaaagcagggctacagctatgagcgtgtggatggttctgtgagaggagaagagagacacttggccattaagaactttggacagcagcccattttcgtttttctcctgagtactagggcaggtggagttggcatgaacttaacagcagcagatactgtgatttttgttgacagtgactttaatcctcagaatgacttgcaagcagctgccagggctcatcgcattggccaaaacaagtctgttaaagttattcggctgattggtcgagacactgtggaagaaatagtctataggaaagcagcctccaaactgcagctcaccaacatgatcatagaaggaggccattttactctgggagcccagaaacccgctgccgatgctgacctccagttgagtgagatactcaaatttggtttggataaactgctggcctctgaggggagcaccatggatgaaatagacctggagtccatcctgggagaaacaaaagatggccagtgggtctctgatgccttgcctgcagcagaaggagggagcagagatcaagaggaaggaaaaaatcatatgtacttatttgaaggtaaagattattctaaagagcccagtaaggaagacagaaaatcatttgaacaactggtaaaccttcagaaaacccttttggagaaagctagtcaagagggccgatcactccgaaataaaggcagtgttctcatcccaggccttgtggagggatctaccaaaaggaagcgggttctgagtccagaagagctggaggacagacagaagaaaagacaagaagcagctgccaagagaaggagactcatagaggagaagaagaggcaaaaggaagaggctgaacataagaaaaagatggcctggtgggaatccaacaattaccagtccttctgcctgccctctgaggagagcgagccagaggaccttgagaatggggaagagagctctgctgagctggattaccaagacccagatgctacttccctcaagtacgttagtggtgatgtcacccaccctcaggctggggccgaggatgctctcattgtgcactgcgtagatgactctggccactggggcagaggtggtttatttacagctctggaaaagcgatccgctgagccaagaaaaatatatgagctggctgggaaaatgaaagacctgagtttgggaggtgtccttttatttcctgttgatgataaagaatcaagaaacaaagggcaagatttgttggccttgattgtggctcagcatcgtgatcgttccaatgtcctgtctggcattaagatggcagccctagaagagggcctgaagaagatatttttagcagcaaaaaagaagaaagcaagtgttcatcttccacgtattggacatgccacgaaaggttttaactggtatggtactgagcgacttattcggaaacatctggctgcaagaggcatcccaacttacatatattattttcctagaagcaagtctgctgtccttcattcacagtcttcatcttcctcctcaagacagctggtgccttaagaattggcccagcctcagatcctgtctttagcaaccagctaatatttacccagaggtactgcaatagagtatttcaaaatggaatcaggatctggtgggcctcagaaattgtctcttttctgagtttcagtttggttctcctggatgttttgctctgttttggtacctgtaatatagggaaacacaactttttttgggaaagccctttgaccccagcttgctagttgcataataataaattttctgttcctaa

SEQ ID NO: 294187 - DNA, 2004 bp, Homo sapiens
acttggcagtgtttccttttctttttcttgccaggggccatcgggttttacttttctcccaaatgacccagatgttggatattctccaagactatatggattacagaggtgacaccttttggccactacattacctaaggctctgttagacttaacagtccagataggtccatgaagaataatatgggatatgagaatattacaaaggaaagcagggctacagctatgagcgtgtggatggttctgtgagaggagaagagagacacttggccattaagaactttggacagcagcccattttcgtttttctcctgagtactagggcaggtggagttggcatgaacttaacagcagcagatactgtgatttttgttgacagtgactttaatcctcagaatgacttgcaagcagctgccagggctcatcgcattggccaaaacaagtctgttaaagttattcggctgattggtcgagacactgtggaagaaatagtctataggaaagcagcctccaaactgcagctcaccaacatgatcatagaaggaggccattttactctgggagcccagaaacccgctgccgatgctgacctccagttgagtgagatactcaaatttggtttggataaactgctggcctctgaggggagcaccatggatgaaatagacctggagtccatcctgggagaaacaaaagatggccagtgggtctctgatgccttgcctgcagcagaaggagggagcagagatcaagaggaaggaaaaaatcatatgtacttatttgaaggtaaagattattctaaagagcccagtaaggaagacagaaaatcatttgaacaactggtaaaccttcagaaaacccttttggagaaagctagtcaagagggccgatcactccgaaataaaggcagtgttctcatcccaggccttgtggagggatctaccaaaaggaagcgggttctgagtccagaagagctggaggacagacagaagaaaagacaagaagcagctgccaagagaaggagactcatagaggagaagaagaggcaaaaggaagaggctgaacataagaaaaagatggcctggtgggaatccaacaattaccagtccttctgcctgccctctgaggagagcgagccagaggaccttgagaatggggaagagagctctgctgagctggattaccaagacccagatgctacttccctcaagtacgttagtggtgatgtcacccaccctcaggctggggccgaggatgctctcattgtgcactgcgtagatgactctggccactggggcagaggtggtttatttacagctctggaaaagcgatccgctgagccaagaaaaatatatgagctggctgggaaaatgaaagacctgagtttgggaggtgtccttttatttcctgttgatgataaagaatcaagaaacaaagggcaagatttgttggccttgattgtggctcagcatcgtgatcgttccaatgtcctgtctggcattaagatggcagccctagaagagggcctgaagaagatatttttagcagcaaaaaagaagaaagcaagtgttcatcttccacgtattggacatgccacgaaaggttttaactggtatggtactgagcgacttattcggaaacatctggctgcaagaggcatcccaacttacatatattattttcctagaagcaagtctgctgtccttcattcacagtcttcatcttcctcctcaagacagctggtgccttaagaattggcccagcctcagatcctgtctttagcaaccagctaatatttacccagaggtactgcaatagagtatttcaaaatggaatcaggatctggtgggcctcagaaattgtctcttttctgagtttcagtttggttctcctggatgttttgctctgttttggtacctgtaatatagggaaacacaactttttttgggaaagccctttgaccccagcttgctagttgcataataataaattttctgttcctaa

SEQ ID NO: 294188 - DNA, 2660 bp, Homo sapiens
cgcgcggggcggggcctctaccggcccgatggagcgcgcgggcgctactagccgcgggggccaagcccctggcttcttactgcggcttcatactgagggccgagccgaggcggcgcgggtgcaggagcaggacttacggcagtgggggctgacagggattcacctacgctcttaccagctggagggagtaaactggctcgcccagcgcttccattgtcagaatggctgtatcctgggagatgagatgggcctggggaagacctgccagactattgctctcttcatttatttggcaggaagattaaatgatgaagggccatttctgattctttgtcccttgtctgttttgagcaactggaaagaagaaatgcagagatttgctccaggtctttcctgtgtaacatatgcaggcgacaaggaggaaagagcctgccttcagcaagacctgaaacaggagtcacgttttcatgtgctactgactacctatgagatttgcttgaaagatgcatcatttctaaaatcattcccttggagtgttcttgttgtggatgaagctcacaggttgaaaaaccaaagctccctgctgcataagaccttgtcagagttctcagtagtcttcagtctcctgttgaccggaactcccatccagaacagcctccaagagctctactccctcctcagttttgtggagcctgatctcttttccaaggaagaggtgggagattttattcaacgctaccaggatattgagaaagaatctgagtcagcaagtgaactgcacaaactcttgcagccatttctgctgaggcgagtgaaagctgaggtagctacagagcttcccaagaagacagaagtagtgatataccatggcatgtcagcattgcagaagaaatactacaaggccattttgatgaaagacctagatgcatttgaaaatgagacggcaaagaaagttaaactacagaacattttgtcccagcttcgaaagtgtgtggatcacccatatttgtttgatggtgtggagccggagccttttgaagttggagaccacctgactgaggctagtgggaagcttcacctgctggataagctactagcattcctgtattctgggggccatcgggttttacttttctcccaaatgacccagatgttggatattctccaagactatatggattacagaggctacagctatgagcgtgtggatggttctgtgagaggagaagagagacacttggccattaagaactttggacagcagcccattttcgtttttctcctgagtactagggcaggtggagttggcatgaacttaacagcagcagatactgtgatttttgttgacagtgactttaatcctcagaatgacttgcaagcagctgccagggctcatcgcattggccaaaacaagtctgttaaagttattcggctgattggtcgagacactgtggaagaaatagtctataggaaagcagcctccaaactgcagctcaccaacatgatcatagaaggaggccattttactctgggagcccagaaacccgctgccgatgctgacctccaggttctcatcccaggccttgtggagggatctaccaaaaggaagcgggttctgagtccagaagagctggaggacagacagaagaaaagacaagaagcagctgccaagagaaggagactcatagaggagaagaagaggcaaaaggaagaggctgaacataagaaaaagatggcctggtgggaatccaacaattaccagtccttctgcctgccctctgaggagagcgagccagaggaccttgagaatggggaagagagctctgctgagctggattaccaagacccagatgctacttccctcaagtacgttagtggtgatgtcacccaccctcaggctggggccgaggatgctctcattgtgcactgcgtagatgactctggccactggggcagaggtggtttatttacagctctggaaaagcgatccgctgagccaagaaaaatatatgagctggctgggaaaatgaaagacctgagtttgggaggtgtccttttatttcctgttgatgataaagaatcaagaaacaaagggcaagatttgttggccttgattgtggctcagcatcgtgatcgttccaatgtcctgtctggcattaagatggcagccctagaagagggcctgaagaagatatttttagcagcaaaaaagaagaaagcaagtgttcatcttccacgtattggacatgccacgaaaggttttaactggtatggtactgagcgacttattcggaaacatctggctgcaagaggcatcccaacttacatatattattttcctagaagcaagtctgctgtccttcattcacagtcttcatcttcctcctcaagacagctggtgccttaagaattggcccagcctcagatcctgtctttagcaaccagctaatatttacccagaggtactgcaatagagtatttcaaaatggaatcaggatctggtgggcctcagaaattgtctcttttctgagtttcagtttggttctcctggatgttttgctctgttttggtacctgtaatatagggaaacacaactttttttgggaaagccctttgaccccagcttgctagttgcataataataaattttctgttcctaa

SEQ ID NO: 294189 - DNA, 1777 bp, Homo sapiens
ggtggtggtcccagtgtagtattgtacagtcaaaaaagtgtgaattttagagtcaggagatattccagaatcatttcactcttggctttctcatttacctggtttagttacccaacctttcaacttcaacttccttatccatatgatgggacaatatctgtcttatcctctgcacaaggtttttaagagggtgaaatgaagcaacattgataagacaaacaaatcctttgagaaaaagcaaaacttcaagcttgttcccttgcttgacctttgtactttttacttcatctgcctaaaaccctttcttcccaaataaccacatcaagtgttgttcaaatgtctgtttctcagagaggtcttctgtgattacctcatataaaacaggccccatcccccctgttattctctgtcccttctcccatattttcctttatcacacctgtcccacctgacacattacctatgtatttgtttatttgactgttgctttgcattaaaaaatacacttatggcagcaggggttttttcttgttcgctgctgtgactgtggtgcctagaacgatgccttacgtgtaatacatgctaccaaacgtttgtagtgtgaatgaatgactataaatgctaagatactaagcagctttgttagtaccagcttgaataagtcacttaacctttcctgtgtactgtttcataaccttgcctatgtgctgttgcataacctattgcttctactcactctgtaatgttccatctactctccgtccttccgcagtcatttgccaggaatcacagatgcaccacagagattttgctcattgagaaccctaatttttgagatgctttcctgttatcatggccccagctatatcttccagaaaacataaacatatttgggaagtccaacctgtgatattcctaggagataagatattttgtttcttccctttgaaaaatcattcttccacaagtcccttttgtgtgcctttgtttttctaaattgtgcactggacttcacctcctatagatgaaaattttctctttcttcaaacagatgactctggccactggggcagaggtggtttatttacagctctggaaaagcgatccgctgagccaagaaaaatatatgagctggctgggaaaatgaaagacctgagtttgggaggtgtccttttatttcctgttgatgataaagaatcaagaaacaaagggcaagatttgttggccttgattgtggctcagcatcgtgatcgttccaatgtcctgtctggcattaagatggcagccctagaagagggcctgaagaagatatttttagcagcaaaaaagaagaaagcaagtgttcatcttccacgtattggacatgccacgaaaggttttaactggtatggtactgagcgacttattcggaaacatctggctgcaagaggcatcccaacttacatatattattttcctagaagcaagtctgctgtccttcattcacagtcttcatcttcctcctcaagacagctggtgccttaagaattggcccagcctcagatcctgtctttagcaaccagctaatatttacccagaggtactgcaatagagtatttcaaaatggaatcaggatctggtgggcctcagaaattgtctcttttctgagtttcagtttggttctcctggatgttttgctctgttttggtacctgtaatatagggaaacacaactttttttgggaaagccctttgaccccagcttgctagttgcataataataaattttctgttcctaa

SEQ ID NO: 294190 - DNA, 1079 bp, Homo sapiens
tggccatgaaggagtcctgctgctgtcagaacagaagacctcgctgccctgaggacaagcacttgccaccaccgtcactcagccctgggcgtagccggacaggaggagagcagtgatgcggatgggtacccgggcacaccagccctcagagacctgagctcttctggccacgtggaacctcgaacccgagctcctgcagaagtggccctggagattgagggtccctggacactccctatggagatccggggagctaggatggggaacctgccacagccagaactgaggggctggccccaggcagctcccagggggtagaacggccgaggatgctctcattgtgcactgcgtagatgactctggccactggggcagaggtggtttatttacagctctggaaaagcgatccgctgagccaagaaaaatatatgagctggctgggaaaatgaaagacctgagtttgggaggtgtccttttatttcctgttgatgataaagaatcaagaaacaaagggcaagatttgttggccttgattgtggctcagcatcgtgatcgttccaatgtcctgtctggcattaagatggcagccctagaagagggcctgaagaagatatttttagcagcaaaaaagaagaaagcaagtgttcatcttccacgtattggacatgccacgaaaggttttaactggtatggtactgagcgacttattcggaaacatctggctgcaagaggcatcccaacttacatatattattttcctagaagcaagtctgctgtccttcattcacagtcttcatcttcctcctcaagacagctggtgccttaagaattggcccagcctcagatcctgtctttagcaaccagctaatatttacccagaggtactgcaatagagtatttcaaaatggaatcaggatctggtgggcctcagaaattgtctcttttctgagtttcagtttggttctcctggatgttttgctctgttttggtacctgtaatatagggaaacacaactttttttgggaaagccctttgaccccagcttgctagttgcataataataaattttctgttcctaa

SEQ ID NO: 294191 - DNA, 1270 bp, Homo sapiens
cgcgcggggcggggcctctaccggcccgatggagcgcgcgggcgctactagccgcgggggccaagcccctggcttcttactgcggcttcatactgagggccgagccgaggcggcgcgggtgcaggagcaggacttacggcagtgggggctgacagggattcacctacgctcttaccagctggagggagtaaactggctcgcccagcgcttccattgtcagaatggctgtatcctgggagatgagatgggcctggggaagacctgccagactattgctctcttcatttatttggcaggaagattaaatgatgaagggccatttctgattctttgtcccttgtctgttttgagcaactggaaagaagaaatgcagagatttgctccaggtctttcctgtgtaacatatgcaggcgacaaggaggaaagagcctgccttcagcaagacctgaaacaggagtcacgttttcatgtgctactgactacctatgagatttgcttgaaagatgcatcatttctaaaatcattcccttggagtgttcttgttgtggatgaagctcacaggttgaaaaaccaaagctccctgctgcataagaccttgtcagagttctcagtagtcttcagtctcctgttgaccggaactcccatccagaacagcctccaagagctctactccctcctcagttttgtggagcctgatctcttttccaaggaagaggtgggagattttattcaacgctaccaggatattgagaaagaatctgagtcagcaagtgaactgcacaaactcttgcagccatttctgctgaggcgagtgaaagctgaggtagctacagagcttcccaagaagacagaagtagtgatataccatggcatgtcagcattgcagaagaaatactacaaggccattttgatgaaagacctagtgtgtggatcacccatatttgtttgatggtgtggagccggagccttttgaagttggagaccacctgactgaggctagtgggaagcttcacctgctggataagctactagcattcctgtattctgggggccatcgggttttacttttctcccaaatgacccagatgttggatattctccaagactatatggattacagaggctacagctatgagcgtgtggatggttctgtgagaggagaagagagacacttggccattaagaactttggacagcagcccattttcgtttttctcctgagtactagggcaggtaggctgcaaaggcattgatggaaacagacaaatga

SEQ ID NO: 294192 - DNA, 510 bp, Homo sapiens
ctacctcgctggctttgagcacaacccaggaagaagtttgaaaccaagaaaatggtggttgggaagaccaggatgcgcaatggcaagttgagggcaagcggggtacgtgtcctgaatttatagaatcttttgacacaaagcaagagagccacagtcaagactcaagtcaaaagaaatttagaccccatctgggcaaacaggcctctaagcaacaatctaagatttccacctattgttctggcattccttgtataaatgattatgactgcagagatcttaggaagtgctgtggtacctttagatgtggcctgaggtgcatacatcctcttatgattggccctgtatttttcaattcacctccacaatccaaggcataaatattggatggagaaatggattcagatggaggcatcattgagcttattcttgactcatctcagtccaaacattactctgtcaatcgttgttcttaaaatctgcatattaaaagctcagcatcaactatttttg

SEQ ID NO: 294193 - DNA, 220 bp, Homo sapiens
ctacctcgctggctttgagcacaacccaggaagaagtttgaaaccaagaaaatggtggttgggaagaccaggatgcgcaatggcaagatattggatggagaaatggattcagatggaggcatcattgagcttattcttgactcatctcagtccaaacattactctgtcaatcgttgttcttaaaatctgcatattaaaagctcagcatcaactatttttg

SEQ ID NO: 294194 - DNA, 454 bp, Homo sapiens
gctgaggtgacttcagtgggactgggagttggtgcctgcggccctccggagatctgaactggcccctcacgttttgctgataactgtttatcctgtgcctgggcagggaaaggacccatgggtgtggaggccaagcgctcggggatcctagagaccccttttcccgtcccccccagccgctccggtgcgctccgtagggcttcggggtcactgacttcgtatcgaggggccctcggctctcgccccttctgttttccccacctcctctagtacttctaacgcaaattgctctcgggcctgcacccagagccgagctctgagaaaataacttcaaggtcagccacccatgggtcctacgatttcgagagcgtatttagacatttagcttcggagagagagatcttcgtgtattttgcctttgcttcgaatgccttcagacactagctgctcccac

SEQ ID NO: 294195 - DNA, 897 bp, Homo sapiens
taaagacttccttgtctcctgcttttctgttacaaactcttacaagacaagataaatagaggctcagagtgaatgcttggggagggtattagggaagacattcttgcacaagaattacttggatcatatcactaggttaagtagaaaaatgaaaatgggtcctgaataagcatataatacgatccaaattgttacttacatgctttgaatgccttaaaaataatgtacagggcatttgtttggcagtgtgcttttatttatttccttacttattcctgtttcttttgcagaatgccctggctaaagctactgtgaaagaacttgcctcactgcacggcaccaagtacacatatggcccgggagctacaacaatctatcctgctgctgggggctctgacgactgggcttatgaccaaggaatcagatattccttcacctttgaacttcgagatacaggcagatatggctttctccttccagaatcccagatccgggctacctgcgaggagaccttcctggcaatcaagtatgttgccagctacgtcctggaacacctgtactagttgagaaagctgatggccttgtttcaaaattctcatttttcatttcttttctttcttgaattcttattttggtttgcctggatgttttgcagatcccaatctttcttttaagcttctgggtctattaaactaggtagatcttttcgtattgatcataataaaagtgaatcattactattggaaaaaaaaaagggggcgctaagatcccggggggcagttagcgacacgttggtaaaggcaaaggggagtataaaggcggggggtaaggggggaggacggtggggaaccttgggggtggaacacaaacgaaaaagtgggagctgtggtagaaagt

SEQ ID NO: 294196 - DNA, 931 bp, Homo sapiens
taaagacttccttgtctcctgcttttctgttacaaactcttacaagacaagataaatagaggctcagagtgaatgcttggggagggtattagggaagacattcttgcacaagaattacttggatcatatcactaggttaagtagaaaaatgaaaatgggtcctgaataagcatataatacgatccaaattgttacttacatgctttgaatgccttaaaaataatgtacagggcatttgtttggcagtgtgcttttatttatttccttacttattcctgtttcttttgcagaatgccctggctaaagctactgtgaaagaacttgcctcactgcacggcaccaagtacacatatggcccgggagctacaacaatctatcctgctgctgggggctctgacgactgggcttatgaccaaggaatcagatattccttcacctttgaacttcgagatacaggcagatatggctttctccttccagaatcccagatccgggctacctgcgaggagaccttcctggcaatcaagtatgttgccagctacgtcctggaacacctgtactagttgagaaagctgatggccttgtttcaaaattctcatttttcatttcttttctttcttgaattcttattttggtttgcctggatgttttgcagatcccaatctttcttttaagcttctgggtctattaaactaggtagatcttttcgtattgatcataataaaagtgaatcattactattggaaaaaaaaaaaaaaaaaaaaaaaaaaaatttgtgtgggcggccttgggcccttgggaaaagtttttaaaaccatttgtgtttgggggggggggccccagtgggttagggaaacggggccaaagggggccaggggagaacccgggaggaaaggggtgggggtttttctccaaaaaaaagggcgggggg

SEQ ID NO: 294197 - DNA, 625 bp, Homo sapiens
catcagtttgacataagattctactaaactagtttcaacattagaataaggaaaggaaaattcctactttgtaaaaatcatattattctgatttcatcaccaacctcacagttttccaggcatatgtagaagaagtaattataatgccaaagtatgaaatatagccggtttcataaccggaatgaattatggctaattctcctgcagtaaataatttgtttttcaaatctgtattccccagacagctgagccaggccttgcttctcaagtgttttatttaaataggcagtatgtcagtggagttttaccacagagtttctgagcgcagagagcctttccctaggagtggggtgcagggaactggagggcaatggttcttatgagaaggtgatgatgcttctaagaaaaaagattacacgtaagttaatacctaacaattttttttaattctgaaattcaaatgttctgcattttgaaatagaatgaatattctctaactttttagtctaaaaaatttccaagctggagctaccactcatccttggaactgccaattcctaagcattttcatgctggcactgaatgttgcattgactagccattcctatgtgcagtttctaatgct

SEQ ID NO: 294198 - DNA, 1957 bp, Homo sapiens
caggcagcagcgagtgacaggacgtctggaccggcgcgccgctagcagctctgccgggccgcggcggtgatcgatggggagcggctggagcggacccagcgagtgagggcgcacagccgggacgccgaggcggcgggcgggagacccgcaccagcgcagccggccctcggcgggacgtgacgcagcgcccggggcgcgggtgttgagagagataccctctcagactttacacagctaccaaggcaacaatgccaggaaaactattaatcaagatatgatagttcctgtttgcaatcaggagaagaaagcaaagaacactcaggattataaaagcagatgagacctacccactagacctggtcagacacaatgttggcactcttggttctggtgactgtggccctggcatctgctcatcatggtggtgagcactttgaaggcgagaaggtgttccgtgttaacgttgaagatgaaaatcacattaacataatccgcgagttggccagcacgacccagattgacttctggaagccagattctgtcacacaaatcaaacctcacagtacagttgacttccgtgttaaagcagaagatactgtcactgtggagaatgttctaaagcagaatgaactacaatacaaggtactgataagcaacctgagaaatgtggtggaggctcagtttgatagccgggttcgtgcaacaggacacagttatgagaagtacaacaagtgggaaacgatagaggcttggactcaacaagtcgccactgagaatccagccctcatctctcgcagtgttatcggaaccacatttgagggacgcgctatttacctcctgaaggttggcaaagctggacaaaataagcctgccattttcatggactgtggtttccatgccagagagtggatttctcctgcattctgccagtggtttgtaagagaggctgttcgtacctatggacgtgagatccaagtgacagagcttctcgacaagttagacttttatgtcctgcctgtgctcaatattgatggctacatctacacctggaccaagagccgattttggagaaagactcgctccacccatactggatctagctgcattggcacagaccccaacagaaattttgatgctggttggtgtgaaattggagcctctcgaaacccctgtgatgaaacttactgtggacctgccgcagagtctgaaaaggagaccaaggccctggctgatttcatccgcaacaaactctcttccatcaaggcatatctgacaatccactcgtactcccaaatgatgatctacccttactcatatgcttacaaactcggtgagaacaatgctgagttgaatgccctggctaaagctactgtgaaagaacttgcctcactgcacggcaccaagtacacatatggcccgggagctacaacaatctatcctgctgctgggggctctgacgactgggcttatgaccaaggaatcagatattccttcacctttgaacttcgagatacaggcagatatggctttctccttccagaatcccagatccgggctacctgcgaggagaccttcctggcaatcaagtatgttgccagctacgtcctggaacacctgtactagttgagaaagctgatggccttgtttcaaaattctcatttttcatttcttttctttcttgaattcttattttggtttgcctggatgttttgcagatcccaatctttcttttaagcttctgggtctattaaactaggtagatcttttcgtattgatcataataaaagtgaatcattactattggaaaaaaaaaagggggcgctaagatcccggggggcagttagcgacacgttggtaaaggcaaaggggagtataaaggcggggggtaaggggggaggacggtggggaaccttgggggtggaacacaaacgaaaaagtgggagctgtggtagaaagt

SEQ ID NO: 294199 - DNA, 1991 bp, Homo sapiens
caggcagcagcgagtgacaggacgtctggaccggcgcgccgctagcagctctgccgggccgcggcggtgatcgatggggagcggctggagcggacccagcgagtgagggcgcacagccgggacgccgaggcggcgggcgggagacccgcaccagcgcagccggccctcggcgggacgtgacgcagcgcccggggcgcgggtgttgagagagataccctctcagactttacacagctaccaaggcaacaatgccaggaaaactattaatcaagatatgatagttcctgtttgcaatcaggagaagaaagcaaagaacactcaggattataaaagcagatgagacctacccactagacctggtcagacacaatgttggcactcttggttctggtgactgtggccctggcatctgctcatcatggtggtgagcactttgaaggcgagaaggtgttccgtgttaacgttgaagatgaaaatcacattaacataatccgcgagttggccagcacgacccagattgacttctggaagccagattctgtcacacaaatcaaacctcacagtacagttgacttccgtgttaaagcagaagatactgtcactgtggagaatgttctaaagcagaatgaactacaatacaaggtactgataagcaacctgagaaatgtggtggaggctcagtttgatagccgggttcgtgcaacaggacacagttatgagaagtacaacaagtgggaaacgatagaggcttggactcaacaagtcgccactgagaatccagccctcatctctcgcagtgttatcggaaccacatttgagggacgcgctatttacctcctgaaggttggcaaagctggacaaaataagcctgccattttcatggactgtggtttccatgccagagagtggatttctcctgcattctgccagtggtttgtaagagaggctgttcgtacctatggacgtgagatccaagtgacagagcttctcgacaagttagacttttatgtcctgcctgtgctcaatattgatggctacatctacacctggaccaagagccgattttggagaaagactcgctccacccatactggatctagctgcattggcacagaccccaacagaaattttgatgctggttggtgtgaaattggagcctctcgaaacccctgtgatgaaacttactgtggacctgccgcagagtctgaaaaggagaccaaggccctggctgatttcatccgcaacaaactctcttccatcaaggcatatctgacaatccactcgtactcccaaatgatgatctacccttactcatatgcttacaaactcggtgagaacaatgctgagttgaatgccctggctaaagctactgtgaaagaacttgcctcactgcacggcaccaagtacacatatggcccgggagctacaacaatctatcctgctgctgggggctctgacgactgggcttatgaccaaggaatcagatattccttcacctttgaacttcgagatacaggcagatatggctttctccttccagaatcccagatccgggctacctgcgaggagaccttcctggcaatcaagtatgttgccagctacgtcctggaacacctgtactagttgagaaagctgatggccttgtttcaaaattctcatttttcatttcttttctttcttgaattcttattttggtttgcctggatgttttgcagatcccaatctttcttttaagcttctgggtctattaaactaggtagatcttttcgtattgatcataataaaagtgaatcattactattggaaaaaaaaaaaaaaaaaaaaaaaaaaaatttgtgtgggcggccttgggcccttgggaaaagtttttaaaaccatttgtgtttgggggggggggccccagtgggttagggaaacggggccaaagggggccaggggagaacccgggaggaaaggggtgggggtttttctccaaaaaaaagggcgggggg

SEQ ID NO: 294200 - DNA, 1513 bp, Homo sapiens
gggcgtgtggaacctgacggaactgccacgatgctgccactttggactctttcactgctgctgggagcagtagcaggaaaagaagtttgctacgaaagactcggctgcttcagtgatgactccccatggtcaggaattacggaaagacccctccatatattgccttggtctccaaaagatgtcaacacccgcttcctcctatatactaatgagaacccaaacaactttcaagaagttgccgcagattcatcaagcatcagtggctccaatttcaaaacaaatagaaaaactcgctttatagaggcttggactcaacaagtcgccactgagaatccagccctcatctctcgcagtgttatcggaaccacatttgagggacgcgctatttacctcctgaaggttggcaaagctggacaaaataagcctgccattttcatggactgtggtttccatgccagagagtggatttctcctgcattctgccagtggtttgtaagagaggctgttcgtacctatggacgtgagatccaagtgacagagcttctcgacaagttagacttttatgtcctgcctgtgctcaatattgatggctacatctacacctggaccaagagccgattttggagaaagactcgctccacccatactggatctagctgcattggcacagaccccaacagaaattttgatgctggttggtgtgaaattggagcctctcgaaacccctgtgatgaaacttactgtggacctgccgcagagtctgaaaaggagaccaaggccctggctgatttcatccgcaacaaactctcttccatcaaggcatatctgacaatccactcgtactcccaaatgatgatctacccttactcatatgcttacaaactcggtgagaacaatgctgagttgaatgccctggctaaagctactgtgaaagaacttgcctcactgcacggcaccaagtacacatatggcccgggagctacaacaatctatcctgctgctgggggctctgacgactgggcttatgaccaaggaatcagatattccttcacctttgaacttcgagatacaggcagatatggctttctccttccagaatcccagatccgggctacctgcgaggagaccttcctggcaatcaagtatgttgccagctacgtcctggaacacctgtactagttgagaaagctgatggccttgtttcaaaattctcatttttcatttcttttctttcttgaattcttattttggtttgcctggatgttttgcagatcccaatctttcttttaagcttctgggtctattaaactaggtagatcttttcgtattgatcataataaaagtgaatcattactattggaaaaaaaaaagggggcgctaagatcccggggggcagttagcgacacgttggtaaaggcaaaggggagtataaaggcggggggtaaggggggaggacggtggggaaccttgggggtggaacacaaacgaaaaagtgggagctgtggtagaaagt

SEQ ID NO: 294201 - DNA, 1945 bp, Homo sapiens
caggcagcagcgagtgacaggacgtctggaccggcgcgccgctagcagctctgccgggccgcggcggtgatcgatggggagcggctggagcggacccagcgagtgagggcgcacagccgggacgccgaggcggcgggcgggagacccgcaccagcgcagccggccctcggcgggacgtgacgcagcgcccggggcgcgggtgttgagagagataccctctcagactttacacagctaccaaggcaacaatgccaggaaaactattaatcaagatatgatagttcctgtttgcaatcaggagaagaaagcaaagaacactcaggattataaaagcagatgagacctacccactagacctggtcagacacaatgttggcactcttggttctggtgactgtggccctggcatctgctcatcatggtggtgagcactttgaaggcgagaaggtgttccgtgttaacgttgaagatgaaaatcacattaacataatccgcgagttggccagcacgacccagattgacttctggaagccagattctgtcacacaaatcaaacctcacagtacagttgacttccgtgttaaagcagaagatactgtcactgtggagaatgttctaaagcagaatgaactacaatacaaggtactgataagcaacctgagaaatgtggtggaggctcagtttgatagccgggttcgtgcaacaggacacagttatgagaagtacaacaagtgggaaacgatagaggcttggactcaacaagtcgccactgagaatccagccctcatctctcgcagtgttatcggaaccacatttgagggacgcgctatttacctcctgaaggttggcaaagctggacaaaataagcctgccattttcatggactgtggtttccatgccagagagtggatttctcctgcattctgccagtggtttgtaagagaggctgttcgtacctatggacgtgagatccaagtgacagagcttctcgacaagttagacttttatgtcctgcctgtgctcaatattgatggctacatctacacctggaccaagagccgattttggagaaagactcgctccacccatactggatctagctgcattggcacagaccccaacagaaattttgatgctggttggtgtgaaattggagcctctcgaaacccctgtgatgaaacttactgtggacctgccgcagagtctgaaaaggagaccaaggccctggctgatttcatccgcaacaaactctcttccatcaaggcatatctgacaatccactcgtactcccaaatgatgatctacccttactcatatgcttacaaactcggtgagaacaatgctgagttgaatgccctggctaaagctactgtgaaagaacttgcctcactgcacggcaccaagtacacatatggcccgggagctacaacaatctatcctgctgctgggggctctgacgactgggcttatgaccaaggaatcagatattccttcacctttgaacttcgagatacaggcagatatggctttctccttccagaatcccagatccgggctacctgcgaggagaccttcctggcaatcaagtatgttgccagctacgtcctggaacacctgtactagttgagaaagctgatggccttgtttcaaaattctcatttttcatttcttttctttcttgaattcttattttggtttgcctggatgttttgcagatcccaatctttcttttaagcttctgggtctattaaactaggtagatcttttcgtattgatcataataaaagtgatccttcttatggcaccaaacaaaccaaaaaaaatgtgggggccggcccaggaaattaaacatcggggcgcggccagagtagaaggcacacgggcaggaaccggagagggggtccaaaaccgggccgggcaaccacagcggctgccacgccgaacg

SEQ ID NO: 294202 - DNA, 2014 bp, Homo sapiens
caggcagcagcgagtgacaggacgtctggaccggcgcgccgctagcagctctgccgggccgcggcggtgatcgatggggagcggctggagcggacccagcgagtgagggcgcacagccgggacgccgaggcggcgggcgggagacccgcaccagcgcagccggccctcggcgggacgtgacgcagcgcccggggcgcgggtgttgagagagataccctctcagactttacacagctaccaaggcaacaatgccaggaaaactattaatcaagatatgatagttcctgtttgcaatcaggagaagaaagcaaagaacactcaggattataaaagcagatgagacctacccactagacctggtcagacacaatgttggcactcttggttctggtgactgtggccctggcatctgctcatcatggtggtgagcactttgaaggcgagaaggtgttccgtgttaacgttgaagatgaaaatcacattaacataatccgcgagttggccagcacgacccagattgacttctggaagccagattctgtcacacaaatcaaacctcacagtacagttgacttccgtgttaaagcagaagatactgtcactgtggagaatgttctaaagcagaatgaactacaatacaaggtactgataagcaacctgagaaatgtggtggaggctcagtttgatagccgggttcgtgcaacaggacacagttatgagaagtacaacaagtgggaaacgatagaggcttggactcaacaagtcgccactgagaatccagccctcatctctcgcagtgttatcggaaccacatttgagggacgcgctatttacctcctgaaggttggcaaagctggacaaaataagcctgccattttcatggactgtggtttccatgccagagagtggatttctcctgcattctgccagtggtttgtaagagaggctgttcgtacctatggacgtgagatccaagtgacagagcttctcgacaagttagacttttatgtcctgcctgtgctcaatattgatggctacatctacacctggaccaagagccgattttggagaaagactcgctccacccatactggatctagctgcattggcacagaccccaacagaaattttgatgctggttggtgtgaaattggagcctctcgaaacccctgtgatgaaacttactgtggacctgccgcagagtctgaaaaggagaccaaggccctggctgatttcatccgcaacaaactctcttccatcaaggcatatctgacaatccactcgtactcccaaatgatgatctacccttactcatatgcttacaaactcggtgagaacaatgctgagttgaatgccctggctaaagctactgtgaaagaacttgcctcactgcacggcaccaagtacacatatggcccgggagctacaacaatctgtgagtcttggcttcagaactgtgcaaagaaccatgtgcctaaaaagccaacgaaagatcctgctgctgggggctctgacgactgggcttatgaccaaggaatcagatattccttcacctttgaacttcgagatacaggcagatatggctttctccttccagaatcccagatccgggctacctgcgaggagaccttcctggcaatcaagtatgttgccagctacgtcctggaacacctgtactagttgagaaagctgatggccttgtttcaaaattctcatttttcatttcttttctttcttgaattcttattttggtttgcctggatgttttgcagatcccaatctttcttttaagcttctgggtctattaaactaggtagatcttttcgtattgatcataataaaagtgaatcattactattggaaaaaaaaaagggggcgctaagatcccggggggcagttagcgacacgttggtaaaggcaaaggggagtataaaggcggggggtaaggggggaggacggtggggaaccttgggggtggaacacaaacgaaaaagtgggagctgtggtagaaagt

SEQ ID NO: 294203 - DNA, 1025 bp, Homo sapiens
catcagtttgacataagattctactaaactagtttcaacattagaataaggaaaggaaaattcctactttgtaaaaatcatattattctgatttcatcaccaacctcacagttttccaggcatatgtagaagaagtaattataatgccaaagtatgaaatatagccggtttcataaccggaatgaattatggctaattctcctgcagtaaataatttgtttttcaaatctgtattccccagacagctgagccaggccttgcttctcaagtgttttatttaaataggcagtatgtcagtggagttttaccacagagtttctgagcgcagagagcctttccctaggagtggggtgcagggaactggagggcaatggttcttatgagaaggtgatgatgcttctaagaaaaaagattacacaatgccctggctaaagctactgtgaaagaacttgcctcactgcacggcaccaagtacacatatggcccgggagctacaacaatctatcctgctgctgggggctctgacgactgggcttatgaccaaggaatcagatattccttcacctttgaacttcgagatacaggcagatatggctttctccttccagaatcccagatccgggctacctgcgaggagaccttcctggcaatcaagtatgttgccagctacgtcctggaacacctgtactagttgagaaagctgatggccttgtttcaaaattctcatttttcatttcttttctttcttgaattcttattttggtttgcctggatgttttgcagatcccaatctttcttttaagcttctgggtctattaaactaggtagatcttttcgtattgatcataataaaagtgaatcattactattggaaaaaaaaaagggggcgctaagatcccggggggcagttagcgacacgttggtaaaggcaaaggggagtataaaggcggggggtaaggggggaggacggtggggaaccttgggggtggaacacaaacgaaaaagtgggagctgtggtagaaagt

SEQ ID NO: 294204 - DNA, 666 bp, Homo sapiens
  misc_feature (47)..(47): n is a, c, g, or t
cgcccactcacctcctcccctctctgcccgcgccgtttgcaccacanattgcatatcacaatgccctggctaaagctactgtgaaagaacttgcctcactgcacggcaccaagtacacatatggcccgggagctacaacaatctatcctgctgctgggggctctgacgactgggcttatgaccaaggaatcagatattccttcacctttgaacttcgagatacaggcagatatggctttctccttccagaatcccagatccgggctacctgcgaggagaccttcctggcaatcaagtatgttgccagctacgtcctggaacacctgtactagttgagaaagctgatggccttgtttcaaaattctcatttttcatttcttttctttcttgaattcttattttggtttgcctggatgttttgcagatcccaatctttcttttaagcttctgggtctattaaactaggtagatcttttcgtattgatcataataaaagtgaatcattactattggaaaaaaaaaagggggcgctaagatcccggggggcagttagcgacacgttggtaaaggcaaaggggagtataaaggcggggggtaaggggggaggacggtggggaaccttgggggtggaacacaaacgaaaaagtgggagctgtggtagaaagt

SEQ ID NO: 294205 - DNA, 1163 bp, Homo sapiens
caggcagcagcgagtgacaggacgtctggaccggcgcgccgctagcagctctgccgggccgcggcggtgatcgatggggagcggctggagcggacccagcgagtgagggcgcacagccgggacgccgaggcggcgggcgggagacccgcaccagcgcagccggccctcggcgggacgtgacgcagcgcccggggcgcgggtgttgagagagataccctctcagactttacacagctaccaaggcaacaatgccaggaaaactattaatcaagatatgatagttcctgtttgcaatcaggagaagaaagcaaagaacactcaggattataaaagcagatgagacctacccactagacctggtcagacacaatgttggcactcttggttctggtgactgtggccctggcatctgctcatcatggtggtgagcactttgaaggcgagaaggtgttccgtgttaacgttgaagatgaaaatcacattaacataatccgcgagttggccagcacgacccagattgacttctggaagccagattctgtcacacaaatcaaacctcacagtacagttgacttccgtgttaaagcagaagatactgtcactgtggagaatgttctaaagcagaatgaactacaatacaaatcctgctgctgggggctctgacgactgggcttatgaccaaggaatcagatattccttcacctttgaacttcgagatacaggcagatatggctttctccttccagaatcccagatccgggctacctgcgaggagaccttcctggcaatcaagtatgttgccagctacgtcctggaacacctgtactagttgagaaagctgatggccttgtttcaaaattctcatttttcatttcttttctttcttgaattcttattttggtttgcctggatgttttgcagatcccaatctttcttttaagcttctgggtctattaaactaggtagatcttttcgtattgatcataataaaagtgaatcattactattggaaaaaaaaaagggggcgctaagatcccggggggcagttagcgacacgttggtaaaggcaaaggggagtataaaggcggggggtaaggggggaggacggtggggaaccttgggggtggaacacaaacgaaaaagtgggagctgtggtagaaagt

SEQ ID NO: 294206 - DNA, 2581 bp, Homo sapiens
ggccccctgcccagacttgaagccacacaggcaggtcgggcaggcgggtcgcaggttgtaaatccatgtggcgggggctttggaccctggcggcccaagcggcacgtgggcctcgcagattgtgcacgcgccggagcagcggcgcaccagcccccggctccggcgccaccatcttcgcgctaagctctggccaaggccgctgcggcatcgcagtgatccggaccagcggccccgccagcggccacgccctccgaattctcaccgcaccccgagacctgccccttgctcgccacgccagcctgcgcctgctcagcgatccccgctccggggagcctctggaccgcgcactggtgctctggttcccaggtccccagagtttcaccggtgaggactgcgtggagttccacgtgcatggaggcccggcagtggtgagcggcgtcctgcaggccttgggcagcgtgccagggcttcgaccggcggaggcaggcgagttcaccagacgggcgttcgccaatgggaagctgaacctgaccgaagtggaggggctggcggaccttatccacgcggaaacagaggcgcagcggcggcaggccctcaggcagctggacggagagctgggccacctctgccgtggctgggccgagaccctcaccaaagctctggcccacgtggaggcctatatcgatttcggcgaggatgacaacctggaggagggggtcctggagcaagccgacatcgaagtacgggcactgcaggtggccctgggtgcacatctacgagatgccaggcgcgggcagaggctccgctcaggggcgcacgtagtggtcactggaccccccaatgcgggcaagagcagcctagtgaacctgctcagtcggaagcctgtgtccatcgtgtccccggagccagggaccacccgtgacgtgctggagaccccagtcgacctggccggatttcctgtgctgctgagcgacacggctgggttgcgggagggcgtggggcccgtggagcaggagggcgtgcggcgcgcccgggagaggctagagcaggctgacctcattctggccatgctggatgcttctgacctggcctctccctccagttgcaacttcctggccaccgtcgtagcctctgtgggagcccagagccccagtgacagcagccagcgcctcctcctggtgctgaacaagtcggacctgctgtccccggagggcccaggtcccggtcctgacctgcccccgcacctgctgctgtcctgtctgacgggagaggggctggacggcctcctggaggcgctgaggaaggagctagctgcagtgtgtggggacccgtccacagatcccccgctgctgacccgagcaaggcaccagcaccacctccagggttgcctggatgccctcggccactacaagcagtcaaaagacctggccctggcggcagaggcgctgcgggtggcccggggtcacctgacccggctcacaggtggagggggtaccgaggagatcctggacatcatcttccaggacttctgtgtgggcaagtgacgggatccagggaagtcgcacccaagctgcgtggagacccaggagcctcgggggatctggaaacagtttaggccaattgggattctcattcgcctgggaaagaacttgattctcaaatagtgaagcaacacagctgagaggtagtgagatccctgcagggactccctggagattcaggccctggaatggggctgaatggaggtcccgttcgacccttgatgctggggcatccgggttgggatggagataggaggatctcagtatatttgtttcgtagttttttatttattttgcaaataccaaaggaatgtaaaaaaaactcaggtgatctagaagtgtttattttcttcccttcccttcccttccctttccttttccctttccctttccccttccccttccccttccccttccccttcccctacccttccctcctctgtctattgcccaggctggagtgcagtggtgcgaccttggctcactgcaacctccatctccggggctcaagcgcttctcctgcctcagcctcctgagtagctgggattacaggcatgtgccagcatgcccggctaatttttttctttttttgagacagagtctcgctctgtcacccaggctggagttcagtggtgcgacctcggcttactgcaacctccacctcccgggttcaagtgattctcctgcctcagcctcttgagtagctgggactacaggcgcacaccaccacgccaggctaatttttgtatttttagtagagacaaggtttcaccatgttgaccaggctggtcttgaactccttgacctcaggtaatctgcctaccttggcctcccaaagtgctgggatcacaggcgtgagctatcacacctggccccagaagtgtttcaacatggaaattttccttagcccttctgtggttgtcatggcttaatgtgtgtctttccagaactttgaatgtttgcatacttgtggatgtacctttcaaatatgtttgtcttgtgtatcatatataaatggtattgtgttcattgctctaaaa

SEQ ID NO: 294207 - DNA, 708 bp, Homo sapiens
ccaccatcagcgctttattccgagtttcagtgctgtcctgggttaacctgaaagcaatctccgaggctcccctttctggctttcggggagccagagactgaccggacacttggctctgcaggtgcagacctggaccagagagacagagagccaaggaagtccacagtggagagagggctgtgctgggggttccaggaagacttcctggaggaggggatcttggagctaggccttgaagacgagtttgtcaaatgaggaagggcatccgaagccgagggaacggcagaagggaacgctggggaggggagagaatctggagagttccggaaaaagcaagtaggactctttccagaagttcgggcaagattttccctggatcagggcgtgggttctccagtactcgtccctcccggtcaccgagatgctctgagtttccggtctgaacctgaacgtaaagaggtgtagtccctcctttcttgaacgggaaaactgaacgcacataggtccttgccacgcctaaggctgcggagtgagcagatggaaaatgcgggactcaaaacctcccctcgctgtaatttgcactgccctgtgccaaactctgtcctttcttccattccttattcctattgtcagcctcgctgcgctaggaccctaaaaatttggtctcatgttgcccggggaacaacatttcgctacacctacctccat

SEQ ID NO: 294208 - DNA, 429 bp, Homo sapiens
  misc_feature (2)..(2): n is a, c, g, or t
  misc_feature (7)..(7): n is a, c, g, or t
  misc_feature (28)..(28): n is a, c, g, or t
  misc_feature (83)..(83): n is a, c, g, or t
  misc_feature (93)..(93): n is a, c, g, or t
  misc_feature (155)..(155): n is a, c, g, or t
anggccnatccccgcgaaatgctgctgnaagagcctcggaggggcgctgtgtggtaacatcaccccccccagggaggcccccnggcagagcanggtatgaccgtggcgctgtgtccatggtgaatttcccccaagaagcatttccatcctgtgantcccgtatgaaaggctttcctaagccctgaaatttgcagggtcatttccctcagtttgtgtattaaagaaaagctgccccagccaagcgtgagctatcacacctggccccagaagtgtttcaacatggaaattttccttagcccttctgtggttgtcatggcttaatgtgtgtctttccagaactttgaatgtttgcatacttgtggatgtacctttcaaatatgtttgtcttgtgtatcatatataaatggtattgtgttcattgctctaaaa

SEQ ID NO: 294209 - DNA, 2518 bp, Homo sapiens
ggccccctgcccagacttgaagccacacaggcaggtcgggcaggcgggtcgcaggttgtaaatccatgtggcgggggctttggaccctggcggcccaagcggcacgtgggcctcgcagattgtgcacgcgccggagcagcggcgcaccagcccccggctccggcgccaccatcttcgcgctaagctctggccaaggccgctgcggcatcgcagtgatccggaccagcggccccgccagcggccacgccctccgaattctcaccgcaccccgagacctgccccttgctcgccacgccagcctgcgcctgctcagcgatccccgctccggggagcctctggaccgcgcactggtgctctggttcccaggtccccagagtttcaccggtgaggactgcgtggagttccacgtgcatggaggcccggcagtggtgagcggcgtcctgcaggccttgggcagcgtgccagggcttcgaccggcggaggcaggcgagttcaccagacgggcgttcgccaatgggaagctgaacctgaccgaagtggaggggctggcggaccttatccacgcggaaacagaggcgcagcggcggcaggccctcaggcagctggacggagagctgggccacctctgccgtggctgggccgagaccctcaccaaagctctggcccacgtggaggcctatatcgatttcggcgaggatgacaacctggaggagggggtcctggagcaagccgacatcgaagtacgggcactgcaggtggccctgggtgcacatctacgagatgccaggcgcgggcagaggctccgctcaggggcgcacgtagtggtcactggaccccccaatgcgggcaagagcagcctagtgaacctgctcagtcggaagcctgtgtccatcgtgtccccggagccagggaccacccgtgacgtgctggagaccccagtcgacctggccggatttcctgtgctgctgagcgacacggctgggttgcgggagggcgtggggcccgtggagcaggagggcgtgcggcgcgcccgggagagttgcaacttcctggccaccgtcgtagcctctgtgggagcccagagccccagtgacagcagccagcgcctcctcctggtgctgaacaagtcggacctgctgtccccggagggcccaggtcccggtcctgacctgcccccgcacctgctgctgtcctgtctgacgggagaggggctggacggcctcctggaggcgctgaggaaggagctagctgcagtgtgtggggacccgtccacagatcccccgctgctgacccgagcaaggcaccagcaccacctccagggttgcctggatgccctcggccactacaagcagtcaaaagacctggccctggcggcagaggcgctgcgggtggcccggggtcacctgacccggctcacaggtggagggggtaccgaggagatcctggacatcatcttccaggacttctgtgtgggcaagtgacgggatccagggaagtcgcacccaagctgcgtggagacccaggagcctcgggggatctggaaacagtttaggccaattgggattctcattcgcctgggaaagaacttgattctcaaatagtgaagcaacacagctgagaggtagtgagatccctgcagggactccctggagattcaggccctggaatggggctgaatggaggtcccgttcgacccttgatgctggggcatccgggttgggatggagataggaggatctcagtatatttgtttcgtagttttttatttattttgcaaataccaaaggaatgtaaaaaaaactcaggtgatctagaagtgtttattttcttcccttcccttcccttccctttccttttccctttccctttccccttccccttccccttccccttccccttcccctacccttccctcctctgtctattgcccaggctggagtgcagtggtgcgaccttggctcactgcaacctccatctccggggctcaagcgcttctcctgcctcagcctcctgagtagctgggattacaggcatgtgccagcatgcccggctaatttttttctttttttgagacagagtctcgctctgtcacccaggctggagttcagtggtgcgacctcggcttactgcaacctccacctcccgggttcaagtgattctcctgcctcagcctcttgagtagctgggactacaggcgcacaccaccacgccaggctaatttttgtatttttagtagagacaaggtttcaccatgttgaccaggctggtcttgaactccttgacctcaggtaatctgcctaccttggcctcccaaagtgctgggatcacaggcgtgagctatcacacctggccccagaagtgtttcaacatggaaattttccttagcccttctgtggttgtcatggcttaatgtgtgtctttccagaactttgaatgtttgcatacttgtggatgtacctttcaaatatgtttgtcttgtgtatcatatataaatggtattgtgttcattgctctaaaa

SEQ ID NO: 294210 - DNA, 2706 bp, Homo sapiens
ggccccctgcccagacttgaagccacacaggcaggtcgggcaggcgggtcgcaggttgtaaatccatgtggcgggggctttggaccctggcggcccaagcggcacgtgggcctcgcagattgtgcacgcgccggagcagcggcgcaccagcccccggctccggcgccaccatcttcgcgctaagctctggccaaggccgctgcggcatcgcagtgatccggaccagcggccccgccagcggccacgccctccgaattctcaccgcaccccgagacctgccccttgctcgccacgccagcctgcgcctgctcagcgatccccgctccggggagcctctggaccgcgcactggtgctctggttcccaggtccccagagtttcaccggtgaggactgcgtggagttccacgtgcatggaggcccggcagtggtgagcggcgtcctgcaggccttgggcagcgtgccagggcttcgaccggcggaggcaggcgagttcaccagacgggcgttcgccaatgggaagctgaacctgaccgaagtggaggggctggcggaccttatccacgcggaaacagaggcgcagcggcggcaggccctcaggcagctggacggagagctgggccacctctgccgtggctgggccgagaccctcaccaaagctctggcccacgtggaggcctatatcgatttcggcgaggatgacaacctggaggagggggtcctggagcaagccgacatcgaagtacgggcactgcaggtggccctgggtgcacatctacgagatgccaggcgcgggcagaggctccgctcaggggcgcacgtagtggtcactggaccccccaatgcgggcaagagcagcctagtgaacctgctcagtcggaagcctgtgtccatcgtgtccccggagccagggaccacccgtgacgtgctggagaccccagtcgacctggccggatttcctgtgctgctgagcgacacggctgggttgcgggagggcgtggggcccgtggagcaggagggcgtgcggcgcgcccgggagagttgcaacttcctggccaccgtcgtagcctctgtgggagcccagagccccagtgacagcagccagcgcctcctcctggtgctgaacaagtcggacctgctgtccccggagggcccaggtcccggtcctgacctgcccccgcacctgctgctgtcctgtctgacgggagaggggctggacggcctcctggaggcgctgaggaaggagctagctgcagtgtgtggggacccgtccacagatcccccgctgctgacccgagcaaggcaccagcaccacctccagggttgcctggatgccctcggccactacaagcagtcaaaagacctggccctggcggcagaggcgctgcgggtggcccggggtcacctgacccggctcacaggtggagggggtaccgaggagatcctggacatcatcttccaggacttctgtgtgggcaagtgacgggatccagggaagtcgcacccaagctgcgtggagacccaggagcctcgggggatctggaaacagtttaggccaattgggattctcattcgcctgggaaagaacttgattctcaaatagtgaagcaacacagctgagaggtagtgagatccctgcagggactccctggagattcaggccctggaatggggctgaatggaggtcccgttcgacccttgatgctggggcatccgggttgggatggagataggaggatctcagtatatttgtttcgtagttttttatttattttgcaaataccaaaggaatgtaaaaaaaactcaggtgatctagaagtgtttattttcttcccttcccttcccttccctttccttttccctttccctttccccttccccttccccttccccttccccttcccctacccttccctcctctgtctattgcccaggctggagtgcagtggtgcgaccttggctcactgcaacctccatctccggggctcaagcgcttctcctgcctcagcctcctgagtagctgggattacaggcatgtgccagcatgcccggctaatttttttctttttttgagacagagtctcgctctgtcacccaggctggagttcagtggtgcgacctcggcttactgcaacctccacctcccgggttcaagtgattctcctgcctcagcctcttgagtagctgggactacaggcgcacaccaccacgccaggctaatttttgtatttttagtagagacaaggtttcaccatgttgaccaggctggtcttgaactccttgacctcaggtaatctgcctaccttggcctcccaaagtgctgggatcacaggcgtgagctatcacacctggccccagaagtgtttcaacatggaaattttccttagcccttctgtggttgtcatggcttaatgtgtgtctttccagaactttgaatgtttgcatacttgtggatgtacctttcaaatatgtttgtcttgtgtatcatatataaatggtattgtgttcattgctctaaaaaaagaaaaagaatcaaatacaaaaccaaaaaccgtttgttcggcgcgctttgggcccccggaaaaagtttttctacacacttccgttgggccgcgggggccccatatgggttactgtgtgacgtgggccaaaacggtgtccccagggaaaaccgggccaagaatagggctgggtttctcccaattaaa

SEQ ID NO: 294211 - DNA, 1930 bp, Homo sapiens
  misc_feature (1917)..(1917): n is a, c, g, or t
ggccccctgcccagacttgaagccacacaggcaggtcgggcaggcgggtcgcaggttgtaaatccatgtggcgggggctttggaccctggcggcccaagcggcacgtgggcctcgcagattgtgcacgcgccggagcagcggcgcaccagcccccggctccggcgccaccatcttcgcgctaagctctggccaaggccgctgcggcatcgcagtgatccggaccagcggccccgccagcggccacgccctccgaattctcaccgcaccccgagacctgccccttgctcgccacgccagcctgcgcctgctcagcgatccccgctccggggagcctctggaccgcgcactggtgctctggttcccaggtccccagagtttcaccggtgaggactgcgtggagttccacgtgcatggaggcccggcagtggtgagcggcgtcctgcaggccttgggcagcgtgccagggcttcgaccggcggaggcaggcgagttcaccagacgggcgttcgccaatgggaagctgaacctgaccgaagtggaggggctggcggaccttatccacgcggaaacagaggcgcagcggcggcaggccctcaggcagctggacggagagctgggccacctctgccgtggctgggccgagaccctcaccaaagctctggcccacgtggaggcctatatcgatttcggcgaggatgacaacctggaggagggggtcctggagcaagccgacatcgaagtacgggcactgcaggtggccctgggtgcacatctacgagatgccaggcgcgggcagaggctccgctcaggggcgcacgtagtggtcactggaccccccaatgcgggcaagagcagcctagtgaacctgctcagtcggaagcctgtgtccatcgtgtccccggagccagggaccacccgtgacgtgctggagaccccagtcgacctggccggatttcctgtgctgctgagcgacacggctgggttgcgggagggcgtggggcccgtggagcaggagggcgtgcggcgcgcccgggagagttgcaacttcctggccaccgtcgtagcctctgtgggagcccagagccccagtgacagcagccagcgcctcctcctggtgctgaacaagtcggacctgctgtccccggagggcccaggtcccggtcctgacctgcccccgcacctgctgctgtcctgtctgacgggagaggggctggacggcctcctggaggcgctgaggaaggagctagctgcagtgtgtggggacccgtccacagatcccccgctgctgacccgagcaaggcaccagcaccacctccagggttgcctggatgccctcggccactacaagcagtcaaaagacctggccctggcggcagaggcgctgcgggtggcccggggtcacctgacccggctcacaggtggagggggtaccgaggagatcctggacatcatcttccaggacttctgtgtgggcaagtgacgggatccagggaagtcgcacccaagctgcgtggagacccaggagcctcgggggatctggaaacagtttaggccaattgggattctcattcgcctgggaaagaacttgattctcaaatagtgaagcaacacagctgagaggtagtgagatccctgcagggactccctggagattcaggccctggaatggggctgaatggaggtcccgttcgacccttgatgctggggcatccgggttgggatggagataggaggatctcagtatatttgtttcgtagttttttatttattttgcaaataccaaaggaatgtaaaaaaaactcaggtgatctagaagtgtttattttcttcccttcccttcccttccctttccttttccctttccctagaccttagggtcttagggagacaggttaacaccgaagaatacggacggnggatgttcagaca

SEQ ID NO: 294212 - DNA, 2736 bp, Homo sapiens
ccaccatcagcgctttattccgagtttcagtgctgtcctgggttaacctgaaagcaatctccgaggctcccctttctggctttcggggagccagagactgaccggacacttggctctgcaggtgcagacctggaccagagagacagagagccaaggaagtccacagtggagagagggctgtgctgggggttccaggaagacttcctggaggaggggatcttggagctaggccttgaagacgagtttgtcaaatgaggaagggcatccgaagccgagggaacggcagaagggaacgctggggaggggagagaatctggagagttccggaaaaagcaaattgtgcacgcgccggagcagcggcgcaccagcccccggctccggcgccaccatcttcgcgctaagctctggccaaggccgctgcggcatcgcagtgatccggaccagcggccccgccagcggccacgccctccgaattctcaccgcaccccgagacctgccccttgctcgccacgccagcctgcgcctgctcagcgatccccgctccggggagcctctggaccgcgcactggtgctctggttcccaggtccccagagtttcaccggtgaggactgcgtggagttccacgtgcatggaggcccggcagtggtgagcggcgtcctgcaggccttgggcagcgtgccagggcttcgaccggcggaggcaggcgagttcaccagacgggcgttcgccaatgggaagctgaacctgaccgaagtggaggggctggcggaccttatccacgcggaaacagaggcgcagcggcggcaggccctcaggcagctggacggagagctgggccacctctgccgtggctgggccgagaccctcaccaaagctctggcccacgtggaggcctatatcgatttcggcgaggatgacaacctggaggagggggtcctggagcaagccgacatcgaagtacgggcactgcaggtggccctgggtgcacatctacgagatgccaggcgcgggcagaggctccgctcaggggcgcacgtagtggtcactggaccccccaatgcgggcaagagcagcctagtgaacctgctcagtcggaagcctgtgtccatcgtgtccccggagccagggaccacccgtgacgtgctggagaccccagtcgacctggccggatttcctgtgctgctgagcgacacggctgggttgcgggagggcgtggggcccgtggagcaggagggcgtgcggcgcgcccgggagagttgcaacttcctggccaccgtcgtagcctctgtgggagcccagagccccagtgacagcagccagcgcctcctcctggtgctgaacaagtcggacctgctgtccccggagggcccaggtcccggtcctgacctgcccccgcacctgctgctgtcctgtctgacgggagaggggctggacggcctcctggaggcgctgaggaaggagctagctgcagtgtgtggggacccgtccacagatcccccgctgctgacccgagcaaggcaccagcaccacctccagggttgcctggatgccctcggccactacaagcagtcaaaagacctggccctggcggcagaggcgctgcgggtggcccggggtcacctgacccggctcacaggtggagggggtaccgaggagatcctggacatcatcttccaggacttctgtgtgggcaagtgacgggatccagggaagtcgcacccaagctgcgtggagacccaggagcctcgggggatctggaaacagtttaggccaattgggattctcattcgcctgggaaagaacttgattctcaaatagtgaagcaacacagctgagaggtagtgagatccctgcagggactccctggagattcaggccctggaatggggctgaatggaggtcccgttcgacccttgatgctggggcatccgggttgggatggagataggaggatctcagtatatttgtttcgtagttttttatttattttgcaaataccaaaggaatgtaaaaaaaactcaggtgatctagaagtgtttattttcttcccttcccttcccttccctttccttttccctttccctttccccttccccttccccttccccttccccttcccctacccttccctcctctgtctattgcccaggctggagtgcagtggtgcgaccttggctcactgcaacctccatctccggggctcaagcgcttctcctgcctcagcctcctgagtagctgggattacaggcatgtgccagcatgcccggctaatttttttctttttttgagacagagtctcgctctgtcacccaggctggagttcagtggtgcgacctcggcttactgcaacctccacctcccgggttcaagtgattctcctgcctcagcctcttgagtagctgggactacaggcgcacaccaccacgccaggctaatttttgtatttttagtagagacaaggtttcaccatgttgaccaggctggtcttgaactccttgacctcaggtaatctgcctaccttggcctcccaaagtgctgggatcacaggcgtgagctatcacacctggccccagaagtgtttcaacatggaaattttccttagcccttctgtggttgtcatggcttaatgtgtgtctttccagaactttgaatgtttgcatacttgtggatgtacctttcaaatatgtttgtcttgtgtatcatatataaatggtattgtgttcattgctctaaaa

SEQ ID NO: 294213 - DNA, 2502 bp, Homo sapiens
ttgtccccacccatgctttcttctggtccccgcctcggagcctcagtttccccatctgcaaactccggaccctggagacgctgtttggaatgtgagatgggcattgtgcacgcgccggagcagcggcgcaccagcccccggctccggcgccaccatcttcgcgctaagctctggccaaggccgctgcggcatcgcagtgatccggaccagcggccccgccagcggccacgccctccgaattctcaccgcaccccgagacctgccccttgctcgccacgccagcctgcgcctgctcagcgatccccgctccggggagcctctggaccgcgcactggtgctctggttcccaggtccccagagtttcaccggtgaggactgcgtggagttccacgtgcatggaggcccggcagtggtgagcggcgtcctgcaggccttgggcagcgtgccagggcttcgaccggcggaggcaggcgagttcaccagacgggcgttcgccaatgggaagctgaacctgaccgaagtggaggggctggcggaccttatccacgcggaaacagaggcgcagcggcggcaggccctcaggcagctggacggagagctgggccacctctgccgtggctgggccgagaccctcaccaaagctctggcccacgtggaggcctatatcgatttcggcgaggatgacaacctggaggagggggtcctggagcaagccgacatcgaagtacgggcactgcaggtggccctgggtgcacatctacgagatgccaggcgcgggcagaggctccgctcaggggcgcacgtagtggtcactggaccccccaatgcgggcaagagcagcctagtgaacctgctcagtcggaagcctgtgtccatcgtgtccccggagccagggaccacccgtgacgtgctggagaccccagtcgacctggccggatttcctgtgctgctgagcgacacggctgggttgcgggagggcgtggggcccgtggagcaggagggcgtgcggcgcgcccgggagagttgcaacttcctggccaccgtcgtagcctctgtgggagcccagagccccagtgacagcagccagcgcctcctcctggtgctgaacaagtcggacctgctgtccccggagggcccaggtcccggtcctgacctgcccccgcacctgctgctgtcctgtctgacgggagaggggctggacggcctcctggaggcgctgaggaaggagctagctgcagtgtgtggggacccgtccacagatcccccgctgctgacccgagcaaggcaccagcaccacctccagggttgcctggatgccctcggccactacaagcagtcaaaagacctggccctggcggcagaggcgctgcgggtggcccggggtcacctgacccggctcacaggtggagggggtaccgaggagatcctggacatcatcttccaggacttctgtgtgggcaagtgacgggatccagggaagtcgcacccaagctgcgtggagacccaggagcctcgggggatctggaaacagtttaggccaattgggattctcattcgcctgggaaagaacttgattctcaaatagtgaagcaacacagctgagaggtagtgagatccctgcagggactccctggagattcaggccctggaatggggctgaatggaggtcccgttcgacccttgatgctggggcatccgggttgggatggagataggaggatctcagtatatttgtttcgtagttttttatttattttgcaaataccaaaggaatgtaaaaaaaactcaggtgatctagaagtgtttattttcttcccttcccttcccttccctttccttttccctttccctttccccttccccttccccttccccttccccttcccctacccttccctcctctgtctattgcccaggctggagtgcagtggtgcgaccttggctcactgcaacctccatctccggggctcaagcgcttctcctgcctcagcctcctgagtagctgggattacaggcatgtgccagcatgcccggctaatttttttctttttttgagacagagtctcgctctgtcacccaggctggagttcagtggtgcgacctcggcttactgcaacctccacctcccgggttcaagtgattctcctgcctcagcctcttgagtagctgggactacaggcgcacaccaccacgccaggctaatttttgtatttttagtagagacaaggtttcaccatgttgaccaggctggtcttgaactccttgacctcaggtaatctgcctaccttggcctcccaaagtgctgggatcacaggcgtgagctatcacacctggccccagaagtgtttcaacatggaaattttccttagcccttctgtggttgtcatggcttaatgtgtgtctttccagaactttgaatgtttgcatacttgtggatgtacctttcaaatatgtttgtcttgtgtatcatatataaatggtattgtgttcattgctctaaaa

SEQ ID NO: 294214 - DNA, 1849 bp, Homo sapiens
ggccccctgcccagacttgaagccacacaggcaggtcgggcaggcgggtcgcaggttgtaaatccatgtggcgggggctttggaccctggcggcccaagcggcacgtgggcctcgcagattgtgcacgcgccggagcagcggcgcaccagcccccggctccggcgccaccatcttcgcgctaagctctggccaaggccgctgcggcatcgcagtgatccggaccagcggccccgccagcggccacgccctccgaattctcaccgcaccccgagacctgccccttgctcgccacgccagcctgcgcctgctcagcgatccccgctccggggagcctctggaccgcgcactggtgctctggttcccaggtccccagagtttcaccggtgaggactgcgtggagttccacgtgcatggaggcccggcagtggtgagcggcgtcctgcaggccttgggcagcgtgccagggcttcgaccggcggaggcaggcgagttcaccagacgggcgttcgccaatgggaagctgaacctgaccgaagtggaggggctggcggaccttatccacgcggaaacagaggcgcagcggcggcaggccctcaggcagctggacggagagctgggccacctctgccgtggctgggccgagaccctcaccaaagctctggcccacgtggaggcctatatcgatttcggcgaggatgacaacctggaggagggggtcctggagcaagccgacatcgaagtacgggcactgcaggtggccctgggtgcacatctacgagatgccaggcgcgggcagaggctccgctcaggggcgcacgtagtggtcactggaccccccaatgcgggcaagagcagcctagtgaacctgctcagtcggaagcctgtgtccatcgtgtccccggagccagggaccacccgtgacgtgctggagaccccagtcgacctggccggatttcctgtgctgctgagcgacacggctgggttgcgggagggcgtggggcccgtggagcaggagggcgtgcggcgcgcccgggagagttgcaacttcctggccaccgtcgtagcctctgtgggagcccagagccccagtgacagcagccagcgcctcctcctggtgctgaacaagtcggacctgctgtccccggagggcccaggtcccggtcctgacctgcccccgcacctgctgctgtcctgtctgacgggagaggggctggacggcctcctggaggcgctgaggaaggagctagctgcagtgtgtggggacccgtccacagatcccccgctgctgacccgagcaaggcaccagcaccacctccagggttgcctggatgccctcggccactacaagcagtcaaaagacctggccctggcggcagaggcgctgcgggtggcccggggtcacctgacccggctcacaggtggagggggtaccgaggagatcctggacatcatcttccaggacttctgtgtgggcaagtgacgggatccagggaagtcgcacccaagctgcgtggagacccaggagcctcgggggatctggaaacagtttaggccaattgggattctcattcgcctgggaaagaacttgattctcaaatagtgaagcaacacagctgagaggtagtgagatccctgcagggactccctggagattcaggccctggaatggggctgaatggaggtcccgttcgacccttgatgctggggcatccgggttgggatggagataggaggatctcagtatatttgtttcgtaatgtttcatgtttgtaggaaactccactagcatggtaatgatatctcccgtggtcataggggaagatattttttaatatgtgcatggccccc

SEQ ID NO: 294215 - DNA, 1163 bp, Homo sapiens
ggccccctgcccagacttgaagccacacaggcaggtcgggcaggcgggtcgcaggttgtaaatccatgtggcgggggctttggaccctggcggcccaagcggcacgtgggcctcgcagattgtgcacgcgccggagcagcggcgcaccagcccccggctccggcgccaccatcttcgcgctaagctctggccaaggccgctgcggcatcgcagtgatccggaccagcggccccgccagcggccacgccctccgaattctcaccgcaccccgagacctgccccttgctcgccacgccagcctgcgcctgctcagcgatccccgctccggggagcctctggaccgcgcactggtgctctggttcccaggtccccagagtttcaccggtgaggactgcgtggagttccacgtgcatggaggcccggcagtggtgagcggcgtcctgcaggccttgggcagcgtgccagggcttcgaccggcggaggcaggcgagttcaccagacgggcgttcgccaatgggaagctgaacctgaccgaagtggaggggctggcggaccttatccacgcggaaacagaggcgcagcggcggcaggccctcaggcagctggacggagagctgggccacctctgccgtggctgggccgagaccctcaccaaagctctggcccacgtggaggcctatatcgatttcggcgaggatgacaacctggaggagggggtcctggagcaagccgacatcgaagtacgggcactgcaggtggccctgggtgcacatctacgagatgccaggcgcgggcagaggctccgctcaggggcgcacgtagtggtcactggaccccccaatgcgggcaagagcagcctagtgaacctgctcagtcggaagcctgtgtccatcgtgtccccggagccagggaccacccgtgacgtgctggagaccccagtcgacctggccggatttcctgtgctgctgagcgacacggctgggttgcgggagggcgtggggcccgtggagcaggagggcgtgcggcgcgcccgggagagagagcagctgactcatgctggcatgtgatgttctgacggctctcctcagtggacttctggcacggcgtagcttgggagccaagtcagtgcgggcaggctctcgggtgacagtgaccggtcgagc

SEQ ID NO: 294216 - DNA, 1779 bp, Homo sapiens
ggtgtcactatgcccatgggcctccaatgtggggcctgtccccgtgtgaaacagttcgtcgatgcctggggtccattggttccccggggccggggtccatcctggtgagtgtgttgtagctccttgttgtccttgtgcggtattttcgtggtgcgttctgagctaggctgcctaggtctgcgagagggcctggggcccgtggagcaggagcgcagtgcggcagcgcccggggagagggctagagcaggctgacctcattctggccatgctggatgcttctgacctggcctctccctccagttgcaacttcctggccaccgtcgtagcctctgtgggagcccagagccccagtgacagcagccagcgcctcctcctggtgctgaacaagtcggacctgctgtccccggagggcccaggtcccggtcctgacctgcccccgcacctgctgctgtcctgtctgacgggagaggggctggacggcctcctggaggcgctgaggaaggagctagctgcagtgtgtggggacccgtccacagatcccccgctgctgacccgagcaaggcaccagcaccacctccagggttgcctggatgccctcggccactacaagcagtcaaaagacctggccctggcggcagaggcgctgcgggtggcccggggtcacctgacccggctcacaggtggagggggtaccgaggagatcctggacatcatcttccaggacttctgtgtgggcaagtgacgggatccagggaagtcgcacccaagctgcgtggagacccaggagcctcgggggatctggaaacagtttaggccaattgggattctcattcgcctgggaaagaacttgattctcaaatagtgaagcaacacagctgagaggtagtgagatccctgcagggactccctggagattcaggccctggaatggggctgaatggaggtcccgttcgacccttgatgctggggcatccgggttgggatggagataggaggatctcagtatatttgtttcgtagttttttatttattttgcaaataccaaaggaatgtaaaaaaaactcaggtgatctagaagtgtttattttcttcccttcccttcccttccctttccttttccctttccctttccccttccccttccccttccccttccccttcccctacccttccctcctctgtctattgcccaggctggagtgcagtggtgcgaccttggctcactgcaacctccatctccggggctcaagcgcttctcctgcctcagcctcctgagtagctgggattacaggcatgtgccagcatgcccggctaatttttttctttttttgagacagagtctcgctctgtcacccaggctggagttcagtggtgcgacctcggcttactgcaacctccacctcccgggttcaagtgattctcctgcctcagcctcttgagtagctgggactacaggcgcacaccaccacgccaggctaatttttgtatttttagtagagacaaggtttcaccatgttgaccaggctggtcttgaactccttgacctcaggtaatctgcctaccttggcctcccaaagtgctgggatcacaggcgtgagctatcacacctggccccagaagtgtttcaacatggaaattttccttagcccttctgtggttgtcatggcttaatgtgtgtctttccagaactttgaatgtttgcatacttgtggatgtacctttcaaatatgtttgtcttgtgtatcatatataaatggtattgtgttcattgctctaaaa

SEQ ID NO: 294217 - DNA, 1753 bp, Homo sapiens
gctcccttgtctccaccctctcctcttcttctgaccctcccccaggtcggaagcctgtgtccatcgtgtccccggagccagggaccacccgtgacgtgctggagaccccagtcgacctggccggatttcctgtgctgctgagcgacacggctgggttgcgggagggcgtggggcccgtggagcaggagggcgtgcggcgcgcccgggagaggctagagcaggctgacctcattctggccatgctggatgcttctgacctggcctctccctccagttgcaacttcctggccaccgtcgtagcctctgtgggagcccagagccccagtgacagcagccagcgcctcctcctggtgctgaacaagtcggacctgctgtccccggagggcccaggtcccggtcctgacctgcccccgcacctgctgctgtcctgtctgacgggagaggggctggacggcctcctggaggcgctgaggaaggagctagctgcagtgtgtggggacccgtccacagatcccccgctgctgacccgagcaaggcaccagcaccacctccagggttgcctggatgccctcggccactacaagcagtcaaaagacctggccctggcggcagaggcgctgcgggtggcccggggtcacctgacccggctcacaggtggagggggtaccgaggagatcctggacatcatcttccaggacttctgtgtgggcaagtgacgggatccagggaagtcgcacccaagctgcgtggagacccaggagcctcgggggatctggaaacagtttaggccaattgggattctcattcgcctgggaaagaacttgattctcaaatagtgaagcaacacagctgagaggtagtgagatccctgcagggactccctggagattcaggccctggaatggggctgaatggaggtcccgttcgacccttgatgctggggcatccgggttgggatggagataggaggatctcagtatatttgtttcgtagttttttatttattttgcaaataccaaaggaatgtaaaaaaaactcaggtgatctagaagtgtttattttcttcccttcccttcccttccctttccttttccctttccctttccccttccccttccccttccccttccccttcccctacccttccctcctctgtctattgcccaggctggagtgcagtggtgcgaccttggctcactgcaacctccatctccggggctcaagcgcttctcctgcctcagcctcctgagtagctgggattacaggcatgtgccagcatgcccggctaatttttttctttttttgagacagagtctcgctctgtcacccaggctggagttcagtggtgcgacctcggcttactgcaacctccacctcccgggttcaagtgattctcctgcctcagcctcttgagtagctgggactacaggcgcacaccaccacgccaggctaatttttgtatttttagtagagacaaggtttcaccatgttgaccaggctggtcttgaactccttgacctcaggtaatctgcctaccttggcctcccaaagtgctgggatcacaggcgtgagctatcacacctggccccagaagtgtttcaacatggaaattttccttagcccttctgtggttgtcatggcttaatgtgtgtctttccagaactttgaatgtttgcatacttgtggatgtacctttcaaatatgtttgtcttgtgtatcatatataaatggtattgtgttcattgctctaaaa

SEQ ID NO: 294218 - DNA, 979 bp, Homo sapiens
ccaccatcagcgctttattccgagtttcagtgctgtcctgggttaacctgaaagcaatctccgaggctcccctttctggctttcggggagccagagactgaccggacacttggctctgcaggtgcagacctggaccagagagacagagagccaaggaagtccacagtggagagagggctgtgctgggggttccaggaagacttcctggaggaggggatcttggagctaggccttgaagacgagtttgtcaaatgaggaagggcatccgaagccgagggaacggcagaagggaacgctggggaggggagagaatctggagagttccggaaaaagcaaattgtgcacgcgccggagcagcggcgcaccagcccccggctccggcgccaccatcttcgcgctaagctctggccaaggccgctgcggcatcgcagtgatccggaccagcggccccgccagcggccacgccctccgaattctcaccgcaccccgagacctgccccttgctcgccacgccagcctgcgcctgctcagcgatccccgctccggggagcctctggaccgcgcactggtgctctggttcccaggtccccagagtttcaccggtgaggactgcgtggagttccacgtgcatggaggcccggcagtggtgagcggcgtcctgcaggccttgggcagcgtgccagggcttcgaccggcggaggcaggcgagttcaccagacgggcgttcgccaatgggaagctgaacctgaccgaagtggaggggctggcggaccttatccacgcggaaacagaggcgcagcggcggcaggccctcaggcagctggacggagagctgggccacctctgccgtggctgggccgagaccctcaccaaagcaagtcccccatttgtccattctctccctcagagaccccatctgtgcaacccctgcatgagaccccctctcaatcccgcattcattcgctgctggaaatgctga

SEQ ID NO: 294219 - DNA, 4866 bp, Homo sapiens
ggaacatgggaagccttgttttaccattcacagtattttttaatttctaaaagctaaaacaaagaaaacaaagccaatatcccccattctttagggtattaatacatttatatgaagatgaaaggggatagttttttctttaacacagtaatgacgcagaagaatatacttctggtctctgtagcatataatggtaaaagatattagcatttaatgtgtgttacaagccttaggttagtattttggaaaggagagtaactgagtataaattgctatgcaaatttagaaaatttttggcaaattttatgactaatactaaagcctccaagaccttacaaatgtagttatcctttaacagtatattcattacgtactattaattaggcactatagtaggtgccaggcattatcatgggtataaaacacatagtctgccttcacagaacttactgtttagcagaggagacaaatattaaatgaataggtacctgtggttagtagcgataaatgctctgaaggaaaaaacatacagtactgtgagaatgtagtattttgaaatgtttcatttgcaaaattgtacttgatactcagaatagtgtttttttttcctaaaatacttaatatgctgaacaggtcaatgtatcatctgcctagtatgcataaacaataacagtaaatgtttagtaatttgagcacagttgggtatgttcatgtattttttattccttactctgtttgcattgccagtgtttgattttgctatttcaaagaaatggcattttgttgagtttgaaaatttgaaggtgcattggatcctgctaatttgttggattctgctaaattgtagcagtacagctctcaggttttgtagttaagagcataacttcactaaataaaaatatttttaatacaataatatggaatcagagtaactctcctttttcctgctcaaactttgatttgctgaagctgcttcccgaaaatcatgtgtgtcgactctctggtcagaatttgctccggactctcttatggcagaatcagaaatattaaaagtttgtcagatatccagattgtacaggttgcttgtggttactatcattcacttgcactttctaaagcaagtgaagtcttctgttggggacagaataaatatggccaattgggtttaggtactgactgtaaaaagcaaacttcaccgcagctgcttaagtctttgcttggaatccctttcatgcaagttgcagcaggaggagcccatagttttgtactcaccctttctggagctatctttggatggggacgcaacaagtttggtcagctaggtcttaatgatgaaaatgataggtatgttcctaatttactaaagtcactaagatctcagaaaatagtttatatttgttgtggagaagatcatactgctgctctaaccaaggaaggtggagtgtttacttttggagctggagggtatggtcagttgggccataattctaccagtcatgaaataaacccaaggaaagtttttgaacttatgggaagcattgtcactgagattgcttgtggacggcagcacacttctgcttttgttccttcatcaggacgaatttactcttttgggcttggtggtaatgggcagctgggaaccggttcaacaagcaacaggaaaagtccctttactgtaaaaggaaattggtacccctataatgggcagtgtctaccagatattgattctgaagaatatttctgtgtaaaaagaattttctcagggggagatcaaagcttttcacattactctagtccccagaactgtgggccaccagatgacttcagatgtcccaatccgacaaagcagatctggacagtgaatgaagctctaattcagaaatggctgagctatccttctggaaggtttcctgtggagatagccaatgagatagatggaacgttttcttcctctggttgcctaaatggaagttttttagctgttagcaatgatgatcactatagaacaggtaccagattttcaggggttgatatgaatgctgctaggcttttattccacaaacttatacaacctgatcatccgcagatatctcagcaggtggcagctagtttggaaaagaatcttattcctaaactgactagctccttacctgatgttgaagcattgaggttttatcttactctaccagaatgtcccctgatgagtgattccaacaatttcacaacaatagcaattccctttggtacagctcttgtgaacctagaaaaggcaccactgaaagtacttgaaaactggtggtcagtacttgaacctccactattcctcaagatagtagaactttttaaggaagttgtggtacatcttttgaaactctacaagatcggtattcccccttctgaaagaagaattttcaacagttttcttcatactgcattaaaggttttagaaatactacatagggtaaatgagaaaatgggacagattatacagtatgataaattttatatacatgaagtacaagaattgatagacataagaaatgattatatcaactgggtccaacagcaggcctatggaatggatgtcaaccatggattaactgagttggcagatatccctgttacaatctgtacatatccatttgtatttgatgcccaagcaaaaactactctgttacagaccgatgcagtcttacagatgcagatggctattgatcaggcccacaggcagaatgtctcctctctttttctcccagtgattgaatctgtgaatccctgcttaattctagtggtgcgtagagaaaatattgtaggagatgcaatggaagtccttaggaaaacaaagaacatagattacaagaagccactcaaggttatatttgttggagaagatgctgtggatgcaggaggggtgcgcaaagaatttttcttgctcatcatgagggaattattggatcctaaatacggcatgtttaggtattatgaagattccaggctcatttggttttctgataagacatttgaagacagtgatttgttccatttgattggtgttatctgtggcttagcaatttataattgtaccattgtggacctccattttcctttggctttatataagaaactactgaaaaagaagccatccttggatgatttgaaagaactaatgcctgatgttgggagaagcatgcaacagttactggattatccagaagatgacatagaggaaacattttgtcttaattttacgatcacagttgaaaactttggtgcaacagaagtgaaagagctggttctaaatggtgcagacacagctgttaacaaacaaaatcggcaagagtttgtcgatgcttatgtggattacatattcaataaatcagtggcttccttatttgatgcttttcatgcgggctttcataaggtctgtggaggaaaagtccttctgctctttcagcctaatgaactacaagcaatggtcattggaaatacaaattatgattggaaggaactggaaaagaatacagaatacaaaggggaatattgggcagaacatcctacgataaaaattttttgggaagtatttcacgaattaccattggaaaagaagaaacagtttctgttatttttgacaggtagtgatcgcattcctattcttggtatgaagagtctgaaactagtcatccagtccacaggaggtggtgaggagtatctcccagtttcccatacttgttttaatcttctggatcttccaaaatatacagaaaaagaaactctacgctctaaactgatccaagctattgatcacaatgaaggcttcagtttaatataactttggagttataactattcagtttagtgcaaaagcattaaactatttgtgtttttcttgtggtgatgaattcagcaaggtgacagaggtactattataattcttacttgcagaatgttcaatctacgagtgttcatggaagccaaaaaatattaaaggaaaatgaacaaactgttaatattattgtacagaaccatggattttttttgaccatcttctaataaacatagcaagtattatgaatacattaaagttttactaacatgaattttaagagtttgcatatttcagaaatgatctggtgtgagtgcatggaaatattgcttaatttttcttcaatcattgagtgaaaaacctttaactttggcctgcaatagtcatttgattattttttcattttgtaaataatgttaagttttgtaataaaatagttatgttctgataccagtacagtttctatggttgtaattgaacttgaacagacttttaaaggttaaaaattatgatttaaatcttactctgagactctataaaaagaaaaaaaaggtagcatggtggaaacactatcttttcttttttgctagaataagtgtctttgtgcaaacctaaatcacagatagggaatatactacataacctgcagttcttttctttgtgaatcctgacacactgatagatgggggattgtcgatcagagaacttattaatatttagtactggaagaactctgtctccacagttgccagtaataaaaagaaacattggctactatgagcaccaatcactgggttatagctttcaaaattattgatgctgcagtgctttagagctatttccttgaatttaagaaacaaatcttaacagttttatggtgctgatgcttagttgtctcatgccattaaattgtaaaagtgagttgatgcaatacatgtgactttctgctataatgcaaatatttattttttaaatttattttaaaatgccgtgaaaactgtttaataaagatttattgttttaatatttaaactttcagtggt

SEQ ID NO: 294220 - DNA, 2076 bp, Homo sapiens
  misc_feature (1208)..(1208): n is a, c, g, or t
agtctcttccccaactctccccacccctggtgctctccgccccgcttgcctcccgttcttccccgcccgctccatccgggtcgctgacggctgtctctggactggacagcagtggcgtccgcttttctctaaggaacccgataagaactccattttctgttgatgtggagacatagggtacctccaactttccggggtttcagaagagaattttttattgaaactggaagaccaaaataattacaagcatgttgtgctggggaaatgcatcctttgggcagctaggtttgggtggaattgatgaagaaattgtactagagcccagaaaaagtgacttctttataaataaaagggtccgagatgtaggatgtggactcagacatactgtgtttgttctggatgatggaacagtgtacacatgtggatgtaatgatctaggacagctaggtcatgaaaaatccagaaagaaaccagagtttcgctcttgtttcccaggccggagtgcaatggcgccatctcggctcaccgcaacctctgcctcccaggttcaagcaattctcctgcctcagcctcccgaatagctgggattacaggcgcccaccacaatgcctggctacttttcatattttaatggagatggggttttaccatgttggccaggctggtctcgaactcctgacctcaggtgatccgcctgccttggcctcccgaagtgctggaattacaggcatgagccactgctcctggcctaagatgttttttaaataatgtttttaactaaattttaagaatgtttttaactaaagttatttatatttggaataattcgttaatgatttgtgtcatttccccaacccctttttaaatttgtgaatttgaggactggattaaaagataaaaagttgttggatcttatttattttaaagtcttctggtaattgagcaagttggttatatttctgggacaatgtaataaacatagttcatttcccaggaggtttttgttttgttttgttttgtttcgttttgtttgagacagagtctcactctgttgcccaggctggaatgcagtggcacgatctctgctcactgcaacctccgcctcccaggttcaagcgattctcctgcctcggcctcccgagtaggtgggactataggggcgtgccaccatgcccgggtaattttttatatttttagtagggacgggntttcaccgtgttagccaggatggtcttgatatcctgaccttgtgatctgcccgccttggcctcccagagtgctgggattacaggcgtgagccaccgtgcccagctgacttcacaagaactttaaacttgtgtcagaaagcacatggaatggagggaactaagaattgtttctttacataggttggctttataaatatacatattccataactaataaggaatgaaggagaaagaggtagccttattaaggataaattattctcgagattcataataacctactggaggacttggcctgacaatgtagtgaatagatttaacctgtggcctattgaaaagaggtgtttctgttctggactttttagggaccacacagaaagatttaactgaattcctttattatactaaaggtgcagattatgttcatgttcatctctgttgtcttgtatatgtatgtccttttctatcactactggcttttctgaattatttccagagaagtgaatgtctgtttcactttcatgtttttttcttcataagaactttaaaatactttttaagctaatgtctcaatttttaaatttatagctaacaaatatatttaatcttcagtgcgctagaccaatccatttaaatgaattgttgtttttttatactttcaaattcagttctgaagattttaagtatgggaagtatacttttctttacaagatccttttcttactgtgtatctaatcataggtataatttggtgaccatggttatgttttgcacattgatttccatttgtttcatgttagaaacagtactaaactgttctgtgaccataatttgtaaataaagtggtgttctgtttaaaaacaagccc

SEQ ID NO: 294221 - DNA, 961 bp, Homo sapiens
cccctcggattcgacggtttctctttcacctttaaaatttggtttcccagactctcctaggtttccctctaccacacctgctttttaatctttgtggaattctctcccttcctcactttgtatcccatccatcagtgaattttaatttccctttgtctcccagattcccctttatgatccacatctttccacatatccttctctttccaccaatcctaggcgtgtacatatatccaagtatgtttttgtttgtttgtgagactcctttcaaaaaaaaaaaagaaagaaagaaagaaaggaaaacagccagcatggcttatgggagtgaggagggaacagagaaatgggcaggggccagatcatagagagtttagtaaactaggattaggaatttggattttatctaaagtgttaatgataaacaggggaaacttaatctgatctttttgaatgatcactttgttggctgtgtagggaacgggacagaaatgaaagacggaaatccatgagaaagctatattttagtagattaggggagaggaaatgatgggtttgactaggatgatggttatttagatggaagaaggaaatggaatatgtcttggagataaaagggaatcttggagacaaaaggaaaataaaaatcactgatggattggatatgaagtgaggaaaggagagaaatccacaaagattaaaaagcaggtgtggtagagggaaaactaggagagtcttggaaaccaaaatttaaaagtgaaagagagactgttgaatgctgcagaggaggaggatgaaaccttagaattgacagtgaatttggttacatgaaggtaattggtaaccttgataataccattcttgggttgggatgttgtaaagagaaatttagaggtaaggaagcagtaacaaccattggcaatactttgacgaagttctgcattgaagaggagcaaaaaaaaaa

SEQ ID NO: 294222 - DNA, 3845 bp, Homo sapiens
agtctcttccccaactctccccacccctggtgctctccgccccgcttgcctcccgttcttccccgcccgctccatccgggtcgctgacggctgtctctggactggacagcagtggcgtccgcttttctctaaggaacccgataagaactccattttctgttgatgtggagacatagggtacctccaactttccggggtttcagaagagaattttttattgaaactggaagaccaaaataattacaagcatgttgtgctggggaaatgcatcctttgggcagctaggtttgggtggaattgatgaagaaattgtactagagcccagaaaaagtgacttctttataaataaaagggtccgagatgtaggatgtggactcagacatactgtgtttgttctggatgatggaacagtgtacacatgtggatgtaatgatctaggacagctaggtcatgaaaaatccagaaagaaaccagagcaggttgttgccctggatgcccaaaatattgtagctgtttcatgtggagaagctcatacgttagcgctaaatgacaaaggccaggtgtatgcttggggtctcgattctgatggacagcttggcctggtaggatcagaggaatgcatcagagtacccagaaatattaaaagtttgtcagatatccagattgtacaggttgcttgtggttactatcattcacttgcactttctaaagcaagtgaagtcttctgttggggacagaataaatatggccaattgggtttaggtactgactgtaaaaagcaaacttcaccgcagctgcttaagtctttgcttggaatccctttcatgcaagttgcagcaggaggagcccatagttttgtactcaccctttctggagctatctttggatggggacgcaacaagtttggtcagctaggtcttaatgatgaaaatgataggtatgttcctaatttactaaagtcactaagatctcagaaaatagtttatatttgttgtggagaagatcatactgctgctctaaccaaggaaggtggagtgtttacttttggagctggagggtatggtcagttgggccataattctaccagtcatgaaataaacccaaggaaagtttttgaacttatgggaagcattgtcactgagattgcttgtggacggcagcacacttctgcttttgttccttcatcaggacgaatttactcttttgggcttggtggtaatgggcagctgggaaccggttcaacaagcaacaggaaaagtccctttactgtaaaaggaaattggtacccctataatgggcagtgtctaccagatattgattctgaagaatatttctgtgtaaaaagaattttctcagggggagatcaaagcttttcacattactctagtccccagaactgtgggccaccagatgacttcagatgtcccaatccgacaaagcagatctggacagtgaatgaagctctaattcagaaatggctgagctatccttctggaaggtttcctgtggagatagccaatgagatagatggaacgttttcttcctctggttgcctaaatggaagttttttagctgttagcaatgatgatcactatagaacaggtaccagattttcaggggttgatatgaatgctgctaggcttttattccacaaacttatacaacctgatcatccgcagatatctcagcaggtggcagctagtttggaaaagaatcttattcctaaactgactagctccttacctgatgttgaagcattgaggttttatcttactctaccagaatgtcccctgatgagtgattccaacaatttcacaacaatagcaattccctttggtacagctcttgtgaacctagaaaaggcaccactgaaagtacttgaaaactggtggtcagtacttgaacctccactattcctcaagatagtagaactttttaaggaagttgtggtacatcttttgaaactctacaagatcggtattcccccttctgaaagaagaattttcaacagttttcttcatactgcattaaaggttttagaaatactacatagggtaaatgagaaaatgggacagattatacagtatgataaattttatatacatgaagtacaagaattgatagacataagaaatgattatatcaactgggtccaacagcaggcctatggaatgttggcagatatccctgttacaatctgtacatatccatttgtatttgatgcccaagcaaaaactactctgttacagaccgatgcagtcttacagatgcagatggctattgatcaggcccacaggcagaatgtctcctctctttttctcccagtgattgaatctgtgaatccctgcttaattctagtggtgcgtagagaaaatattgtaggagatgcaatggaagtccttaggaaaacaaagaacatagattacaagaagccactcaaggttatatttgttggagaagatgctgtggatgcaggaggggtgcgcaaagaatttttcttgctcatcatgagggaattattggatcctaaatacggcatgtttaggtattatgaagattccaggctcatttggttttctgataagacatttgaagacagtgatttgttccatttgattggtgttatctgtggcttagcaatttataattgtaccattgtggacctccattttcctttggctttatataagaaactactgaaaaagaagccatccttggatgatttgaaagaactaatgcctgatgttgggagaagcatgcaacagttactggattatccagaagatgacatagaggaaacattttgtcttaattttacgatcacagttgaaaactttggtgcaacagaagtgaaagagctggttctaaatggtgcagacacagctgttaacaaacaaaatcggcaagagtttgtcgatgcttatgtggattacatattcaataaatcagtggcttccttatttgatgcttttcatgcgggctttcataaggtctgtggaggaaaagtccttctgctctttcagcctaatgaactacaagcaatggtcattggaaatacaaattatgattggaaggaactggaaaagaatacagaatacaaaggggaatattgggcagaacatcctacgataaaaattttttgggaagtatttcacgaattaccattggaaaagaagaaacagtttctgttatttttgacaggtagtgatcgcattcctattcttggtatgaagagtctgaaactagtcatccagtccacaggaggtggtgaggagtatctcccagtttcccatacttgttttaatcttctggatcttccaaaatatacagaaaaagaaactctacgctctaaactgatccaagctattgatcacaatgaaggcttcagtttaatataactttggagttataactattcagtttagtgcaaaagcattaaactatttgtgtttttcttgtggtgatgaattcagcaaggtgacagaggtactattataattcttacttgcagaatgttcaatctacgagtgttcatggaagccaaaaaatattaaaggaaaatgaacaaactgttaatattattgtacagaaccatggattttttttgaccatcttctaataaacatagcaagtattatgaatacattaaagttttactaacatgaattttaagagtttgcatatttcagaaatgatctggtgtgagtgcatggaaatattgcttaatttttcttcaatcattgagtgaaaaacctttaactttggcctgcaatagtcatttgattattttttcattttgtaaataatgttaagttttgtaataaaatagttatgttctgatacca

SEQ ID NO: 294223 - DNA, 3685 bp, Homo sapiens
agtctcttccccaactctccccacccctggtgctctccgccccgcttgcctcccgttcttccccgcccgctccatccgggtcgctgacggctgtctctggactggacagcagtggcgtccgcttttctctaaggaacccgataagaactccattttctgttgatgtggagacatagggtacctccaactttccggggtttcagaagagaattttttattgaaactggaagaccaaaataattacaagcatgttgtgctggggaaatgcatcctttgggcagctaggtttgggtggaattgatgaagaaattgtactagagcccagaaaaagtgacttctttataaataaaagggtccgagatgtaggatgtggactcagacatactgtgtttgttctggatgatggaacagtgtacacatgtggatgtaatgatctaggacagctaggtcatgaaaaatccagaaagaaaccagaaatattaaaagtttgtcagatatccagattgtacaggttgcttgtggttactatcattcacttgcactttctaaagcaagtgaagtcttctgttggggacagaataaatatggccaattgggtttaggtactgactgtaaaaagcaaacttcaccgcagctgcttaagtctttgcttggaatccctttcatgcaagttgcagcaggaggagcccatagttttgtactcaccctttctggagctatctttggatggggacgcaacaagtttggtcagctaggtcttaatgatgaaaatgataggtatgttcctaatttactaaagtcactaagatctcagaaaatagtttatatttgttgtggagaagatcatactgctgctctaaccaaggaaggtggagtgtttacttttggagctggagggtatggtcagttgggccataattctaccagtcatgaaataaacccaaggaaagtttttgaacttatgggaagcattgtcactgagattgcttgtggacggcagcacacttctgcttttgttccttcatcaggacgaatttactcttttgggcttggtggtaatgggcagctgggaaccggttcaacaagcaacaggaaaagtccctttactgtaaaaggaaattggtacccctataatgggcagtgtctaccagatattgattctgaagaatatttctgtgtaaaaagaattttctcagggggagatcaaagcttttcacattactctagtccccagaactgtgggccaccagatgacttcagatgtcccaatccgacaaagcagatctggacagtgaatgaagctctaattcagaaatggctgagctatccttctggaaggtttcctgtggagatagccaatgagatagatggaacgttttcttcctctggttgcctaaatggaagttttttagctgttagcaatgatgatcactatagaacaggtaccagattttcaggggttgatatgaatgctgctaggcttttattccacaaacttatacaacctgatcatccgcagatatctcagcaggtggcagctagtttggaaaagaatcttattcctaaactgactagctccttacctgatgttgaagcattgaggttttatcttactctaccagaatgtcccctgatgagtgattccaacaatttcacaacaatagcaattccctttggtacagctcttgtgaacctagaaaaggcaccactgaaagtacttgaaaactggtggtcagtacttgaacctccactattcctcaagatagtagaactttttaaggaagttgtggtacatcttttgaaactctacaagatcggtattcccccttctgaaagaagaattttcaacagttttcttcatactgcattaaaggttttagaaatactacatagggtaaatgagaaaatgggacagattatacagtatgataaattttatatacatgaagtacaagaattgatagacataagaaatgattatatcaactgggtccaacagcaggcctatggaatgttggcagatatccctgttacaatctgtacatatccatttgtatttgatgcccaagcaaaaactactctgttacagaccgatgcagtcttacagatgcagatggctattgatcaggcccacaggcagaatgtctcctctctttttctcccagtgattgaatctgtgaatccctgcttaattctagtggtgcgtagagaaaatattgtaggagatgcaatggaagtccttaggaaaacaaagaacatagattacaagaagccactcaaggttatatttgttggagaagatgctgtggatgcaggaggggtgcgcaaagaatttttcttgctcatcatgagggaattattggatcctaaatacggcatgtttaggtattatgaagattccaggctcatttggttttctgataagacatttgaagacagtgatttgttccatttgattggtgttatctgtggcttagcaatttataattgtaccattgtggacctccattttcctttggctttatataagaaactactgaaaaagaagccatccttggatgatttgaaagaactaatgcctgatgttgggagaagcatgcaacagttactggattatccagaagatgacatagaggaaacattttgtcttaattttacgatcacagttgaaaactttggtgcaacagaagtgaaagagctggttctaaatggtgcagacacagctgttaacaaacaaaatcggcaagagtttgtcgatgcttatgtggattacatattcaataaatcagtggcttccttatttgatgcttttcatgcgggctttcataaggtctgtggaggaaaagtccttctgctctttcagcctaatgaactacaagcaatggtcattggaaatacaaattatgattggaaggaactggaaaagaatacagaatacaaaggggaatattgggcagaacatcctacgataaaaattttttgggaagtatttcacgaattaccattggaaaagaagaaacagtttctgttatttttgacaggtagtgatcgcattcctattcttggtatgaagagtctgaaactagtcatccagtccacaggaggtggtgaggagtatctcccagtttcccatacttgttttaatcttctggatcttccaaaatatacagaaaaagaaactctacgctctaaactgatccaagctattgatcacaatgaaggcttcagtttaatataactttggagttataactattcagtttagtgcaaaagcattaaactatttgtgtttttcttgtggtgatgaattcagcaaggtgacagaggtactattataattcttacttgcagaatgttcaatctacgagtgttcatggaagccaaaaaatattaaaggaaaatgaacaaactgttaatattattgtacagaaccatggattttttttgaccatcttctaataaacatagcaagtattatgaatacattaaagttttactaacatgaattttaagagtttgcatatttcagaaatgatctggtgtgagtgcatggaaatattgcttaatttttcttcaatcattgagtgaaaaacctttaactttggcctgcaatagtcatttgattattttttcattttgtaaataatgttaagttttgtaataaaatagttatgttctgatacca

SEQ ID NO: 294224 - DNA, 3743 bp, Homo sapiens
gctgcggcggtatagaggatcccttatttctgttacaggatagaactccattttctgttgatgtggagacatagggtacctccaactttccggggtttcagaagagaattttttattgaaactggaagaccaaaataattacaagcatgttgtgctggggaaatgcatcctttgggcagctaggtttgggtggaattgatgaagaaattgtactagagcccagaaaaagtgacttctttataaataaaagggtccgagatgtaggatgtggactcagacatactgtgtttgttctggatgatggaacagtgtacacatgtggatgtaatgatctaggacagctaggtcatgaaaaatccagaaagaaaccagagcaggttgttgccctggatgcccaaaatattgtagctgtttcatgtggagaagctcatacgttagcgctaaatgacaaaggccaggtgtatgcttggggtctcgattctgatggacagcttggcctggtaggatcagaggaatgcatcagagtacccagaaatattaaaagtttgtcagatatccagattgtacaggttgcttgtggttactatcattcacttgcactttctaaagcaagtgaagtcttctgttggggacagaataaatatggccaattgggtttaggtactgactgtaaaaagcaaacttcaccgcagctgcttaagtctttgcttggaatccctttcatgcaagttgcagcaggaggagcccatagttttgtactcaccctttctggagctatctttggatggggacgcaacaagtttggtcagctaggtcttaatgatgaaaatgataggtatgttcctaatttactaaagtcactaagatctcagaaaatagtttatatttgttgtggagaagatcatactgctgctctaaccaaggaaggtggagtgtttacttttggagctggagggtatggtcagttgggccataattctaccagtcatgaaataaacccaaggaaagtttttgaacttatgggaagcattgtcactgagattgcttgtggacggcagcacacttctgcttttgttccttcatcaggacgaatttactcttttgggcttggtggtaatgggcagctgggaaccggttcaacaagcaacaggaaaagtccctttactgtaaaaggaaattggtacccctataatgggcagtgtctaccagatattgattctgaagaatatttctgtgtaaaaagaattttctcagggggagatcaaagcttttcacattactctagtccccagaactgtgggccaccagatgacttcagatgtcccaatccgacaaagcagatctggacagtgaatgaagctctaattcagaaatggctgagctatccttctggaaggtttcctgtggagatagccaatgagatagatggaacgttttcttcctctggttgcctaaatggaagttttttagctgttagcaatgatgatcactatagaacaggtaccagattttcaggggttgatatgaatgctgctaggcttttattccacaaacttatacaacctgatcatccgcagatatctcagcaggtggcagctagtttggaaaagaatcttattcctaaactgactagctccttacctgatgttgaagcattgaggttttatcttactctaccagaatgtcccctgatgagtgattccaacaatttcacaacaatagcaattccctttggtacagctcttgtgaacctagaaaaggcaccactgaaagtacttgaaaactggtggtcagtacttgaacctccactattcctcaagatagtagaactttttaaggaagttgtggtacatcttttgaaactctacaagatcggtattcccccttctgaaagaagaattttcaacagttttcttcatactgcattaaaggttttagaaatactacatagggtaaatgagaaaatgggacagattatacagtatgataaattttatatacatgaagtacaagaattgatagacataagaaatgattatatcaactgggtccaacagcaggcctatggaatgttggcagatatccctgttacaatctgtacatatccatttgtatttgatgcccaagcaaaaactactctgttacagaccgatgcagtcttacagatgcagatggctattgatcaggcccacaggcagaatgtctcctctctttttctcccagtgattgaatctgtgaatccctgcttaattctagtggtgcgtagagaaaatattgtaggagatgcaatggaagtccttaggaaaacaaagaacatagattacaagaagccactcaaggttatatttgttggagaagatgctgtggatgcaggaggggtgcgcaaagaatttttcttgctcatcatgagggaattattggatcctaaatacggcatgtttaggtattatgaagattccaggctcatttggttttctgataagacatttgaagacagtgatttgttccatttgattggtgttatctgtggcttagcaatttataattgtaccattgtggacctccattttcctttggctttatataagaaactactgaaaaagaagccatccttggatgatttgaaagaactaatgcctgatgttgggagaagcatgcaacagttactggattatccagaagatgacatagaggaaacattttgtcttaattttacgatcacagttgaaaactttggtgcaacagaagtgaaagagctggttctaaatggtgcagacacagctgttaacaaacaaaatcggcaagagtttgtcgatgcttatgtggattacatattcaataaatcagtggcttccttatttgatgcttttcatgcgggctttcataaggtctgtggaggaaaagtccttctgctctttcagcctaatgaactacaagcaatggtcattggaaatacaaattatgattggaaggaactggaaaagaatacagaatacaaaggggaatattgggcagaacatcctacgataaaaattttttgggaagtatttcacgaattaccattggaaaagaagaaacagtttctgttatttttgacaggtagtgatcgcattcctattcttggtatgaagagtctgaaactagtcatccagtccacaggaggtggtgaggagtatctcccagtttcccatacttgttttaatcttctggatcttccaaaatatacagaaaaagaaactctacgctctaaactgatccaagctattgatcacaatgaaggcttcagtttaatataactttggagttataactattcagtttagtgcaaaagcattaaactatttgtgtttttcttgtggtgatgaattcagcaaggtgacagaggtactattataattcttacttgcagaatgttcaatctacgagtgttcatggaagccaaaaaatattaaaggaaaatgaacaaactgttaatattattgtacagaaccatggattttttttgaccatcttctaataaacatagcaagtattatgaatacattaaagttttactaacatgaattttaagagtttgcatatttcagaaatgatctggtgtgagtgcatggaaatattgcttaatttttcttcaatcattgagtgaaaaacctttaactttggcctgcaatagtcatttgattattttttcattttgtaaataatgttaagttttgtaataaaatagttatgttctgatacca

SEQ ID NO: 294225 - DNA, 3392 bp, Homo sapiens
atctagctcttgtttactgattttagcataaatttttggtacgctaaaattgagcttgtatgaaaaaaaataatatgacctatgtgcatatagtaggccatcaataaataacataaatagcattcaagatcaatttgttaaatggaattaactggtcttgatctgtcttcttcttttctagaaatattaaaagtttgtcagatatccagattgtacaggttgcttgtggttactatcattcacttgcactttctaaagcaagtgaagtcttctgttggggacagaataaatatggccaattgggtttaggtactgactgtaaaaagcaaacttcaccgcagctgcttaagtctttgcttggaatccctttcatgcaagttgcagcaggaggagcccatagttttgtactcaccctttctggagctatctttggatggggacgcaacaagtttggtcagctaggtcttaatgatgaaaatgataggtatgttcctaatttactaaagtcactaagatctcagaaaatagtttatatttgttgtggagaagatcatactgctgctctaaccaaggaaggtggagtgtttacttttggagctggagggtatggtcagttgggccataattctaccagtcatgaaataaacccaaggaaagtttttgaacttatgggaagcattgtcactgagattgcttgtggacggcagcacacttctgcttttgttccttcatcaggacgaatttactcttttgggcttggtggtaatgggcagctgggaaccggttcaacaagcaacaggaaaagtccctttactgtaaaaggaaattggtacccctataatgggcagtgtctaccagatattgattctgaagaatatttctgtgtaaaaagaattttctcagggggagatcaaagcttttcacattactctagtccccagaactgtgggccaccagatgacttcagatgtcccaatccgacaaagcagatctggacagtgaatgaagctctaattcagaaatggctgagctatccttctggaaggtttcctgtggagatagccaatgagatagatggaacgttttcttcctctggttgcctaaatggaagttttttagctgttagcaatgatgatcactatagaacaggtaccagattttcaggggttgatatgaatgctgctaggcttttattccacaaacttatacaacctgatcatccgcagatatctcagcaggtggcagctagtttggaaaagaatcttattcctaaactgactagctccttacctgatgttgaagcattgaggttttatcttactctaccagaatgtcccctgatgagtgattccaacaatttcacaacaatagcaattccctttggtacagctcttgtgaacctagaaaaggcaccactgaaagtacttgaaaactggtggtcagtacttgaacctccactattcctcaagatagtagaactttttaaggaagttgtggtacatcttttgaaactctacaagatcggtattcccccttctgaaagaagaattttcaacagttttcttcatactgcattaaaggttttagaaatactacatagggtaaatgagaaaatgggacagattatacagtatgataaattttatatacatgaagtacaagaattgatagacataagaaatgattatatcaactgggtccaacagcaggcctatggaatgttggcagatatccctgttacaatctgtacatatccatttgtatttgatgcccaagcaaaaactactctgttacagaccgatgcagtcttacagatgcagatggctattgatcaggcccacaggcagaatgtctcctctctttttctcccagtgattgaatctgtgaatccctgcttaattctagtggtgcgtagagaaaatattgtaggagatgcaatggaagtccttaggaaaacaaagaacatagattacaagaagccactcaaggttatatttgttggagaagatgctgtggatgcaggaggggtgcgcaaagaatttttcttgctcatcatgagggaattattggatcctaaatacggcatgtttaggtattatgaagattccaggctcatttggttttctgataagacatttgaagacagtgatttgttccatttgattggtgttatctgtggcttagcaatttataattgtaccattgtggacctccattttcctttggctttatataagaaactactgaaaaagaagccatccttggatgatttgaaagaactaatgcctgatgttgggagaagcatgcaacagttactggattatccagaagatgacatagaggaaacattttgtcttaattttacgatcacagttgaaaactttggtgcaacagaagtgaaagagctggttctaaatggtgcagacacagctgttaacaaacaaaatcggcaagagtttgtcgatgcttatgtggattacatattcaataaatcagtggcttccttatttgatgcttttcatgcgggctttcataaggtctgtggaggaaaagtccttctgctctttcagcctaatgaactacaagcaatggtcattggaaatacaaattatgattggaaggaactggaaaagaatacagaatacaaaggggaatattgggcagaacatcctacgataaaaattttttgggaagtatttcacgaattaccattggaaaagaagaaacagtttctgttatttttgacaggtagtgatcgcattcctattcttggtatgaagagtctgaaactagtcatccagtccacaggaggtggtgaggagtatctcccagtttcccatacttgttttaatcttctggatcttccaaaatatacagaaaaagaaactctacgctctaaactgatccaagctattgatcacaatgaaggcttcagtttaatataactttggagttataactattcagtttagtgcaaaagcattaaactatttgtgtttttcttgtggtgatgaattcagcaaggtgacagaggtactattataattcttacttgcagaatgttcaatctacgagtgttcatggaagccaaaaaatattaaaggaaaatgaacaaactgttaatattattgtacagaaccatggattttttttgaccatcttctaataaacatagcaagtattatgaatacattaaagttttactaacatgaattttaagagtttgcatatttcagaaatgatctggtgtgagtgcatggaaatattgcttaatttttcttcaatcattgagtgaaaaacctttaactttggcctgcaatagtcatttgattattttttcattttgtaaataatgttaagttttgtaataaaatagttatgttctgatacca

SEQ ID NO: 294226 - DNA, 3791 bp, Homo sapiens
agtctcttccccaactctccccacccctggtgctctccgccccgcttgcctcccgttcttccccgcccgctccatccgggtcgctgacggctgtctctggactggacagcagtggcgtccgcttttctctaaggaacccgataagaactccattttctgttgatgtggagacatagggtacctccaactttccggggtttcagaagagaattttttattgaaactggaagaccaaaataattacaagcatgttgtgctggggaaatgcatcctttgggcagctaggtttgggtggaattgatgaagaaattgtactagagcccagaaaaagtgacttctttataaataaaagggtccgagatgtaggatgtggactcagacatactgtgtttgttctggatgatggaacagtgtacacatgtggatgtaatgatctaggacagctaggtcatgaaaaatccagaaagaaaccagagcaggttgttgccctggatgcccaaaatattgtagctgtttcatgtggagaagctcatacgttagcgctaaatgacaaaggccaggtgtatgcttggggtctcgattctgatggacagcttggcctggtaggatcagaggaatgcatcagagtacccagaaatattaaaagtttgtcagatatccagattgtacaggttgcttgtggttactatcattcacttgcactttctaaagcaagtgaagtcttctgttggggacagaataaatatggccaattgggtttaggtactgactgtaaaaagcaaacttcaccgcagctgcttaagtctttgcttggaatccctttcatgcaagttgcagcaggaggagcccatagttttgtactcaccctttctggagctatctttggatggggacgcaacaagtttggtcagctaggtcttaatgatgaaaatgataggtatgttcctaatttactaaagtcactaagatctcagaaaatagtttatatttgttgtggagaagatcatactgctgctctaaccaaggaaggtggagtgtttacttttggagctggagggtatggtcagttgggccataattctaccagtcatgaaataaacccaaggaaagtttttgaacttatgggaagcattgtcactgagattgcttgtggacggcagcacacttctgcttttgttccttcatcaggacgaatttactcttttgggcttggtggtaatgggcagctgggaaccggttcaacaagcaacaggaaaagtccctttactgtaaaaggaaattggtacccctataatgggcagtgtctaccagatattgattctgaagaatatttctgtgtaaactgtgggccaccagatgacttcagatgtcccaatccgacaaagcagatctggacagtgaatgaagctctaattcagaaatggctgagctatccttctggaaggtttcctgtggagatagccaatgagatagatggaacgttttcttcctctggttgcctaaatggaagttttttagctgttagcaatgatgatcactatagaacaggtaccagattttcaggggttgatatgaatgctgctaggcttttattccacaaacttatacaacctgatcatccgcagatatctcagcaggtggcagctagtttggaaaagaatcttattcctaaactgactagctccttacctgatgttgaagcattgaggttttatcttactctaccagaatgtcccctgatgagtgattccaacaatttcacaacaatagcaattccctttggtacagctcttgtgaacctagaaaaggcaccactgaaagtacttgaaaactggtggtcagtacttgaacctccactattcctcaagatagtagaactttttaaggaagttgtggtacatcttttgaaactctacaagatcggtattcccccttctgaaagaagaattttcaacagttttcttcatactgcattaaaggttttagaaatactacatagggtaaatgagaaaatgggacagattatacagtatgataaattttatatacatgaagtacaagaattgatagacataagaaatgattatatcaactgggtccaacagcaggcctatggaatgttggcagatatccctgttacaatctgtacatatccatttgtatttgatgcccaagcaaaaactactctgttacagaccgatgcagtcttacagatgcagatggctattgatcaggcccacaggcagaatgtctcctctctttttctcccagtgattgaatctgtgaatccctgcttaattctagtggtgcgtagagaaaatattgtaggagatgcaatggaagtccttaggaaaacaaagaacatagattacaagaagccactcaaggttatatttgttggagaagatgctgtggatgcaggaggggtgcgcaaagaatttttcttgctcatcatgagggaattattggatcctaaatacggcatgtttaggtattatgaagattccaggctcatttggttttctgataagacatttgaagacagtgatttgttccatttgattggtgttatctgtggcttagcaatttataattgtaccattgtggacctccattttcctttggctttatataagaaactactgaaaaagaagccatccttggatgatttgaaagaactaatgcctgatgttgggagaagcatgcaacagttactggattatccagaagatgacatagaggaaacattttgtcttaattttacgatcacagttgaaaactttggtgcaacagaagtgaaagagctggttctaaatggtgcagacacagctgttaacaaacaaaatcggcaagagtttgtcgatgcttatgtggattacatattcaataaatcagtggcttccttatttgatgcttttcatgcgggctttcataaggtctgtggaggaaaagtccttctgctctttcagcctaatgaactacaagcaatggtcattggaaatacaaattatgattggaaggaactggaaaagaatacagaatacaaaggggaatattgggcagaacatcctacgataaaaattttttgggaagtatttcacgaattaccattggaaaagaagaaacagtttctgttatttttgacaggtagtgatcgcattcctattcttggtatgaagagtctgaaactagtcatccagtccacaggaggtggtgaggagtatctcccagtttcccatacttgttttaatcttctggatcttccaaaatatacagaaaaagaaactctacgctctaaactgatccaagctattgatcacaatgaaggcttcagtttaatataactttggagttataactattcagtttagtgcaaaagcattaaactatttgtgtttttcttgtggtgatgaattcagcaaggtgacagaggtactattataattcttacttgcagaatgttcaatctacgagtgttcatggaagccaaaaaatattaaaggaaaatgaacaaactgttaatattattgtacagaaccatggattttttttgaccatcttctaataaacatagcaagtattatgaatacattaaagttttactaacatgaattttaagagtttgcatatttcagaaatgatctggtgtgagtgcatggaaatattgcttaatttttcttcaatcattgagtgaaaaacctttaactttggcctgcaatagtcatttgattattttttcattttgtaaataatgttaagttttgtaataaaatagttatgttctgatacca

SEQ ID NO: 294227 - DNA, 4757 bp, Homo sapiens
  misc_feature (2680)..(2680): n is a, c, g, or t
agtctcttccccaactctccccacccctggtgctctccgccccgcttgcctcccgttcttccccgcccgctccatccgggtcgctgacggctgtctctggactggacagcagtggcgtccgcttttctctaaggaacccgataagaactccattttctgttgatgtggagacatagggtacctccaactttccggggtttcagaagagaattttttattgaaactggaagaccaaaataattacaagcatgttgtgctggggaaatgcatcctttgggcagctaggtttgggtggaattgatgaagaaattgtactagagcccagaaaaagtgacttctttataaataaaagggtccgagatgtaggatgtggactcagacatactgtgtttgttctggatgatggaacagtgtacacatgtggatgtaatgatctaggacagctaggtcatgaaaaatccagaaagaaaccagagcaggttgttgccctggatgcccaaaatattgtagctgtttcatgtggagaagctcatacgttagcgctaaatgacaaaggccaggtgtatgcttggggtctcgattctgatggacagcttggcctggtaggatcagaggaatgcatcagagtacccagaaatattaaaagtttgtcagatatccagattgtacaggttgcttgtggttactatcattcacttgcactttctaaagcaagtgaagtcttctgttggggacagaataaatatggccaattgggtttaggtactgactgtaaaaagcaaacttcaccgcagctgcttaagtctttgcttggaatccctttcatgcaagttgcagcaggaggagcccatagttttgtactcaccctttctggagctatctttggatggggacgcaacaagtttggtcagctaggtcttaatgatgaaaatgataggtatgttcctaatttactaaagtcactaagatctcagaaaatagtttatatttgttgtggagaagatcatactgctgctctaaccaaggaaggtggagtgtttacttttggagctggagggtatggtcagttgggccataattctaccagtcatgaaataaacccaaggaaagtttttgaacttatgggaagcattgtcactgagattgcttgtggacggcagcacacttctgcttttgttccttcatcaggacgaatttactcttttgggcttggtggtaatgggcagctgggaaccggttcaacaagcaacaggaaaagtccctttactgtaaaaggaaattggtacccctataatgggcagtgtctaccagatattgattctgaagaatatttctgtgtaaaaagaattttctcagggggagatcaaagcttttcacattactctagtccccagaactgtgggccaccagatgacttcagatgtcccaatccgacaaagcagatctggacagtgaatgaagctctaattcagaaatggctgagctatccttctggaaggtttcctgtggagatagccaatgagatagatggaacgttttcttcctctggttgcctaaatggaagttttttagctgttagcaatgatgatcactatagaacaggtaccagattttcaggggttgatatgaatgctgctaggcttttattccacaaacttatacaacctgatcatccgcagatatctcagcaggtggcagctagtttggaaaagaatcttattcctaaactgactagctccttacctgatgttgaagcattgaggttttatcttactctaccagaatgtcccctgatgagtgattccaacaatttcacaacaatagcaattccctttggtacagctcttgtgaacctagaaaaggcaccactgaaagtacttgaaaactggtggtcagtacttgaacctccactattcctcaagatagtagaactttttaaggaagttgtggtacatcttttgaaactctacaagatcggtattcccccttctgaaagaagaattttcaacagttttcttcatactgcattaaaggttttagaaatactacatagggtaaatgagaaaatgggacagattatacagtatgataaattttatatacatgaagtacaagaattgatagacataagaaatgattatatcaactgggtccaacagcaggcctatggaatggtaggttttctgtgcaatttgtgatttcatttttatgtatatgtatctaataaaaaaaggaacaattgcttggttttgaaatgagaaagttttttcagaacttttatccagaacttactttttaaataataacacattgcaaaggagtgctatatattttacaatatttatatgcaaacattctactcttttaccaaagccaaaccaaagaaatggattacactgtaaaacaaaacaaaacaagacaaaaaaaacctacaagtgtgaaatggatttttaactcttttattttccatgaggttgcctcttatttctccagtgttgaaaatactggcattcttcatactggaactcctaagaatgcattattgttgtgaaattggtgcttcaagactaccaaaagaggactgggtgtggtggctcatgcctgtaatcttagcactttggagcctgaggcaggtggattccctgagctcgggatttcaagaccagcctcggcaacatgncgaaatcccatctctactaaaaatacaaaaaattagccaagtgtggtggcacatgcctgtaatcccagctactcagaaggctgaggcatgagaatcacttgaacctgggagatggaggttgcagtgagccgattatgtgtttacttttatttcagatttttaatataaatgtgggtgcgtacatctttttatgcagctaagtctttaataactagacactatcccattaaaatagtaccatggtcttataaaacttgaattaggcacataaaattttaatgcagaaatgggtaagcagttagatacaaaatatttaggtttactactcttatttgctagccatttgtgtatacttgaggcccacttttctgtacccaggtaatttaatatgtgtgcagcagttatataatagaagggtgagtaacttttcattgcttgctaggcaccagctgtaagctccttgtggatgggtgctcttgtcagtcaaccagcacctctgacagtgtctagaatatgtctagtaagcactaaaaaagtacagtagtttttgaatggcaatctggttagtgcacgctgtttttaggatactcccacctcccggaatcaggttgcttctagacatcttttccttccctagtgtacttgggtctggactgggagagactcattgacttttctcctgagtcactttgaggctgggtcaggtttatagccattctatagatttaggtctattcatttgcttattcaacaaacaatgagaatctgttatataacaggcactgatttaggtattggaaatacagtggtgaaccagacagagccttgtttctcatggaattcgtaatctactgggcaagattggcaatagtcaaacaaagcaaaaaataccagctaataatatgtattattaaaatgaggggacttagtaaagataggtttcagaaaagacttatctaatgaagtatgagtactaatctgaatgacaaggagcagccctttaagatcagggcagagagaatttcaagaacaacgaacatttggtaaaatacctgaggtgaaaacaagcttgacatgattgaaggacagaaaaaagccagcattaggccaggtgtggtggctcacgcctggaatccctgcattttgggaggccgaggtgggcagatcacgaggtcaggagttcaagaccagcctgaccaacatagtgaaaccccgtctctactaaaaatacaaaaacttagccaggcatggtggtgggcgcctgtaatcccagctacttggaaggctgaggcaggagaattgcttgaacccaggaggtggaggttgcagtgagcttagattgcaccattgcactccagcatgggcgacagtgtgagactcctttcaaaaaaaaaaaagaaagaaagaaagaaaggaaaacagccagcatggcttatgggagtgaggagggaacagagaaatgggcaggggccagatcatagagagtttagtaaactaggattaggaatttggattttatctaaagtgttaatgataaacaggggaaacttaatctgatctttttgaatgatcactttgttggctgtgtagggaacgggacagaaatgaaagacggaaatccatgagaaagctatattttagtagattaggggagaggaaatgatgggtttgactaggatgatggttatttagatggaagaaggaaatggaatatgtcttggagataaaagggaatcttggagacaaaaggaaaataaaaatcactgatggattggatatgaagtgaggaaaggagagaaatccacaaagattaaaaagcaggtgtggtagagggaaaactaggagagtcttggaaaccaaaatttaaaagtgaaagagagactgttgaatgctgcagaggaggaggatgaaaccttagaattgacagtgaatttggttacatgaaggtaattggtaaccttgataataccattcttgggttgggatgttgtaaagagaaatttagaggtaaggaagcagtaacaaccattggcaatactttgacgaagttctgcattgaagaggagcaaaaaaaaaa

SEQ ID NO: 294228 - DNA, 1622 bp, Homo sapiens
ggactagtcgacggggattgaatctgtgaatatgcttattctagtggtgcgtagagaaaatattgtaggagatgcagaatgtctcctctctttttctcccagtgattgaatctgtgaatccctgcttaattctagtggtgcgtagagaaaatattgtaggagatgcaatggaagtccttaggaaaacaaagaacatagattacaagaagccactcaaggttatatttgttggagaagatgctgtggatgcaggaggggtgcgcaaagaatttttcttgctcatcatgagggaattattggatcctaaatacggcatgtttaggtattatgaagattccaggctcatttggttttctgataagacatttgaagacagtgatttgttccatttgattggtgttatctgtggcttagcaatttataattgtaccattgtggacctccattttcctttggctttatataagaaactactgaaaaagaagccatccttggatgatttgaaagaactaatgcctgatgttgggagaagcatgcaacagttactggattatccagaagatgacatagaggaaacattttgtcttaattttacgatcacagttgaaaactttggtgcaacagaagtgaaagagctggttctaaatggtgcagacacagctgttaacaaacaaaatcggcaagagtttgtcgatgcttatgtggattacatattcaataaatcagtggcttccttatttgatgcttttcatgcgggctttcataaggtctgtggaggaaaagtccttctgctctttcagcctaatgaactacaagcaatggtcattggaaatacaaattatgattggaaggaactggaaaagaatacagaatacaaaggggaatattgggcagaacatcctacgataaaaattttttgggaagtatttcacgaattaccattggaaaagaagaaacagtttctgttatttttgacaggtagtgatcgcattcctattcttggtatgaagagtctgaaactagtcatccagtccacaggaggtggtgaggagtatctcccagtttcccatacttgttttaatcttctggatcttccaaaatatacagaaaaagaaactctacgctctaaactgatccaagctattgatcacaatgaaggcttcagtttaatataactttggagttataactattcagtttagtgcaaaagcattaaactatttgtgtttttcttgtggtgatgaattcagcaaggtgacagaggtactattataattcttacttgcagaatgttcaatctacgagtgttcatggaagccaaaaaatattaaaggaaaatgaacaaactgttaatattattgtacagaaccatggattttttttgaccatcttctaataaacatagcaagtattatgaatacattaaagttttactaacatgaattttaagagtttgcatatttcagaaatgatctggtgtgagtgcatggaaatattgcttaatttttcttcaatcattgagtgaaaaacctttaactttggcctgcaatagtcatttgattattttttcattttgtaaataatgttaagttttgtaataaaatagttatgttctgatacca

SEQ ID NO: 294229 - DNA, 2867 bp, Homo sapiens
agtctcttccccaactctccccacccctggtgctctccgccccgcttgcctcccgttcttccccgcccgctccatccgggtcgctgacggctgtctctggactggacagcagtggcgtccgcttttctctaaggaacccgataagaactccattttctgttgatgtggagacatagggtacctccaactttccggggtttcagaagagaattttttattgaaactggaagaccaaaataattacaagcatgttgtgctggggaaatgcatcctttgggcagctaggtttgggtggaattgatgaagaaattgtactagagcccagaaaaagtgacttctttataaataaaagggtccgagatgtaggatgtggactcagacatactgtgtttgttctggatgatggaacagtgtacacatgtggatgtaatgatctaggacagctaggtcatgaaaaatccagaaagaaaccagagcaggttgttgccctggatgcccaaaatattgtagctgtttcatgtggagaagctcatacgttagcgctaaatgacaaaggccaggtgtatgcttggggtctcgattctgatggacagcttggcctggtaggatcagaggaatgcatcagagtacccagaaatattaaaagtttgtcagatatccagattgtacaggttgcttgtggttactatcattcacttgcactttctaaagcaagtgaagtcttctgttggggacagaataaatatggccaattgggtttaggtactgactgtaaaaagcaaacttcaccgcagctgcttaagtctttgcttggaatccctttcatgcaagttgcagcaggaggagcccatagttttgtactcaccctttctggagctatctttggatggggacgcaacaagtttggtcagctaggtcttaatgatgaaaatgataggtatgttcctaatttactaaagtcactaagatctcagaaaatagtttatatttgttgtggagaagatcatactgctgctctaaccaaggaaggtggagtgtttacttttggagctggagggtatggtcagttgggccataattctaccagtcatgaaataaacccaaggaaagtttttgaacttatgggaagcattgtcactgagattgcttgtggacggcagcacacttctgcttttgttccttcatcaggacgaatttactcttttgggcttggtggtaatgggcagctgggaaccggttcaacaagcaacaggaaaagtccctttactgtaaaaggaaattggtacccctataatgggcagtgtctaccagatattgattctgaagaatatttctgtgtaaaaagaattttctcagggggagatcaaagcttttcacattactctagtccccagaactgtgggccaccagatgacttcagatgtcccaatccgacaaagcagatctggacagtgaatgaagctctaattcagaaatggctgagctatccttctggaaggtttcctgtggagatagccaatgagatagatggaacgttttcttcctctggttgcctaaatggaagttttttagctgttagcaatgatgatcactatagaacaggtaccagattttcaggggttgatatgaatgctgctaggcttttattccacaaacttatacaacctgatcatccgcagatatctcagcaggtggcagctagtttggaaaagaatcttattcctaaactgactagctccttacctgatgttgaagcattgaggttttatcttactctaccagaatgtcccctgatgagtgattccaacaatttcacaacaatagcaattccctttggtacagctcttgtgaacctagaaaaggcaccactgaaagtacttgaaaactggtggtcagtacttgaacctccactattcctcaagatagtagaactttttaaggaagttgtggtacatcttttgaaactctacaagatcggtattcccccttctgaaagaagaattttcaacagttttcttcatactgcattaaaggttttagaaatactacatagggtaaatgagaaaatgggacagattatacagtatgataaattttatatacatgaagtacaagaattgatagacataagaaatgattatatcaactgggtccaacagcaggcctatggaatgttggcagatatccctgttacaatctgtacatatccatttgtatttgatgcccaagcaaaaactactctgttacagaccgatgcagtcttacagatgcagatggctattgatcaggcccacaggcagaatgtctcctctctttttctcccagtgattgaatctgtgaatccctgcttaattctagtggtgcgtagagaaaatattgtaggagatgcaatggaagtccttaggaaaacaaagaacatagattacaagaagccactcaaggttatatttgttggagaagatgctgtggatgcaggaggggtgcgcaaagaatttttcttgctcatcatgagggaattattggatcctaaatacggcatgtttaggtattatgaagattccaggctcatttggttttctgataaggtaaaatgtccaaccatctaaattacttctgtgtatatacccatgtatttatacctgtatgtatcaagttaattcagtaaataaggaattactactggatccctaacatataagatctgctttattacaatttgagaaattataaactttggacttggagttgtcaaaatacatttgatgcttaccacacattttaaattaacaaaataaataaggcaggcgtgccgaccgcgatatctccttatagaaatggataatggtctctgatataatgagtggagc

SEQ ID NO: 294230 - DNA, 1252 bp, Homo sapiens
agtctcttccccaactctccccacccctggtgctctccgccccgcttgcctcccgttcttccccgcccgctccatccgggtcgctgacggctgtctctggactggacagcagtggcgtccgcttttctctaaggaacccgataagaactccattttctgttgatgtggagacatagggtacctccaactttccggggtttcagaagagaattttttattgaaactggaagaccaaaataattacaagcatgttgtgctggggaaatgcatcctttgggcagctaggtttgggtggaattgatgaagaaattgtactagagcccagaaaaagtgacttctttataaataaaagggtccgagatgtaggatgtggactcagacatactgtgtttgttctggatgatggaacagtgtacacatgtggatgtaatgatctaggacagctaggtcatgaaaaatccagaaagaaaccagagcaggttgttgccctggatgcccaaaatattgtagctgtttcatgtggagaagctcatacgttagcgctaaatgacaaaggccaggtgtatgcttggggtctcgattctgatggacagcttggcctggtaggatcagaggaatgcatcagagtacccagaaatattaaaagtttgtcagatatccagattgtacaggttgcttgtggttactatcattcacttgcactttctaaagcaagtgaagtcttctgttggggacagaataaatatggccaattgggtttaggtactgactgtaaaaagcaaacttcaccgcagctgcttaagtctttgcttggaatccctttcatgcaagttgcagcaggaggagcccatagttttgtactcaccctttctggagctatctttggatggggacgcaacaagtttggtcagctaggtcttaatgatgaaaatggtaggttctcattatgtatagtttaagtgtactttttgaaagagatggtcttttgagttagatcagtgattcttagtgtaagagagaaatgtatcttccctggtatagaggtggggatgagatgttatttaaaaattccatttggggaatgcagtgggaagatacaaaatatcctttattcattaaagaactataaaaagtatatctggacaaaatgtttagtattggatgtttattaaaagacaattgaaaaacattacttcaaattgttaatccattattggccactgttagtggaaaaaagctgtaaaattattct

SEQ ID NO: 294231 - DNA, 272 bp, Homo sapiens
gaagtccttaggaaaacaaagaacatagattacaagaagccactcaaggtaatttgacattttctgtggtataattgggacttttattcagaagctatgtttaaaattttcctatttgtttttagtgaatcttttaaacttaataaataaaattatatttattttaaactattaattgtagagtattagtaataaataacatgttctagggtctccagaatgtactttcatttctttacagtctatttggtgtttgcattgtgctattttag

SEQ ID NO: 294232 - DNA, 254 bp, Homo sapiens
caatggtcattggaaatacaaattatgattggaaggaactggaaaaggtaggggaaaactaatctctgatattgttaaatggaaagatttatatatggaaatcttgcctttttatgtattattttttattttatacactttattactaccattttacaggaaagcactctacccttcaaactccacaatgaatggatttgaacggtatatgaattagacactattataattggtggtattgatatagaaaactc

SEQ ID NO: 294233 - DNA, 568 bp, Homo sapiens
aaatattaaaagtttgtcagatatccagattgtacaggttgcttgtggttactatcattcacttgcactttctaaaggtaagcattagtttttattttatttctcttcagttttattacttgatacttttttgattgtgcatatagttctccagctttgctcatctttctgcaagattgccctggttcttgatccttttcatttccatataacttttagaattagcttgtcagtctgtacacacacatacacacacaaacacacacacacactgctaggaatttgggattttgttgtctctataaatcaattcaaggaaaatctttacagtattgaacctttcaattctagaacacggtatatttgtccatttaagtctccctttaattttttccattagcattttgttttccctggacaggtcttatacaccttcgattagactttcccctaggtatttgattttttgttgttgtgaatggtgtcattttttgtttattatatagacatgaaattgatttttgtgtctgtttattaaacagttaaaaactcttcatagctgcaactg

SEQ ID NO: 294234 - DNA, 482 bp, Homo sapiens
ttttatttttatttttttttttgagacagagtttcgctcttgtttcccaggccggagtgcaatggcgccatctcggctcaccgcaacctctgcctcccaggttcaagcaattctcctgcctcagcctcccgaatagctgggattacaggcgcccaccacaatgcctggctacttttcatattttaatggagatggggttttaccatgttggccaggctggtctcgaactcctgacctcaggtgatccgcctgccttggcctcccgaagtgctggaattacaggcatgagccactgctcctggcctaagatgttttttaaataatgtttttaactaaattttaagaatgtttttaactaaagttatttatatttggaataattcgttaatgatttgtgtcatttccccaacccctttttaaatttgtgaatttgaggactggattaaaagataaaaagttgttggatcttatttattttaaag

SEQ ID NO: 294235 - DNA, 434 bp, Homo sapiens
aactattcagtttagtgcaaaagcattaaactatttgtgtttttcttgtggtgatgaattcagcaaggtgacagaggtactattataattcttacttgcagaatgttcaatctacgagtgttcatggaagccaaaaaatattaaaggaaaatgaacaaactgttaatattattgtacagaaccatggattttttttgaccatcttctaataaacatagcaagtattatgaatacattaaagttttactaacatgaattttaagagtttgcatatttcagaaatgatctggtgtgagtgcatggaaatattgcttaatttttcttcaatcattgagtgaaaaacctttaactttggcctgcaatagtcatttgattattttttcattttgtaaataatgttaagttttgtaataaaatagttatgttctgatacc

SEQ ID NO: 294236 - DNA, 2437 bp, Homo sapiens
gggagggtttttttttttaattgtttctttgatgtttctggacagtaaatatttgaaattttcctaggatcagtaatgaaggtacacaaagtactttgggtagctataaagaagactgctgcatgtgatatgtatattcttatgagaacatttataaaaaaaggttgcagtgaaaatggaataacttaacctataatcattttatatattaaaaattgtataagcctctttcattacagaaatattcaatctttataaaccgttttactagtttacttgataagatgttggtttgtttcaaaatcttgtttcattatatgtcccctttttatatgcttggtaagagatggaagtcactagaggtgagagatgttaaaagtaggaagcatttgatctcgttaggaagaagatgtgaaatttccttgaagaaagtttcaataataaggtattaaacatgttcctggggttggtcaccattatctcctattcctctttcttttccccttcctatcaccctttcccatccattttatgttgagagttctttcatttatagagaggattttttaaactaattcatattatgactttaaagggttacagtaagtttgctttatcatttgatcctgtaaataaaaaagattttgagctgcttcctctggtatagaatatctgactataccaactaaggattaaggaaaggatgaaaagaaagcttgaatatttaatagtctaaaaatattttaaaaaattaaaaaccttcaaatcttggtaaccatttttattctgttcaaataaatgcatttggtattctaaatatttttgtagtgttctatactaacagctagtaagccaattttttgggggtctttgttaaaacgataagttaataacttggtgattttaccatgggatattccattttagaacaagaactcagggagaaccataataaaagaacaaaagttttaaatggtaaaagtcaaatccttggtccgtgagcacataccatgatcacttagttaagtgaatttgtgtaatgcttccttagccagatcattccttattctttgttttttattttttatttttgagacggagtttcgctcttgtcgcccaggctgtagtgcagtggtacagtctcagctcactggagcctctgccttccaggttcaagtgattctcctgcctcagcctcctgagtagctgggattacaggcacacaccaccacgccctgctaattttgcatttttagtagagacaggatttcaccatgttggccaggctggtcttgaactcctgacctcaagtaatctgccctcattggcctcccgaagtgctggaattacaggcgtgagccactgcgcccagcctgttccttatactctttaaaggtttgtttttgctcctccctctttaccctcccctccagtgaatgttttttagaaaaaccaatgctcagatttatcagtattactaccgttctgtactggcttactctaatggtgttatgagttatacattatacattagtataaaaacattcaaaagggtactctttatgctcagtttattaagttttatgctgtgcgggatactgttaggtgctatgttaattcagtagcataggaattatagaatacctgtaactaataggtagaggttagcttgtttcagtcacagtagctttattgtagcattgctgttaaaatgttaatcttttgttttccagatggctattgatcaggcccacaggcagaatgtctcctctctttttctcccagtgattgaatctgtgaatccctgcttaattctagtggtgcgtagagaaaatattgtaggagatgcaatggaagtccttaggaaaacaaagaacatagattacaagaagccactcaaggttatatttgttggagaagatgctgtggatgcaggaggggtgcgcaaagaatttttcttgctcatcatgagggaattattggatcctaaatacggcatgtttaggtattatgaagattccaggctcatttggttttctgataaggtaaaatgtccaaccatctaaattacttctgtgtatatacccatgtatttatacctgtatgtatcaagttaattcagtaaataaggaattactactggatccctaacatataagatctgctttattacaatttgagaaattataaactttggacttggagttgtcaaaatacatttgatgcttaccacacattttaaattaacaaaataaattaagagatggttagccagaaaataatgttgactattccttctgctgatttcaatttgaggattgaataataatcaccagattaacttttctgttgggaaaaattaatttatcattagggatcattgatttatctaccttgtcatttagagcaggtcagcggactatagcccattaatctc

SEQ ID NO: 294237 - DNA, 1199 bp, Homo sapiens
catcactctgcagacaattggcagccaggagacgggcagctgccgcaatcttcagatttctctctatttaaagttcaaagagacgctggataacaaaagaaagaggtaagcgtggcctgacctagccacccaccaacaggaataatggctgaaaaagcggggtctacattttcacaccttctggttcctattcttctcctgattggctggattgtgggctgcatcataatgatttatgttgtcttctcttagaaaggcaagaagatatcagattgacatcatttagaagaattaagaaaactatgaacatgactgattattaaatgtctcatgttaaacaatgcaatgtttgacatcactttacaaacttggatcataaactggcactttggtatgcataagaatttcttcaggacaataagaaattatgagtgaatttctctatattctgagtgagaaaaatgtttagctgtgatgaaaaatgcatgtcattaaaaaaagtttgataaatttaatcacattacaaaaaattatccccccttccctctggaaaaaactatagagaaagtgggctgaggctgtgcaaggtggctcatgcctgtaatcccagcactttgtgaggatcctttgagcccagaaattggagaccttcctaggcgacagagagagaccccatctctacaaaaaaaaaaaaaaaaaaaaaaaaaaagaaagaaaatgggctagagataaaaacagacaattcagagaacatataatgtaaaagtacacttacttaatctcttgttcacaaaaagagaaatgtaattaaaactacactgaggaattgttgctcacttatcagatgggaaaaaaataaagatgtttgacaacatatgagttggtaagactgtgtgcaattaggcattctcatacattgtctttgggaattcaaaatggtacattttgcgggatgtttggcagtacatatctatcaaaattacatatatatttaatttttgacttagctatccctcttctaggaatatggcaatttccacaggtacatgagcaaaaatacaaaatggctcatatacaaggctatttattctggcataatttgtttagcaaaaacctggaaataagccaaatatctattaataggggattaactgaataaactgtggtatgtctacataatgtagtacttacgcagttgt

SEQ ID NO: 294238 - DNA, 871 bp, Homo sapiens
catcactctgcagacaattggcagccaggagacgggcagctgccgcaatcttcagatttctctctatttaaagttcaaagagacgctggataacaaaagaaagaggtaagcgtggcctgacctagccacccaccaacaggaataatggctgaaaaagcggggtctacattttcacaccttctggttcctattcttctcctgattggctggattgtgggctgcatcataatgatttatgttgtcttctcttagaaaggcaagaagatatcagattgacatcatttagaagaattaagaaaactatgaacatgactgattattaaatgtctcatgttaaacaatgcaatgtttgacatcactttacaaacttggatcataaactggcactttggtatgcataagaatttcttcaggacaataagaaattatgagtgaatttctctatattctgagtgagaaaaatgtttagctgtgatgaaaaatgcatgtcattaaaaaaagtttgataaatttaatcacattacaaaaaattatccccccttccctctggaaaaaactatagagaaagtgggctgaggctgtgcaaggtggctcatgcctgtaatcccagcactttgtgaggatcctttgagcccagaaattggagaccttcctaggcgacagagagagaccccatctctacaaaaaaaaaaaaaaaaaaaaaaaaaaagaaagaaaatgggctagagataaaaacagacaattcagagaacatataatgtaaaagtacacttacttaatctcttgttcacaaaaagagaaatgtaattaaaactacactgaggaattgttgctcacttatcagatgggaaaaaaataaagatgtttgaca

SEQ ID NO: 294239 - DNA, 1181 bp, Homo sapiens
agaggagattgctgataccagactcgaagaacatgagcactatgatgtgaagatgtgtctgcttccccttcaccttccatcatgattgtaagtttcctgaggcctactcagctatgattccaatacagcctgcagaactcggggtctacattttcacaccttctggttcctattcttctcctgattggctggattgtgggctgcatcataatgatttatgttgtcttctcttagaaaggcaagaagatatcagattgacatcatttagaagaattaagaaaactatgaacatgactgattattaaatgtctcatgttaaacaatgcaatgtttgacatcactttacaaacttggatcataaactggcactttggtatgcataagaatttcttcaggacaataagaaattatgagtgaatttctctatattctgagtgagaaaaatgtttagctgtgatgaaaaatgcatgtcattaaaaaaagtttgataaatttaatcacattacaaaaaattatccccccttccctctggaaaaaactatagagaaagtgggctgaggctgtgcaaggtggctcatgcctgtaatcccagcactttgtgaggatcctttgagcccagaaattggagaccttcctaggcgacagagagagaccccatctctacaaaaaaaaaaaaaaaaaaaaaaaaaaagaaagaaaatgggctagagataaaaacagacaattcagagaacatataatgtaaaagtacacttacttaatctcttgttcacaaaaagagaaatgtaattaaaactacactgaggaattgttgctcacttatcagatgggaaaaaaataaagatgtttgacaacatatgagttggtaagactgtgtgcaattaggcattctcatacattgtctttgggaattcaaaatggtacattttgcgggatgtttggcagtacatatctatcaaaattacatatatatttaatttttgacttagctatccctcttctaggaatatggcaatttccacaggtacatgagcaaaaatacaaaatggctcatatacaaggctatttattctggcataatttgtttagcaaaaacctggaaataagccaaatatctattaataggggattaactgaataaactgtggtatgtctacataatgtagtacttacgcagttgt

SEQ ID NO: 294240 - DNA, 879 bp, Homo sapiens
agttaaatttgaatgttagatggagggaacttcctttccacaatgacatgattttgtaaagctgagtgtatggcagttgtcatgattaaaagcaagtgccatgcagaagttattgtgtaacaggaaatgagattagatagcgtccaatctaatctcaaggtttgagtagctgtggacagcccaacaggcacaggcctcccgttagtacatccatacgagaagttaagaatgagtgaaaatagtttttttttttttaatttatgtgcattatttttttcaagcagctaccttgttaggacatacttaatagttatcttggcctacctactgcacttactaaacaactgttcactttttaatttttaattttcagatttttttgagacggattgttactctatcgcccaggctggagtgcagtggcgtgatctctgctcactgcaacctccgcctcccgggttcaagctattctcctgcctcagcctcctgagtatctgggactacaggtgtgcgccaccacatccagctaatttttgtatttttagtagagatggggttttaccatgttggccaggctgatctggaactcctgacctcaggtgatccacctgcctcggtctcccaaagcgctgggattacaggcatgagccactgcgcccagccactgttcgctttttttctcagtggttctctagtccattgccttaaccactcaccatgactacagctcttatttgcagtgactctcaagaatgcaaatgcaaatgccattcctgacctcgagttaattcagctttgtcccctgagcatgggggaaaggcaggctgggggctggaactttctgcttgtgtacctatctctttagactctggaggctcc

SEQ ID NO: 294241 - DNA, 897 bp, Homo sapiens
agttaaatttgaatgttagatggagggaacttcctttccacaatgacatgattttgtaaagctgagtgtatggcagttgtcatgattaaaagcaagtgccatgcagaagttattgtgtaacaggaaatgagattagatagcgtccaatctaatctcaaggtttgagtagctgtggacagcccaacaggcacaggcctcccgttagtacatccatacgagaagttaagaatgagtgaaaatagtttttttttttttaatttatgtgcattatttttttcaagcagctaccttgttaggacatacttaatagttatcttggcctacctactgcacttactaaacaactgttcactttttaatttttaattttcagatttttttgagacggattgttactctatcgcccaggctctgtctcaaaaataaaaataaaacataaatgcactggaggaaagagggtaccactctccttaaggcgggggctgccaacttgtcctgcacagcccgtccgcctgcctcaggtggacttaaagcccagctctgagggactctgagcagtcatttaacctctctgagcctctctttcctcccctgcagaagggggattataacagttcctaattcatgagttgttcttggagtgaaatacattactggccaggtgagatggctcatgcctgtaatcccaacactttgggaggctgaggtgagaggattgcttgagcccaggagttcgagaccagcctgggcaacaaagcaagacccccatctctaagaaaagtaaataaataggcagggtgcagtggctcacccctgcaatcccagcaccttgggaggacgaggtgggcagatggcctgggctcaggagtttgagaccagcctgggcaatgtggcaaa

SEQ ID NO: 294242 - DNA, 753 bp, Homo sapiens
cgcggtggctcacgcctgtaatcccagcactttgggaggccgaggcgggcggatcacgaggtcaggagatcgagaccatcctggctaacacggtgaaaccccgtctctactaaaaatgcaaaaaattagctgggcgtggtggcgggcgcctgtagtcccagctactcaggaggctaaggtaggaggattgctcgaacccaggaggcagaggttacagtgagctgagatcgcaccactgtactccagcctgggtgacaaagtgaggctctgtctcaaaaataaaaataaaacataaatgcactggaggaaagagggtaccactctccttaaggcgggggctgccaacttgtcctgcacagcccgtccgcctgcctcaggtggacttaaagcccagctctgagggactctgagcagtcatttaacctctctgagcctctctttcctcccctgcagaagggggattataacagttcctaattcatgagttgttcttggagtgaaatacattactggccaggtgagatggctcatgcctgtaatcccaacactttgggaggctgaggtgagaggattgcttgagcccaggagttcgagaccagcctgggcaacaaagcaagacccccatctctaagaaaagtaaataaataggcagggtgcagtggctcacccctgcaatcccagcaccttgggaggacgaggtgggcagatggcctgggctcaggagtttgagaccagcctgggcaatgtggcaaa

SEQ ID NO: 294243 - DNA, 2500 bp, Homo sapiens
ccacccagtgcactgcgtttaggcatgcccacatggagagaggcgaccacagcggtgatcataagcccatggtgggcagaggccctatggagccaagggctccggccgccacccccgctccgccaccagcagcgctgccaggactcgctcttcctcctcctcctcacacgccggctcggatgatctcctgccatgactcagcgcttctcgcaggctgccctgctggggacaccggcttcgctcgggcccctcccgacgcgtccaccccctctcgccacccacgcccgcccccagccgctgggcctttcccagtgcggccgccgccgccacagctgcagtcagcaccgtcaccccagcagcatccgccgcctgcaccgcgcgtgcggcccgccccggcctgaccccgccgccgaacccggcgccagccatggagcccgaagccccccgtcgccgccacacccatcagcgcggctacctgctgacacggaaccctcacctcaacaaggacttggcctttaccctggaagagagacagcaattgaacattcatggattgttgccaccttccttcaacagtcaggagatccaggttcttagagtagtaaaaaatttcgagcatctgaactctgactttgacaggtatcttctcttaatggatctccaagatagaaatgaaaaactcttttatagagtgctgacatctgacattgagaaattcatgcctattgtttatactcccactgtgggtctggcttgccaacaatatagtttggtgtttcggaagccaagaggtctctttattactatccacgatcgagggcatattgcttcagttctcaatgcatggccagaagatgtcatcaaggccattgtggtgactgatggagagcgtattcttggcttgggagaccttggctgtaatggaatgggcatccctgtgggtaaattggctctatatacagcttgcggagggatgaatcctcaagaatgtctgcctgtcattctggatgtgggaaccgaaaatgaggagttacttaaagatccactctacattggactacggcagagaagagtaagaggttctgaatatgatgattttttggacgaattcatggaggcagtttcttccaagtatggcatgaattgccttattcagtttgaagattttgccaatgtgaatgcatttcgtctcctgaacaagtatcgaaaccagtattgcacattcaatgatgatattcaaggaacagcatctgttgcagttgcaggtctccttgcagctcttcgaataaccaagaacaaactgtctgatcaaacaatactattccaaggagctggagaggctgccctagggattgcacacctgattgtgatggccttggaaaaagaaggtttaccaaaagagaaagccatcaaaaagatatggctggttgattcaaaaggattaatagttaagggacgtgcttccttaacacaagagaaagagaagtttgcccatgaacatgaagaaatgaagaacctagaagccattgttcaagaaataaaaccaactgccctcataggagttgctgcaattggtggtgcattctcagaacaaattctcaaagatatggctgccttcaatgaacggcctattatttttgctttgagtaatccaactagcaaagcagaatgttctgcagagcagtgctacaaaataaccaagggacgtgcaatttttgccagtggcagtccttttgatccagtcactcttccaaatggacagaccctatatcctggccaaggcaacaattcctatgtgttccctggagttgctcttggtgttgtggcgtgtggattgaggcagatcacagataatattttcctcactactgctgaggttatagctcagcaagtgtcagataaacacttggaagagggtcggctttatcctcctttgaataccattagagatgtttctctgaaaattgcagaaaagattgtgaaagatgcataccaagaaaagacagccacagtttatcctgaaccgcaaaacaaagaagcatttgtccgctcccagatgtatagtactgattatgaccagattctacctgattgttattcttggcctgaagaggtgcagaaaatacagaccaaagttgaccagtaggataatagcaaacatttctaactctattaatgaggtctttaaacctttcataatttttaaaggttggaatcttttataatgattcataagacacttagattaagattttactttaacagtctaaaaattgatagaagaatatcgatataaattgggataaacatcacatgagacaattttgcttcactttgccttctggttatttatggtttctgtctgaattattctgcctacgttctctttaaaagctgttgtacgtactacggagaaactcatcatttttatacaggacactaatgggaagaccaaaattactaataaattgacataaccaacattaaaactcataattat

SEQ ID NO: 294244 - DNA, 2253 bp, Homo sapiens
ccacccagtgcactgcgtttaggcatgcccacatggagagaggcgaccacagcggtgatcataagcccatggtgggcagaggccctatggagccaagggctccggccgccacccccgctccgccaccagcagcgctgccaggactcgctcttcctcctcctcctcacacgccggctcggatgatctcctgccatgactcagcgcttctcgcaggctgccctgctggggacaccggcttcgctcgggcccctcccgacgcgtccaccccctctcgccacccacgcccgcccccagccgctgggcctttcccagtgcggccgccgccgccacagctgcagtcagcaccgtcaccccagcagcatccgccgcctgcaccgcgcgtgcggcccgccccggcctgaccccgccgccgaacccggcgccagccatggagcccgaagccccccgtcgccgccacacccatcagcgcggctacctgctgacacggaaccctcacctcaacaaggacttggcctttaccctggaagagagacagcaattgaacattcatggattgttgccaccttccttcaacagtcaggagatccaggttcttagagtagtaaaaaatttcgagcatctgaactctgactttgacaggtatcttctcttaatggatctccaagatagaaatgaaaaactcttttatagagtgctgacatctgacattgagaaattcatgcctattgtttatactcccactgtgggtctggcttgccaacaatatagtttggtgtttcggaagccaagaggtctctttattactatccacgatcgagggcatattgcttcagttctcaatgcatggccagaagatgtcatcaaggccattgtggtgactgatggagagcgtattcttggcttgggagaccttggctgtaatggaatgggcatccctgtgggtaaattggctctatatacagcttgcggagggatgaatcctcaagaatgtctgcctgtcattctggatgtgggaaccgaaaatgaggagttacttaaagatccactctacattggactacggcagagaagagtaagaggttctgaatatgatgattttttggacgaattcatggaggcagtttcttccaagtatggcatgaattgccttattcagtttgaagattttgccaatgtgaatgcatttcgtctcctgaacaagtatcgaaaccagtattgcacattcaatgatgatattcaaggaacagcatctgttgcagttgcaggtctccttgcagctcttcgaataaccaagaacaaactgtctgatcaaacaatactattccaaggagctggagaggctgccctagggattgcacacctgattgtgatggccttggaaaaagaaggtttaccaaaagagaaagccatcaaaaagatatggctggttgattcaaaaggattaatagttaagggacgtgcttccttaacacaagagaaagagaagtttgcccatgaacatgaagaaatgaagaacctagaagccattgttcaagaaataaaaccaactgccctcataggagttgctgcaattggtggtgcattctcagaacaaattctcaaagatatggctgccttcaatgaacggcctattatttttgctttgagtaatccaactagcaaagcagaatgttctgcagagcagtgctacaaaataaccaagggacgtgcaatttttgccagtggcagtccttttgatccagtcactcttccaaatggacagaccctatatcctggccaaggcaacaattcctatgtgttccctggagttgctcttggtgttgtggcgtgtggattgaggcagatcacagataatattttcctcactactgctgaggttatagctcagcaagtgtcagataaacacttggaagagggtcggctttatcctcctttgaataccattagagatgtttctctgaaaattgcagaaaagattgtgaaagatgcataccaagaaaagacagccacagtttatcctgaaccgcaaaacaaagaagcatttgtccgctcccagatgtatagtactgattatgaccagattctacctgattgttattcttggcctgaagaggtgcagaaaatacagaccaaagttgaccagtaacgcaacagctaggatttttaactttattagtaaaatcttgaagttttcatgatctttaagggtcagaatcttttatgatgattcatagtatgcttagaataaggtgc

SEQ ID NO: 294245 - DNA, 677 bp, Homo sapiens
tttacccctatctccgcacgcgccgcagaaaacaatcgttccaggcgtacagcgttatagctcagcaagtgtcagataaacacttggaagagggtcggctttatcctcctttgaataccattagagatgtttctctgaaaattgcagaaaagattgtgaaagatgcataccaagaaaagacagccacagtttatcctgaaccgcaaaacaaagaagcatttgtccgctcccagatgtatagtactgattatgaccagattctacctgattgttattcttggcctgaagaggtgcagaaaatacagaccaaagttgaccagtaggataatagcaaacatttctaactctattaatgaggtctttaaacctttcataatttttaaaggttggaatcttttataatgattcataagacacttagattaagattttactttaacagtctaaaaattgatagaagaatatcgatataaattgggataaacatcacatgagacaattttgcttcactttgccttctggttatttatggtttctgtctgaattattctgcctacgttctctttaaaagctgttgtacgtactacggagaaactcatcatttttatacaggacactaatgggaagaccaaaattactaataaattgacataaccaacattaaaactcataattat

SEQ ID NO: 294246 - DNA, 504 bp, Homo sapiens
  misc_feature (18)..(18): n is a, c, g, or t
  misc_feature (24)..(24): n is a, c, g, or t
  misc_feature (29)..(30): n is a, c, g, or t
  misc_feature (51)..(51): n is a, c, g, or t
  misc_feature (54)..(55): n is a, c, g, or t
tctggccgcccgcgccangatatnaacannataaaaaattataaaaacttnagnntaacgttatagctcagcaagtgtcagataaacacttggaagagggtcggctttatcctcctttgaataccattagagatgtttctctgaaaattgcagaaaagattgtgaaagatgcataccaagaaaagacagccacagtttatcctgaaccgcaaaacaaagaagcatttgtccgctcccagatgtatagtactgattatgaccagattctacctgattgttattcttggcctgaagaggtgcagaaaatacagaccaaagttgaccagtaggataatagcaaacatttctaactctattaatgaggtctttaaacctttcataatttttaaaggttggaatcttttataatgattcataagacacttagattaagattttactttaacagtctaaaaattgatagaagaatatcgatataaattgggataaacatcacatgagaca

SEQ ID NO: 294247 - DNA, 782 bp, Homo sapiens
atgagcatctgaactctgactttgacaggtatcttctcttaatggatctccaagatagaaatgaaaaactcttttatagagtgctgacatctgacattgagaaattcatgcctattgtttatactcccactgtgggtctggcttgccaacaatatagtttggtgtttcggaagccaagaaatttattgagcgtccactgcatgccaggcactttaccaagcattgagaatagaggtctctttattactatccacgatcgagggcatattgcttcagttctcaatgcatggccagaagatgtcatcaaggccattgtggtgactgatggagagcgtattcttggcttgggagaccttggctgtaatggaatgggcatccctgtgggtaaattggctctatatacagcttgcggagggatgaatcctcaagaatgtctgcctgtcattctggatgtgggaaccgaaaatgaggagttacttaaagatccactctacattggactacggcagagaagagtaagaggttctgaatatgatgattttttggacgaattcatggaggcagtttcttccaaagtcttcaatgcaaaaaagtcggtgcttcgtttcaaccgtaagtgactttctgtatgttgtgcagattaaactaaaaaatgttggccggggcgcggtggctgacacctataattccagcagttccggagaccgagacgggcagatcacgaggtcagaagatcgcgaccatcctggctaacatggtgaaaccccgtctctactaaagat

SEQ ID NO: 294248 - DNA, 3682 bp, Homo sapiens
ccacccagtgcactgcgtttaggcatgcccacatggagagaggcgaccacagcggtgatcataagcccatggtgggcagaggccctatggagccaagggctccggccgccacccccgctccgccaccagcagcgctgccaggactcgctcttcctcctcctcctcacacgccggctcggatgatctcctgccatgactcagcgcttctcgcaggctgccctgctggggacaccggcttcgctcgggcccctcccgacgcgtccaccccctctcgccacccacgcccgcccccagccgctgggcctttcccagtgcggccgccgccgccacagctgcagtcagcaccgtcaccccagcagcatccgccgcctgcaccgcgcgtgcggcccgccccggcctgaccccgccgccgaacccggcgccagccatggagcccgaagccccccgtcgccgccacacccatcagcgcggctacctgctgacacggaaccctcacctcaacaaggacttggcctttaccctggaagagagacagcaattgaacattcatggattgttgccaccttccttcaacagtcaggagatccaggttcttagagtagtaaaaaatttcgagcatctgaactctgactttgacaggtatcttctcttaatggatctccaagatagaaatgaaaaactcttttatagagtgctgacatctgacattgagaaattcatgcctattgtttatactcccactgtgggtctggcttgccaacaatatagtttggtgtttcggaagccaagaggtctctttattactatccacgatcgagggcatattgcttcagttctcaatgcatggccagaagatgtcatcaaggccattgtggtgactgatggagagcgtattcttggcttgggagaccttggctgtaatggaatgggcatccctgtgggtaaattggctctatatacagcttgcggagggatgaatcctcaagaatgtctgcctgtcattctggatgtgggaaccgaaaatgaggagttacttaaagatccactctacattggactacggcagagaagagtaagaggttctgaatatgatgattttttggacgaattcatggaggcagtttcttccaagtatggcatgaattgccttattcagtttgaagattttgccaatgtgaatgcatttcgtctcctgaacaagtatcgaaaccagtattgcacattcaatgatgatattcaaggaacagcatctgttgcagttgcaggtctccttgcagctcttcgaataaccaagaacaaactgtctgatcaaacaatactattccaaggagctggagaggctgccctagggattgcacacctgattgtgatggccttggaaaaagaaggtttaccaaaagagaaagccatcaaaaagatatggctggttgattcaaaaggattaatagttaagggacgtgcttccttaacacaagagaaagagaagtttgcccatgaacatgaagaaatgaagaacctagaagccattgttcaagaaataaaaccaactgccctcataggagttgctgcaattggtggtgcattctcagaacaaattctcaaagatatggctgccttcaatgaacggcctattatttttgctttgagtaatccaactagcaaagcagaatgttctgcagagcagtgctacaaaataaccaagggacgtgcaatttttgccagtggcagtccttttgatccagtcactcttccaaatggacagaccctatatcctggccaaggcaacaattcctatgtgttccctggagttgctcttggtgttgtggcgtgtggattgaggcagatcacagataatattttcctcactactgctgaggttatagctcagcaagtgtcagataaacacttggaagagggtcggctttatcctcctttgaataccattagagatgtttctctgaaaattgcagaaaagattgtgaaagatgcataccaagaaaagacagccacagtttatcctgaaccgcaaaacaaagaagcatttgtccgctcccagatgtatagtactgattatgaccagattctacctgattgttattcttggcctgaagaggtgcagaaaatacagaccaaagttgaccagtaggataatagcaaacatttctaactctattaatgaggtctttaaacctttcataatttttaaaggttggaatcttttataatgattcataagacacttagattaagattttactttaacagtctaaaaattgatagaagaatatcgatataaattgggataaacatcacatgagacaattttgcttcactttgccttctggttatttatggtttctgtctgaattattctgcctacgttctctttaaaagctgttgtacgtactacggagaaactcatcatttttatacaggacactaatgggaagaccaaaattactaataaattgacataaccaacattaaaactcataattattttgttgaccattttgttaaaatctacttttcaaaaaaaaaaaagctagaaatgaatctaggcgtaggtgaacttttgctaagcagaaataacactactttgttgcctagagaaagataacttctcaagtatttttattccagtcctagatcatatatgttcttttgtgcaacggaattctaacagttctaagagaaagatcactgctgtttacagcgccttgtgcagccttagattttaatattcttttgtcattgttacatctcatagagtaaagctcttattaccttgatcctgagtcagaaatcccacctgaaatcaccttttttcccccttgatcaaacatcccatccttcagctaccatactgttgctacagggattttgtggactgtggcccctgtcccgaggttggcaccttcagttcagcacagcctgagcagtgagaaggtctgaaaggagagtatatagttaagatccttgagaaagggctgcctgaggaactgacctcttaaagatctcaggatctttaagacaacaagttaggttcctactggagttacctgccagaatggcctcttaattaactcaggtaatgaagagctaactgtgttataatcatcttgcttttgcctgaatttggagaaagtattataattaagttcccagtatcagaaatgtccttacataagattaaaatatcttgatgactaataccattctatgagaaagagtagttatatgcccagactgtattaatttactttagaaactaatgtttgaagtaatggaaaaaattttaaattataaagctaaggtgcaataacatttgctacttatttatagaattatttgaagaattttgtttttgaagtaatgctttaaggagtataagatattcaagataaattatactataaaatgattttattgaaagttgaaggttacacaaattgttttaggtatgagcagaagaggttaaggtatttctaaaggtaacatatagtcaagagtttcctcaaaatagttatttggagaagaatcagaatgtctgtgtatttcttgtctgtttctatgttgtcttatagctctgactaaatgtgtttacctatgcaaaagatttattaaagcatagaaaaggtgaatgaataaaaatataaaataattgtcctttttcttaaaa

SEQ ID NO: 294249 - DNA, 2783 bp, Homo sapiens
ccacccagtgcactgcgtttaggcatgcccacatggagagaggcgaccacagcggtgatcataagcccatggtgggcagaggccctatggagccaagggctccggccgccacccccgctccgccaccagcagcgctgccaggactcgctcttcctcctcctcctcacacgccggctcggatgatctcctgccatgactcagcgcttctcgcaggctgccctgctggggacaccggcttcgctcgggcccctcccgacgcgtccaccccctctcgccacccacgcccgcccccagccgctgggcctttcccagtgcggccgccgccgccacagctgcagtcagcaccgtcaccccagcagcatccgccgcctgcaccgcgcgtgcggcccgccccggcctgaccccgccgccgaacccggcgccagccatggagcccgaagccccccgtcgccgccacacccatcagcgcggctacctgctgacacggaaccctcacctcaacaaggacttggcctttaccctggaagagagacagcaattgaacattcatggattgttgccaccttccttcaacagtcaggagatccaggttcttagagtagtaaaaaatttcgagcatctgaactctgactttgacaggtatcttctcttaatggatctccaagatagaaatgaaaaactcttttatagagtgctgacatctgacattgagaaattcatgcctattgtttatactcccactgtgggtctggcttgccaacaatatagtttggtgtttcggaagccaagaggtctctttattactatccacgatcgagggcatattgcttcagttctcaatgcatggccagaagatgtcatcaaggccattgtggtgactgatggagagcgtattcttggcttgggagaccttggctgtaatggaatgggcatccctgtgggtaaattggctctatatacagcttgcggagggatgaatcctcaagaatgtctgcctgtcattctggatgtgggaaccgaaaatgaggagttacttaaagatccactctacattggactacggcagagaagagtaagaggttctgaatatgatgattttttggacgaattcatggaggcagtttcttccaagtatggcatgaattgccttattcagtttgaagattttgccaatgtgaatgcatttcgtctcctgaacaagtatcgaaaccagtattgcacattcaatgatgatattcaaggaacagcatctgttgcagttgcaggtctccttgcagctcttcgaataaccaagaacaaactgtctgatcaaacaatactattccaaggagctggagaggctgccctagggattgcacacctgattgtgatggccttggaaaaagaaggtttaccaaaagagaaagccatcaaaaagatatggctggttgattcaaaaggattaatagttaagggacgtgcttccttaacacaagagaaagagaagtttgcccatgaacatgaagaaatgaagaacctagaagccattgttcaagaaataaaaccaactgccctcataggagttgctgcaattggtggtgcattctcagaacaaattctcaaagatatggctgccttcaatgaacggcctattatttttgctttgagtaatccaactagcaaagcagaatgttctgcagagcagtgctacaaaataaccaagggacgtgcaatttttgccagtggcagtccttttgatccagtcactcttccaaatggacagaccctatatcctggccaaggcaacaattcctatgtgttccctggagttgctcttggtgttgtggcgtgtggattgaggcagatcacagataatattttcctcactactgctgaggttatagctcagcaagtgtcagataaacacttggaagagggtcggctttatcctcctttgaataccattagagatgtttctctgaaaattgcagaaaagattgtgaaagatgcataccaagaaaagacagccacagtttatcctgaaccgcaaaacaaagaagcatttgtccgctcccagatgtatagtactgattatgaccagattctacctgattgttattcttggcctgaagaggtgcagaaaatacagaccaaagttgaccagtaggataatagcaaacatttctaactctattaatgaggtctttaaacctttcataatttttaaaggttggaatcttttataatgattcataagacacttagattaagattttactttaacagtctaaaaattgatagaagaatatcgatataaattgggataaacatcacatgagacaattttgcttcactttgccttctggttatttatggtttctgtctgaattattctgcctacgttctctttaaaagctgttgtacgtactacggagaaactcatcatttttatacaggacactaatgggaagaccaaaattactaataaattgacataaccaacattaaaactcataattattttgttgaccattttgttaaaatctacttttcaaaaaaaaaaaaaatgggcttcgttggctcagagggggagctcttggggcgcttccctctagcgaggggtattcaagaagccttcatacttacttcagtgggtcagatcggtgcgctgcgcgaagcgggattacgctactccaagcggggcagtccgcttccccagaatgggcggaccgcaagacgacctggctcgcaagcccctaaggccgcactgtaaaggcgcgtcgtggcttttctaaggtccccca

SEQ ID NO: 294250 - DNA, 3717 bp, Homo sapiens
ccacccagtgcactgcgtttaggcatgcccacatggagagaggcgaccacagcggtgatcataagcccatggtgggcagaggccctatggagccaagggctccggccgccacccccgctccgccaccagcagcgctgccaggactcgctcttcctcctcctcctcacacgccggctcggatgatctcctgccatgactcagcgcttctcgcaggctgccctgctggggacaccggcttcgctcgggcccctcccgacgcgtccaccccctctcgccacccacgcccgcccccagccgctgggcctttcccagtgcggccgccgccgccacagctgcagtcagcaccgtcaccccagcagcatccgccgcctgcaccgcgcgtgcggcccgccccggcctgaccccgccgccgaacccggcgccagccatggagcccgaagccccccgtcgccgccacacccatcagcgcggctacctgctgacacggaaccctcacctcaacaaggacttggcctttaccctggaagagagacagcaattgaacattcatggattgttgccaccttccttcaacagtcaggagatccaggttcttagagtagtaaaaaatttcgagcatctgaactctgactttgacaggtatcttctcttaatggatctccaagatagaaatgaaaaactcttttatagagtgctgacatctgacattgagaaattcatgcctattgtttatactcccactgtgggtctggcttgccaacaatatagtttggtgtttcggaagccaagaggtctctttattactatccacgatcgagggcatattgcttcagttctcaatgcatggccagaagatgtcatcaaggccattgtggtgactgatggagagcgtattcttggcttgggagaccttggctgtaatggaatgggcatccctgtgggtaaattggctctatatacagcttgcggagggatgaatcctcaagaatgtctgcctgtcattctggatgtgggaaccgaaaatgaggagttacttaaagatccactctacattggactacggcagagaagagtaagaggttctgaatatgatgattttttggacgaattcatggaggcagtttcttccaaagtcttcaatgcaaaaaagtcggtgcttcgtttcagtatggcatgaattgccttattcagtttgaagattttgccaatgtgaatgcatttcgtctcctgaacaagtatcgaaaccagtattgcacattcaatgatgatattcaaggaacagcatctgttgcagttgcaggtctccttgcagctcttcgaataaccaagaacaaactgtctgatcaaacaatactattccaaggagctggagaggctgccctagggattgcacacctgattgtgatggccttggaaaaagaaggtttaccaaaagagaaagccatcaaaaagatatggctggttgattcaaaaggattaatagttaagggacgtgcttccttaacacaagagaaagagaagtttgcccatgaacatgaagaaatgaagaacctagaagccattgttcaagaaataaaaccaactgccctcataggagttgctgcaattggtggtgcattctcagaacaaattctcaaagatatggctgccttcaatgaacggcctattatttttgctttgagtaatccaactagcaaagcagaatgttctgcagagcagtgctacaaaataaccaagggacgtgcaatttttgccagtggcagtccttttgatccagtcactcttccaaatggacagaccctatatcctggccaaggcaacaattcctatgtgttccctggagttgctcttggtgttgtggcgtgtggattgaggcagatcacagataatattttcctcactactgctgaggttatagctcagcaagtgtcagataaacacttggaagagggtcggctttatcctcctttgaataccattagagatgtttctctgaaaattgcagaaaagattgtgaaagatgcataccaagaaaagacagccacagtttatcctgaaccgcaaaacaaagaagcatttgtccgctcccagatgtatagtactgattatgaccagattctacctgattgttattcttggcctgaagaggtgcagaaaatacagaccaaagttgaccagtaggataatagcaaacatttctaactctattaatgaggtctttaaacctttcataatttttaaaggttggaatcttttataatgattcataagacacttagattaagattttactttaacagtctaaaaattgatagaagaatatcgatataaattgggataaacatcacatgagacaattttgcttcactttgccttctggttatttatggtttctgtctgaattattctgcctacgttctctttaaaagctgttgtacgtactacggagaaactcatcatttttatacaggacactaatgggaagaccaaaattactaataaattgacataaccaacattaaaactcataattattttgttgaccattttgttaaaatctacttttcaaaaaaaaaaaagctagaaatgaatctaggcgtaggtgaacttttgctaagcagaaataacactactttgttgcctagagaaagataacttctcaagtatttttattccagtcctagatcatatatgttcttttgtgcaacggaattctaacagttctaagagaaagatcactgctgtttacagcgccttgtgcagccttagattttaatattcttttgtcattgttacatctcatagagtaaagctcttattaccttgatcctgagtcagaaatcccacctgaaatcaccttttttcccccttgatcaaacatcccatccttcagctaccatactgttgctacagggattttgtggactgtggcccctgtcccgaggttggcaccttcagttcagcacagcctgagcagtgagaaggtctgaaaggagagtatatagttaagatccttgagaaagggctgcctgaggaactgacctcttaaagatctcaggatctttaagacaacaagttaggttcctactggagttacctgccagaatggcctcttaattaactcaggtaatgaagagctaactgtgttataatcatcttgcttttgcctgaatttggagaaagtattataattaagttcccagtatcagaaatgtccttacataagattaaaatatcttgatgactaataccattctatgagaaagagtagttatatgcccagactgtattaatttactttagaaactaatgtttgaagtaatggaaaaaattttaaattataaagctaaggtgcaataacatttgctacttatttatagaattatttgaagaattttgtttttgaagtaatgctttaaggagtataagatattcaagataaattatactataaaatgattttattgaaagttgaaggttacacaaattgttttaggtatgagcagaagaggttaaggtatttctaaaggtaacatatagtcaagagtttcctcaaaatagttatttggagaagaatcagaatgtctgtgtatttcttgtctgtttctatgttgtcttatagctctgactaaatgtgtttacctatgcaaaagatttattaaagcatagaaaaggtgaatgaataaaaatataaaataattgtcctttttcttaaaa

SEQ ID NO: 294251 - DNA, 3265 bp, Homo sapiens
cgccctttctttttcctgatgagaaatctgcagtcattcaagttgatatatgtttgtaatacatcagttttctctggatgttttaatggacttggcctttaccctggaagagagacagcaattgaacattcatggattgttgccaccttccttcaacagtcaggagatccaggttcttagagtagtaaaaaatttcgagcatctgaactctgactttgacaggtatcttctcttaatggatctccaagatagaaatgaaaaactcttttatagagtgctgacatctgacattgagaaattcatgcctattgtttatactcccactgtgggtctggcttgccaacaatatagtttggtgtttcggaagccaagaggtctctttattactatccacgatcgagggcatattgcttcagttctcaatgcatggccagaagatgtcatcaaggccattgtggtgactgatggagagcgtattcttggcttgggagaccttggctgtaatggaatgggcatccctgtgggtaaattggctctatatacagcttgcggagggatgaatcctcaagaatgtctgcctgtcattctggatgtgggaaccgaaaatgaggagttacttaaagatccactctacattggactacggcagagaagagtaagaggttctgaatatgatgattttttggacgaattcatggaggcagtttcttccaagtatggcatgaattgccttattcagtttgaagattttgccaatgtgaatgcatttcgtctcctgaacaagtatcgaaaccagtattgcacattcaatgatgatattcaaggaacagcatctgttgcagttgcaggtctccttgcagctcttcgaataaccaagaacaaactgtctgatcaaacaatactattccaaggagctggagaggctgccctagggattgcacacctgattgtgatggccttggaaaaagaaggtttaccaaaagagaaagccatcaaaaagatatggctggttgattcaaaaggattaatagttaagggacgtgcttccttaacacaagagaaagagaagtttgcccatgaacatgaagaaatgaagaacctagaagccattgttcaagaaataaaaccaactgccctcataggagttgctgcaattggtggtgcattctcagaacaaattctcaaagatatggctgccttcaatgaacggcctattatttttgctttgagtaatccaactagcaaagcagaatgttctgcagagcagtgctacaaaataaccaagggacgtgcaatttttgccagtggcagtccttttgatccagtcactcttccaaatggacagaccctatatcctggccaaggcaacaattcctatgtgttccctggagttgctcttggtgttgtggcgtgtggattgaggcagatcacagataatattttcctcactactgctgaggttatagctcagcaagtgtcagataaacacttggaagagggtcggctttatcctcctttgaataccattagagatgtttctctgaaaattgcagaaaagattgtgaaagatgcataccaagaaaagacagccacagtttatcctgaaccgcaaaacaaagaagcatttgtccgctcccagatgtatagtactgattatgaccagattctacctgattgttattcttggcctgaagaggtgcagaaaatacagaccaaagttgaccagtaggataatagcaaacatttctaactctattaatgaggtctttaaacctttcataatttttaaaggttggaatcttttataatgattcataagacacttagattaagattttactttaacagtctaaaaattgatagaagaatatcgatataaattgggataaacatcacatgagacaattttgcttcactttgccttctggttatttatggtttctgtctgaattattctgcctacgttctctttaaaagctgttgtacgtactacggagaaactcatcatttttatacaggacactaatgggaagaccaaaattactaataaattgacataaccaacattaaaactcataattattttgttgaccattttgttaaaatctacttttcaaaaaaaaaaaagctagaaatgaatctaggcgtaggtgaacttttgctaagcagaaataacactactttgttgcctagagaaagataacttctcaagtatttttattccagtcctagatcatatatgttcttttgtgcaacggaattctaacagttctaagagaaagatcactgctgtttacagcgccttgtgcagccttagattttaatattcttttgtcattgttacatctcatagagtaaagctcttattaccttgatcctgagtcagaaatcccacctgaaatcaccttttttcccccttgatcaaacatcccatccttcagctaccatactgttgctacagggattttgtggactgtggcccctgtcccgaggttggcaccttcagttcagcacagcctgagcagtgagaaggtctgaaaggagagtatatagttaagatccttgagaaagggctgcctgaggaactgacctcttaaagatctcaggatctttaagacaacaagttaggttcctactggagttacctgccagaatggcctcttaattaactcaggtaatgaagagctaactgtgttataatcatcttgcttttgcctgaatttggagaaagtattataattaagttcccagtatcagaaatgtccttacataagattaaaatatcttgatgactaataccattctatgagaaagagtagttatatgcccagactgtattaatttactttagaaactaatgtttgaagtaatggaaaaaattttaaattataaagctaaggtgcaataacatttgctacttatttatagaattatttgaagaattttgtttttgaagtaatgctttaaggagtataagatattcaagataaattatactataaaatgattttattgaaagttgaaggttacacaaattgttttaggtatgagcagaagaggttaaggtatttctaaaggtaacatatagtcaagagtttcctcaaaatagttatttggagaagaatcagaatgtctgtgtatttcttgtctgtttctatgttgtcttatagctctgactaaatgtgtttacctatgcaaaagatttattaaagcatagaaaaggtgaatgaataaaaatataaaataattgtcctttttcttaaaa

SEQ ID NO: 294252 - DNA, 3508 bp, Homo sapiens
ccacccagtgcactgcgtttaggcatgcccacatggagagaggcgaccacagcggtgatcataagcccatggtgggcagaggccctatggagccaagggctccggccgccacccccgctccgccaccagcagcgctgccaggactcgctcttcctcctcctcctcacacgccggctcggatgatctcctgccatgactcagcgcttctcgcaggctgccctgctggggacaccggcttcgctcgggcccctcccgacgcgtccaccccctctcgccacccacgcccgcccccagccgctgggcctttcccagtgcggccgccgccgccacagctgcagtcagcaccgtcaccccagcagcatccgccgcctgcaccgcgcgtgcggcccgccccggcctgaccccgccgccgaacccggcgccagccatggagcccgaagccccccgtcgccgccacacccatcagcgcggctacctgctgacacggaaccctcacctcaacaaggacttggcctttaccctggaagagagacagcaattgaacattcatggattgttgccaccttccttcaacagtcaggagatccaggttcttagagtagtaaaaaatttcgagcatctgaactctgactttgacaggtatcttctcttaatggatctccaagatagaaatgaaaaactcttttatagagtgctgacatctgacattgagaaattcatgcctattgtttatactcccactgtgggtctggcttgccaacaatatagtttggtgtttcggaagccaagaggtctctttattactatccacgatcgagggcatattgcttcagttctcaatgcatggccagaagatgtcatcaaggccattgtggtgactgatggagagcgtattcttggcttgggagaccttggctgtaatggaatgggcatccctgtgggtaaattggctctatatacagcttgcggagggatgaatcctcaagaatgtctgcctgtcattctggatgtgggaaccgaaaatgaggagttacttaaagatccactctacattggactacggcagagaagagtaagaggttctgaatatgatgattttttggacgaattcatggaggcagtttcttccaagtatggcatgaattgccttattcagtttgaagattttgccaatgtgaatgcatttcgtctcctgaacaagtatcgaaaccagtattgcacattcaatgatgatattcaaggaacagcatctgttgcagttgcaggtctccttgcagctcttcgaataaccaagaacaaactgtctgatcaaacaatactattccaaggagctggagaggctgccctagggattgcacacctgattgtgatggccttggaaaaagaaggtttaccaaaagagaaagccatcaaaaagatatggctggttgattcaaaaggattaatagttaagggacgtgcttccttaacacaagagaaagagaagtttgcccatgaacatgaagaaatgaagaacctagaagccattgttcaagaaataaaaccaactgccctcataggagttgctgcaattggtggtgcattctcagaacaaattctcaaagatatggctgccttcaatgaacggcctattatttttgctttgagtaatccaactagcaaagcagaatgttctgcagagcagtgctacaaaataaccaaggttatagctcagcaagtgtcagataaacacttggaagagggtcggctttatcctcctttgaataccattagagatgtttctctgaaaattgcagaaaagattgtgaaagatgcataccaagaaaagacagccacagtttatcctgaaccgcaaaacaaagaagcatttgtccgctcccagatgtatagtactgattatgaccagattctacctgattgttattcttggcctgaagaggtgcagaaaatacagaccaaagttgaccagtaggataatagcaaacatttctaactctattaatgaggtctttaaacctttcataatttttaaaggttggaatcttttataatgattcataagacacttagattaagattttactttaacagtctaaaaattgatagaagaatatcgatataaattgggataaacatcacatgagacaattttgcttcactttgccttctggttatttatggtttctgtctgaattattctgcctacgttctctttaaaagctgttgtacgtactacggagaaactcatcatttttatacaggacactaatgggaagaccaaaattactaataaattgacataaccaacattaaaactcataattattttgttgaccattttgttaaaatctacttttcaaaaaaaaaaaagctagaaatgaatctaggcgtaggtgaacttttgctaagcagaaataacactactttgttgcctagagaaagataacttctcaagtatttttattccagtcctagatcatatatgttcttttgtgcaacggaattctaacagttctaagagaaagatcactgctgtttacagcgccttgtgcagccttagattttaatattcttttgtcattgttacatctcatagagtaaagctcttattaccttgatcctgagtcagaaatcccacctgaaatcaccttttttcccccttgatcaaacatcccatccttcagctaccatactgttgctacagggattttgtggactgtggcccctgtcccgaggttggcaccttcagttcagcacagcctgagcagtgagaaggtctgaaaggagagtatatagttaagatccttgagaaagggctgcctgaggaactgacctcttaaagatctcaggatctttaagacaacaagttaggttcctactggagttacctgccagaatggcctcttaattaactcaggtaatgaagagctaactgtgttataatcatcttgcttttgcctgaatttggagaaagtattataattaagttcccagtatcagaaatgtccttacataagattaaaatatcttgatgactaataccattctatgagaaagagtagttatatgcccagactgtattaatttactttagaaactaatgtttgaagtaatggaaaaaattttaaattataaagctaaggtgcaataacatttgctacttatttatagaattatttgaagaattttgtttttgaagtaatgctttaaggagtataagatattcaagataaattatactataaaatgattttattgaaagttgaaggttacacaaattgttttaggtatgagcagaagaggttaaggtatttctaaaggtaacatatagtcaagagtttcctcaaaatagttatttggagaagaatcagaatgtctgtgtatttcttgtctgtttctatgttgtcttatagctctgactaaatgtgtttacctatgcaaaagatttattaaagcatagaaaaggtgaatgaataaaaatataaaataattgtcctttttcttaaaa

SEQ ID NO: 294253 - DNA, 1993 bp, Homo sapiens
  misc_feature (19)..(19): n is a, c, g, or t
ttggcacaacgtgtgtggncaaagaatccccgttatttatggaattcccagagtcactcttccaaatggacagaccctatatcctggccaaggcaacaattcctatgtgttccctggagttgctcttggtgttgtggcgtgtggattgaggcagatcacagataatattttcctcactactgctgaggttatagctcagcaagtgtcagataaacacttggaagagggtcggctttatcctcctttgaataccattagagatgtttctctgaaaattgcagaaaagattgtgaaagatgcataccaagaaaagacagccacagtttatcctgaaccgcaaaacaaagaagcatttgtccgctcccagatgtatagtactgattatgaccagattctacctgattgttattcttggcctgaagaggtgcagaaaatacagaccaaagttgaccagtaggataatagcaaacatttctaactctattaatgaggtctttaaacctttcataatttttaaaggttggaatcttttataatgattcataagacacttagattaagattttactttaacagtctaaaaattgatagaagaatatcgatataaattgggataaacatcacatgagacaattttgcttcactttgccttctggttatttatggtttctgtctgaattattctgcctacgttctctttaaaagctgttgtacgtactacggagaaactcatcatttttatacaggacactaatgggaagaccaaaattactaataaattgacataaccaacattaaaactcataattattttgttgaccattttgttaaaatctacttttcaaaaaaaaaaaagctagaaatgaatctaggcgtaggtgaacttttgctaagcagaaataacactactttgttgcctagagaaagataacttctcaagtatttttattccagtcctagatcatatatgttcttttgtgcaacggaattctaacagttctaagagaaagatcactgctgtttacagcgccttgtgcagccttagattttaatattcttttgtcattgttacatctcatagagtaaagctcttattaccttgatcctgagtcagaaatcccacctgaaatcaccttttttcccccttgatcaaacatcccatccttcagctaccatactgttgctacagggattttgtggactgtggcccctgtcccgaggttggcaccttcagttcagcacagcctgagcagtgagaaggtctgaaaggagagtatatagttaagatccttgagaaagggctgcctgaggaactgacctcttaaagatctcaggatctttaagacaacaagttaggttcctactggagttacctgccagaatggcctcttaattaactcaggtaatgaagagctaactgtgttataatcatcttgcttttgcctgaatttggagaaagtattataattaagttcccagtatcagaaatgtccttacataagattaaaatatcttgatgactaataccattctatgagaaagagtagttatatgcccagactgtattaatttactttagaaactaatgtttgaagtaatggaaaaaattttaaattataaagctaaggtgcaataacatttgctacttatttatagaattatttgaagaattttgtttttgaagtaatgctttaaggagtataagatattcaagataaattatactataaaatgattttattgaaagttgaaggttacacaaattgttttaggtatgagcagaagaggttaaggtatttctaaaggtaacatatagtcaagagtttcctcaaaatagttatttggagaagaatcagaatgtctgtgtatttcttgtctgtttctatgttgtcttatagctctgactaaatgtgtttacctatgcaaaagatttattaaagcatagaaaaggtgaatgaataaaaatataaaataattgtcctttttcttaaaa

SEQ ID NO: 294254 - DNA, 1865 bp, Homo sapiens
acgacacacccgaactattaaattaatttttttttgtaattagttatactcacagtgttgttatagctcagcaagtgtcagataaacacttggaagagggtcggctttatcctcctttgaataccattagagatgtttctctgaaaattgcagaaaagattgtgaaagatgcataccaagaaaagacagccacagtttatcctgaaccgcaaaacaaagaagcatttgtccgctcccagatgtatagtactgattatgaccagattctacctgattgttattcttggcctgaagaggtgcagaaaatacagaccaaagttgaccagtaggataatagcaaacatttctaactctattaatgaggtctttaaacctttcataatttttaaaggttggaatcttttataatgattcataagacacttagattaagattttactttaacagtctaaaaattgatagaagaatatcgatataaattgggataaacatcacatgagacaattttgcttcactttgccttctggttatttatggtttctgtctgaattattctgcctacgttctctttaaaagctgttgtacgtactacggagaaactcatcatttttatacaggacactaatgggaagaccaaaattactaataaattgacataaccaacattaaaactcataattattttgttgaccattttgttaaaatctacttttcaaaaaaaaaaaagctagaaatgaatctaggcgtaggtgaacttttgctaagcagaaataacactactttgttgcctagagaaagataacttctcaagtatttttattccagtcctagatcatatatgttcttttgtgcaacggaattctaacagttctaagagaaagatcactgctgtttacagcgccttgtgcagccttagattttaatattcttttgtcattgttacatctcatagagtaaagctcttattaccttgatcctgagtcagaaatcccacctgaaatcaccttttttcccccttgatcaaacatcccatccttcagctaccatactgttgctacagggattttgtggactgtggcccctgtcccgaggttggcaccttcagttcagcacagcctgagcagtgagaaggtctgaaaggagagtatatagttaagatccttgagaaagggctgcctgaggaactgacctcttaaagatctcaggatctttaagacaacaagttaggttcctactggagttacctgccagaatggcctcttaattaactcaggtaatgaagagctaactgtgttataatcatcttgcttttgcctgaatttggagaaagtattataattaagttcccagtatcagaaatgtccttacataagattaaaatatcttgatgactaataccattctatgagaaagagtagttatatgcccagactgtattaatttactttagaaactaatgtttgaagtaatggaaaaaattttaaattataaagctaaggtgcaataacatttgctacttatttatagaattatttgaagaattttgtttttgaagtaatgctttaaggagtataagatattcaagataaattatactataaaatgattttattgaaagttgaaggttacacaaattgttttaggtatgagcagaagaggttaaggtatttctaaaggtaacatatagtcaagagtttcctcaaaatagttatttggagaagaatcagaatgtctgtgtatttcttgtctgtttctatgttgtcttatagctctgactaaatgtgtttacctatgcaaaagatttattaaagcatagaaaaggtgaatgaataaaaatataaaataattgtcctttttcttaaaa

SEQ ID NO: 294255 - DNA, 1857 bp, Homo sapiens
tttttctctattgttcctgcaccggagagaaaacgacttccaggttcacacgttatagctcagcaagtgtcagataaacacttggaagagggtcggctttatcctcctttgaataccattagagatgtttctctgaaaattgcagaaaagattgtgaaagatgcataccaagaaaagacagccacagtttatcctgaaccgcaaaacaaagaagcatttgtccgctcccagatgtatagtactgattatgaccagattctacctgattgttattcttggcctgaagaggtgcagaaaatacagaccaaagttgaccagtaggataatagcaaacatttctaactctattaatgaggtctttaaacctttcataatttttaaaggttggaatcttttataatgattcataagacacttagattaagattttactttaacagtctaaaaattgatagaagaatatcgatataaattgggataaacatcacatgagacaattttgcttcactttgccttctggttatttatggtttctgtctgaattattctgcctacgttctctttaaaagctgttgtacgtactacggagaaactcatcatttttatacaggacactaatgggaagaccaaaattactaataaattgacataaccaacattaaaactcataattattttgttgaccattttgttaaaatctacttttcaaaaaaaaaaaagctagaaatgaatctaggcgtaggtgaacttttgctaagcagaaataacactactttgttgcctagagaaagataacttctcaagtatttttattccagtcctagatcatatatgttcttttgtgcaacggaattctaacagttctaagagaaagatcactgctgtttacagcgccttgtgcagccttagattttaatattcttttgtcattgttacatctcatagagtaaagctcttattaccttgatcctgagtcagaaatcccacctgaaatcaccttttttcccccttgatcaaacatcccatccttcagctaccatactgttgctacagggattttgtggactgtggcccctgtcccgaggttggcaccttcagttcagcacagcctgagcagtgagaaggtctgaaaggagagtatatagttaagatccttgagaaagggctgcctgaggaactgacctcttaaagatctcaggatctttaagacaacaagttaggttcctactggagttacctgccagaatggcctcttaattaactcaggtaatgaagagctaactgtgttataatcatcttgcttttgcctgaatttggagaaagtattataattaagttcccagtatcagaaatgtccttacataagattaaaatatcttgatgactaataccattctatgagaaagagtagttatatgcccagactgtattaatttactttagaaactaatgtttgaagtaatggaaaaaattttaaattataaagctaaggtgcaataacatttgctacttatttatagaattatttgaagaattttgtttttgaagtaatgctttaaggagtataagatattcaagataaattatactataaaatgattttattgaaagttgaaggttacacaaattgttttaggtatgagcagaagaggttaaggtatttctaaaggtaacatatagtcaagagtttcctcaaaatagttatttggagaagaatcagaatgtctgtgtatttcttgtctgtttctatgttgtcttatagctctgactaaatgtgtttacctatgcaaaagatttattaaagcatagaaaaggtgaatgaataaaaatataaaataattgtcctttttcttaaaa

SEQ ID NO: 294256 - DNA, 1865 bp, Homo sapiens
  misc_feature (18)..(18): n is a, c, g, or t
  misc_feature (24)..(24): n is a, c, g, or t
  misc_feature (29)..(30): n is a, c, g, or t
  misc_feature (51)..(51): n is a, c, g, or t
  misc_feature (54)..(55): n is a, c, g, or t
tctggccgcccgcgccangatatnaacannataaaaaattataaaaacttnagnntaacgttatagctcagcaagtgtcagataaacacttggaagagggtcggctttatcctcctttgaataccattagagatgtttctctgaaaattgcagaaaagattgtgaaagatgcataccaagaaaagacagccacagtttatcctgaaccgcaaaacaaagaagcatttgtccgctcccagatgtatagtactgattatgaccagattctacctgattgttattcttggcctgaagaggtgcagaaaatacagaccaaagttgaccagtaggataatagcaaacatttctaactctattaatgaggtctttaaacctttcataatttttaaaggttggaatcttttataatgattcataagacacttagattaagattttactttaacagtctaaaaattgatagaagaatatcgatataaattgggataaacatcacatgagacaattttgcttcactttgccttctggttatttatggtttctgtctgaattattctgcctacgttctctttaaaagctgttgtacgtactacggagaaactcatcatttttatacaggacactaatgggaagaccaaaattactaataaattgacataaccaacattaaaactcataattattttgttgaccattttgttaaaatctacttttcaaaaaaaaaaaagctagaaatgaatctaggcgtaggtgaacttttgctaagcagaaataacactactttgttgcctagagaaagataacttctcaagtatttttattccagtcctagatcatatatgttcttttgtgcaacggaattctaacagttctaagagaaagatcactgctgtttacagcgccttgtgcagccttagattttaatattcttttgtcattgttacatctcatagagtaaagctcttattaccttgatcctgagtcagaaatcccacctgaaatcaccttttttcccccttgatcaaacatcccatccttcagctaccatactgttgctacagggattttgtggactgtggcccctgtcccgaggttggcaccttcagttcagcacagcctgagcagtgagaaggtctgaaaggagagtatatagttaagatccttgagaaagggctgcctgaggaactgacctcttaaagatctcaggatctttaagacaacaagttaggttcctactggagttacctgccagaatggcctcttaattaactcaggtaatgaagagctaactgtgttataatcatcttgcttttgcctgaatttggagaaagtattataattaagttcccagtatcagaaatgtccttacataagattaaaatatcttgatgactaataccattctatgagaaagagtagttatatgcccagactgtattaatttactttagaaactaatgtttgaagtaatggaaaaaattttaaattataaagctaaggtgcaataacatttgctacttatttatagaattatttgaagaattttgtttttgaagtaatgctttaaggagtataagatattcaagataaattatactataaaatgattttattgaaagttgaaggttacacaaattgttttaggtatgagcagaagaggttaaggtatttctaaaggtaacatatagtcaagagtttcctcaaaatagttatttggagaagaatcagaatgtctgtgtatttcttgtctgtttctatgttgtcttatagctctgactaaatgtgtttacctatgcaaaagatttattaaagcatagaaaaggtgaatgaataaaaatataaaataattgtcctttttcttaaaa

SEQ ID NO: 294257 - DNA, 1857 bp, Homo sapiens
  misc_feature (27)..(27): n is a, c, g, or t
  misc_feature (36)..(38): n is a, c, g, or t
tatctccccccctactaccttacgaanacaaacaannngttagggtgacaagttatagctcagcaagtgtcagataaacacttggaagagggtcggctttatcctcctttgaataccattagagatgtttctctgaaaattgcagaaaagattgtgaaagatgcataccaagaaaagacagccacagtttatcctgaaccgcaaaacaaagaagcatttgtccgctcccagatgtatagtactgattatgaccagattctacctgattgttattcttggcctgaagaggtgcagaaaatacagaccaaagttgaccagtaggataatagcaaacatttctaactctattaatgaggtctttaaacctttcataatttttaaaggttggaatcttttataatgattcataagacacttagattaagattttactttaacagtctaaaaattgatagaagaatatcgatataaattgggataaacatcacatgagacaattttgcttcactttgccttctggttatttatggtttctgtctgaattattctgcctacgttctctttaaaagctgttgtacgtactacggagaaactcatcatttttatacaggacactaatgggaagaccaaaattactaataaattgacataaccaacattaaaactcataattattttgttgaccattttgttaaaatctacttttcaaaaaaaaaaaagctagaaatgaatctaggcgtaggtgaacttttgctaagcagaaataacactactttgttgcctagagaaagataacttctcaagtatttttattccagtcctagatcatatatgttcttttgtgcaacggaattctaacagttctaagagaaagatcactgctgtttacagcgccttgtgcagccttagattttaatattcttttgtcattgttacatctcatagagtaaagctcttattaccttgatcctgagtcagaaatcccacctgaaatcaccttttttcccccttgatcaaacatcccatccttcagctaccatactgttgctacagggattttgtggactgtggcccctgtcccgaggttggcaccttcagttcagcacagcctgagcagtgagaaggtctgaaaggagagtatatagttaagatccttgagaaagggctgcctgaggaactgacctcttaaagatctcaggatctttaagacaacaagttaggttcctactggagttacctgccagaatggcctcttaattaactcaggtaatgaagagctaactgtgttataatcatcttgcttttgcctgaatttggagaaagtattataattaagttcccagtatcagaaatgtccttacataagattaaaatatcttgatgactaataccattctatgagaaagagtagttatatgcccagactgtattaatttactttagaaactaatgtttgaagtaatggaaaaaattttaaattataaagctaaggtgcaataacatttgctacttatttatagaattatttgaagaattttgtttttgaagtaatgctttaaggagtataagatattcaagataaattatactataaaatgattttattgaaagttgaaggttacacaaattgttttaggtatgagcagaagaggttaaggtatttctaaaggtaacatatagtcaagagtttcctcaaaatagttatttggagaagaatcagaatgtctgtgtatttcttgtctgtttctatgttgtcttatagctctgactaaatgtgtttacctatgcaaaagatttattaaagcatagaaaaggtgaatgaataaaaatataaaataattgtcctttttcttaaaa

SEQ ID NO: 294258 - DNA, 2794 bp, Homo sapiens
ccacccagtgcactgcgtttaggcatgcccacatggagagaggcgaccacagcggtgatcataagcccatggtgggcagaggccctatggagccaagggctccggccgccacccccgctccgccaccagcagcgctgccaggactcgctcttcctcctcctcctcacacgccggctcggatgatctcctgccatgactcagcgcttctcgcaggctgccctgctggggacaccggcttcgctcgggcccctcccgacgcgtccaccccctctcgccacccacgcccgcccccagccgctgggcctttcccagtgcggccgccgccgccacagctgcagtcagcaccgtcaccccagcagcatccgccgcctgcaccgcgcgtgcggcccgccccggcctgaccccgccgccgaacccggcgccagccatggagcccgaagccccccgtcgccgccacacccatcagcgcggctacctgctgacacggaaccctcacctcaacaaggacttggcctttaccctggaagagagacagcaattgaacattcatggattgttgccaccttccttcaacagtcaggagatccaggttcttagagtagtaaaaaatttcgagcatctgaactctgactttgacaggtatcttctcttaatggatctccaagatagaaatgaaaaactcttttatagagtgctgacatctgacattgagaaattcatgcctattgtttatactcccactgtgggtctggcttgccaacaatatagtttggtgtttcggaagccaagaggtctctttattactatccacgatcgagggcatattgcttcagttctcaatgcatggccagaagatgtcatcaaggccattgtggtgactgatggagagcgtattcttggcttgggagaccttggctgtaatggaatgggcatccctgtgggtaaattggctctatatacagcttgcggagggatgaatcctcaagaatgtctgcctgtcattctggatgtgggaaccgaaaatgaggagttacttaaagatccactctacattggactacggcagagaagagtaagaggttctgaatatgatgattttttggacgaattcatggaggcagtttcttccaagtatggcatgaattgccttattcagtttgaagattttgccaatgtgaatgcatttcgtctcctgaacaagtatcgaaaccagtattgcacattcaatgatgatattcaaggaacagcatctgttgcagttgcaggtctccttgcagctcttcgaataaccaagaacaaactgtctgatcaaacaatactattccaaggagctggagaggctgccctagggattgcacacctgattgtgatggccttggaaaaagaaggtttaccaaaagagaaagccatcaaaaagatatggctggttgattcaaaaggattaatagttaagggacgtgcttccttaacacaagagaaagagaagtttgcccatgaacatgaagaaatgaagaacctagaagccattgttcaagaaataaaaccaactgccctcataggagttgctgcaattggtggtgcattctcagaacaaattctcaaagatatggctgccttcaatgaacggcctattatttttgctttgagtaatccaactagcaaagcagaatgttctgcagagcagtgctacaaaataaccaagggacgtgcaatttttgccagtggcagtccttttgatccagtcactcttccaaatggacagaccctatatcctggccaaggcaacaattcctatgtgttccctggagttgctcttggtgttgtggcgtgtggattgaggcagatcacagataatattttcctcactactgctgaggttatagctcagcaagtgtcagataaacacttggaagagggtcggctttatcctcctttgaataccattagagatgtttctctgaaaattgcagaaaagattgtgaaagatgcataccaagaaaagacagccacagtttatcctgaaccgcaaaacaaagaagcatttgtccgctcccagatgtatagtactgattatgaccagattctacctgattgttattcttggcctgaagaggtgcagaaaatacagaccaaagttgaccagtaggataatagcaaacatttctaactctattaatgaggtctttaaacctttcataatttttaaaggttggaatcttttataatgattcataagacacttagattaagattttactttaacagtctaaaaattgatagaagaatatcgatataaattgggataaacatcacatgagacaattttgcttcactttgccttctggttatttatggtttctgtctgaattattctgcctacgttctctttaaaagctgttgtacgtactacggagaaactcatcatttttatacaggacactaatgggaagaccaaaattactaataaattgacataaccaacattaaaactcataattataaaaaataaaaataatggcctcgttggcctcaccgggtgagctctggggccgcctccttttatggagggttaattaatgaacctccttccttgcccgctgcctcggaggtaggttggggaagcggtatacctactcaaggcggcatacggtttcccagatcagggaaatcgagaaacaactgtgtgcaagtggcttataggcctaaacttaaacgccgtgtgtgtggtattctgggctcgccccttgaagcctaaatactctcctcatgcacgggggaacctcacggctttata

SEQ ID NO: 294259 - DNA, 2321 bp, Homo sapiens
ccacccagtgcactgcgtttaggcatgcccacatggagagaggcgaccacagcggtgatcataagcccatggtgggcagaggccctatggagccaagggctccggccgccacccccgctccgccaccagcagcgctgccaggactcgctcttcctcctcctcctcacacgccggctcggatgatctcctgccatgactcagcgcttctcgcaggctgccctgctggggacaccggcttcgctcgggcccctcccgacgcgtccaccccctctcgccacccacgcccgcccccagccgctgggcctttcccagtgcggccgccgccgccacagctgcagtcagcaccgtcaccccagcagcatccgccgcctgcaccgcgcgtgcggcccgccccggcctgaccccgccgccgaacccggcgccagccatggagcccgaagccccccgtcgccgccacacccatcagcgcggctacctgctgacacggaaccctcacctcaacaaggacttggcctttaccctggaagagagacagcaattgaacattcatggattgttgccaccttccttcaacagtcaggagatccaggttcttagagtagtaaaaaatttcgagcatctgaactctgactttgacaggtatcttctcttaatggatctccaagatagaaatgaaaaactcttttatagagtgctgacatctgacattgagaaattcatgcctattgtttatactcccactgtgggtctggcttgccaacaatatagtttggtgtttcggaagccaagaggtctctttattactatccacgatcgagggcatattgcttcagttctcaatgcatggccagaagatgtcatcaaggccattgtggtgactgatggagagcgtattcttggcttgggagaccttggctgtaatggaatgggcatccctgtgggtaaattggctctatatacagcttgcggagggatgaatcctcaagaatgtctgcctgtcattctggatgtgggaaccgaaaatgaggagttacttaaagatccactctacattggactacggcagagaagagtaagaggttctgaatatgatgattttttggacgaattcatggaggcagtttcttccaagtatggcatgaattgccttattcagtttgaagattttgccaatgtgaatgcatttcgtctcctgaacaagtatcgaaaccagtattgcacattcaatgatgatattcaaggaacagcatctgttgcagttgcaggtctccttgcagctcttcgaataaccaagaacaaactgtctgatcaaacaatactattccaaggagctggagaggctgccctagggattgcacacctgattgtgatggccttggaaaaagaaggtttaccaaaagagaaagccatcaaaaagatatggctggttgattcaaaaggattaatagttaagggacgtgcttccttaacacaagagaaagagaagtttgcccatgaacatgaagaaatgaagaacctagaagccattgttcaagaaataaaaccaactgccctcataggagttgctgcaattggtggtgcattctcagaacaaattctcaaagatatggctgccttcaatgaacggcctattatttttgctttgagtaatccaactagcaaagcagaatgttctgcagagcagtgctacaaaataaccaagggacgtgcaatttttgccagtggcagtccttttgatccagtcactcttccaaatggacagaccctatatcctggccaaggcaacaattcctatgtgttccctggagttgctcttggtgttgtggcgtgtggattgaggcagatcacagataatattttcctcactactgctgaggttatagctcagcaagtgtcagataaacacttggaagagggtcggctttatcctcctttgaataccattagagatgtttctctgaaaattgcagaaaagattgtgaaagatgcataccaagaaaagacagccacagtttatcctgaaccgcaaaacaaagaagcatttgtccgctcccagatgtatagtactgattatgaccagattctacctgattgttattcttggcctgaagaggtgcagaaaatacagaccaaagttgaccagtaggataatagcaaacatttctaactctattaatgaggtctttaaacctttcataatttttaaaggttggaatcttttataatgattcataagacacttagattaagattttactttaacagtctaaaaattgatagaagaatatcgatataaattgggataaacatcacatgagaca

SEQ ID NO: 294260 - DNA, 1798 bp, Homo sapiens
ccacccagtgcactgcgtttaggcatgcccacatggagagaggcgaccacagcggtgatcataagcccatggtgggcagaggccctatggagccaagggctccggccgccacccccgctccgccaccagcagcgctgccaggactcgctcttcctcctcctcctcacacgccggctcggatgatctcctgccatgactcagcgcttctcgcaggctgccctgctggggacaccggcttcgctcgggcccctcccgacgcgtccaccccctctcgccacccacgcccgcccccagccgctgggcctttcccagtgcggccgccgccgccacagctgcagtcagcaccgtcaccccagcagcatccgccgcctgcaccgcgcgtgcggcccgccccggcctgaccccgccgccgaacccggcgccagccatggagcccgaagccccccgtcgccgccacacccatcagcgcggctacctgctgacacggaaccctcacctcaacaaggacttggcctttaccctggaagagagacagcaattgaacattcatggattgttgccaccttccttcaacagtcaggagatccaggttcttagagtagtaaaaaatttcgagcatctgaactctgactttgacaggtatcttctcttaatggatctccaagatagaaatgaaaaactcttttatagagtgctgacatctgacattgagaaattcatgcctattgtttatactcccactgtgggtctggcttgccaacaatatagtttggtgtttcggaagccaagaggtctctttattactatccacgatcgagggcatattgcttcagttctcaatgcatggccagaagatgtcatcaaggccattgtggtgactgatggagagcgtattcttggcttgggagaccttggctgtaatggaatgggcatccctgtgggtaaattggctctatatacagcttgcggagggatgaatcctcaagaatgtctgcctgtcattctggatgtgggaaccgaaaatgaggagttacttaaagatccactctacattggactacggcagagaagagtaagaggttctgaatatgatgattttttggacgaattcatggaggcagtttcttccaagtatggcatgaattgccttattcagtttgaagattttgccaatgtgaatgcatttcgtctcctgaacaagtatcgaaaccagtattgcacattcaatgatgatattcaaggaacagcatctgttgcagttgcaggtctccttgcagctcttcgaataaccaagaacaaactgtctgatcaaacaatactattccaaggagctggagaggctgccctagggattgcacacctgattgtgatggccttggaaaaagaaggtttaccaaaagagaaagccatcaaaaagatatggctggttgattcaaaaggattaatagttaagggacgtgcttccttaacacaagagaaagagaagtttgcccatgaacatgaagaaatgaagaacctagaagccattgttcaagaaataaaaccaactgccctcataggagttgctgcaattggtggtgcattctcagaacaaattctcaaagatatggctgccttcaatgaacggcctattatttttgctttgagtaatccaactagcaaagcagaatgttctgcagagcagtgctacaaaataaccaagggacgtgcaatttttgccagtggcagtccttttgatcctgcctcaatccatacagccacaacaccaagagcaactcccagatacaccgttcgcaga

SEQ ID NO: 294261 - DNA, 817 bp, Homo sapiens
aaagagcgatggagactgcggcccaagttaggattaggacagcggtttttcagtccggagattccggccacaactatttttgtctgtttttatcgtaagccagagtctttgggtgcagctctgggacacctaaagggcctggagaaattcaggcggggccagtgctgtgggggtagatgttagacgtggaagggaccctagagagccttgactgtgaggactgagacagggcctcctttgttgcccaggccggagtgcagtggctattcacaggtcgataatgcaatcatggtgcacactacagccttgaacttctgggctcatgtgatccttctgcctcagcctcccagcgctatcctcatcatacatatactgtgaagataaaatatctgttgaagattctttgagcaccttgggccagaagagctacagaaagccaaggtgtggctgtgatgacactgaattcagctcaagacccaggagaaccttacatctattcttatttccacaaggaagtgcacacatggctaatgcaaattcttccataataatgatataaacttgagttgtccaggtttgatgagacccacatcttgtatatacagtgtcatctactgcctctgttaggggctctaggggataaaggaaactatattaagaaatgcagcatctgtttctccctgtgtgaccaccctacttccaagaagtttctgtatccttggctgaagtgcactgtgtgtatgtgtatgtgtgtacactcttctacatcaatctgtaagtcactgaaatgctgcagatgttttaaaaaaattccacc

SEQ ID NO: 294262 - DNA, 624 bp, Homo sapiens
aaagagcgatggagactgcggcccaagttaggattaggacagcggtttttcagtccggagattccggccacaactatttttgtctgtttttatcgtaagccagagtctttgggtgcagctctgggacacctaaagggcctggagaaattcaggcggggccagtgctgtgggggtagatgttagacgtggaagggaccctagagagccttgactgtgaggactgagacagggcctcctttgttgcccaggccggagtgcagtggctattcacaggtcgataatgcaatcatggtgcacactacagccttgaacttctgggctcatgtgatccttctgcctcagcctcccagaaataagaagaaaaaaaaggatattaccaacaatggaagaggaatgcagagtggcaacagctccaagtggacctggcagactatgaacactagaatcaccaaggaaacatggagctatgaaatggcaaaaggctgtgtgaaaaccctgacgctttttggttcagcctttaaaaaccaaatgaaaactcaagagatacaagagtgtggttattttgatgaacaactcacaaactagttgaattaaaagaaactggttcaaatgaacacaaaccta

SEQ ID NO: 294263 - DNA, 2939 bp, Homo sapiens
ccgtgaagatgcatcatggtggactgtggtctcttctctgtggaatcctcgggagagtcccatgatcctaggagagggtgagagggcagatgtaagccagcattaagaagcctcaagcagagccgcaggaataatccgtgaattccctaacaatcctaaaggatctgcaggatgcttcaggcctgcctagatgttgtagggatcatgaatccgctgtaaattgagaggctggctgagacctgccaggtccaaataacctccccctgaggaaaaaaaaaagccactcttctagaaagaagaggagcacatcaaacccaggaacagaaatatttcactgctttattctccagtgtacatcccatggagaaacactagcagtccagtcctcagggccccttgaatttacttcatattcagttcctagctgagcaggaccttcacgtcactccttcattgtcttggaatttcattttgggacagatactttgagcagccataacatcagataaaggattgtcccatgagcctaggagagggcagatgtaagccagcctgtagtagcatcaagaagaggcccaggaataaaccacaatatttctcaggatccagaaacatctgcaacatttttcagatgtgtctagacattgtagagaaagaagaggaacacaccacagcaaaaataagacatcttccagtgttttgttgtcctgtggtgaacccagggagaaaatatagcagtactgtctgcaaagccgcttgactttacctcgtatatgggtcacagctgagcacgtgtttcatgtcgtgagtgggcactccaacatcgccttgagatttcatcctggaacatagagggtgagcagcaataagttcagcctagggttttctgggtctgaatccacgtcttccaaactaaaactttctgagttcacagaggaagaccctcatggaaatccactgcggaatccacagtgcccctcaactgcactactgttcaccagtttcaggcttgccatcaccacagagggcatctgagatattgtctgaacctcatctgcacccatgagagaccagatcgaggcagactgatagctctgacagctaggtgcctgtacctgcctcaggaatgcatatgcactagtctcaggacaccagtcctcattgtgagctctggctagcatcacaatgaatgtcatcattgcctagagacaagttcctgcctcttgaggaaggagacctccctgtaggtatgtcggctgtggactcttgcctgtcttctctgtgggatccaagagatagtcccatgatcctacgagagagtagatgtgagccagccaaaagaaacatcaaacagaggcccaggaataaattgcaaaatccctaaggatccaaaagatctgcaggattcctcaggcctgcctagatgttgtaggggttctacatgtcatgaagggcaactcctccatcatttcaggattttttttctggaacagagagtgtgaacagcaataaggacagatacaggctggctgacagttctgacagcccgtcgcccaagtctgcatactcttaggcacaaggactgagctatgggctcgggttagcatcacaacgaaggccaccattgcctaggcataagtctctgcggctttgcggagaagaactctgtggaggttagtcagtggtggactctcgcctcatttctctgtgggattcccgtgatagtcccatgaggctaggagagggaggaggtgagccagcctgaagaaaagtcaagcacagccccaggaataagccgcaaaactcctacagatccaaaaggacctggaggatgcctaaggcctcccggactttgtcaggcctagagtttccttggtctggctcaatgtcttccaaactcaaccattcccagttcatggaaaatgaccctcatgggattcccttgtaaaagctgcatgattgctggaggatggtttattgtcctacagccaacccaaaaacggcactaccagtcatgttgcagggccccttgaattaacctcgaattaggtttccagatgagcaggtgcttcatgttgtgaaggggccctcctccatcatcctagaatttcattctgggacacagagtgtgagcagcaataagagttgcactccgttgcctgggctggagtgcagcgtcatgatctccagtcactgcaagctctgcctcccgggttcatgccattctcctgcctcagcctcctgagtagctgggactacaggctgggtccactttgcccctcaacagcattactggacacctttgtcagactagcaatttccacagacaccctctgtgaacatttttcaacatcatctgcagcagtgagaggccagtttgatgtgtaagaatactgcttgactttggacttgcctttgtcatggttcctgcctttctcatagatctcctgccaggacaaggatgataggaggcaaggaagtcaagggcccagccccattcactgaaagctgcctctgggatctcaggtatgattccatcacataaaatcccctcaacaactcaccagactatattccaatctccgtgggacctgattcttgcacacagcctctttcacgaatggagccagaagagcagttttcagtgaccatctcagtttggaaaagcctcctccttcagtgggtctcagccacagagtcatcccgaaggggctctaaggtcaataattttagggtctgacagttgattatcacagacagactttttcatgatagcagatcatctctgtctatatcattttcctctgcttaggcaggctgacagctctgacagccaggcacttgaatctacctggcaaatgttcatgctctagtctcagtgcaaaaggcctgtttgggagttctggctagtgtcacaataaatgccgccattgcctagt

SEQ ID NO: 294264 - DNA, 1904 bp, Homo sapiens
atttttttttatagttcattaattagtctttattatgtgaaaagacttttctaaaattcttccataataattgaagatataaattacaataattaaaatttacaaaagaataaaagcattaaaataaagtgtgaaaaatttaaaaagggtaaagatgaaaattatttaatttttaatctcaaaaatccgaaagtgattttatcaatgtcctaagaaaattaaaatgaaaacaaacttaataatgtaaagaaaggaggtttctgccgggctgggggcgggagctacggcttctctggggacgcggaagcgagaagcagggaccttggggcgcgcccggttttccgggacggtgccccggcccccagcccacgcctccggccgctggcatggtgctgctggctgggacccggccgcagggtggctgggagcgctgcatgaccccgccaccgccgtccccactcctaggcgcacaggtcgaggaggaccgcgctgactacaaagagttccagggccccacacctgcagcatagcctgggacgactctgtaccctttccaggacgaggaggagcacggcgtcgagggcttggagagcgtcccggaggagggcgtccaggaggcatggggctgctgcggacgctggtgcggcgaggggtgagcgttgagaaggcgcaggagactgaccacaatggctggaccagccttaatgtcgcctgctaccacggctttgtggatataccgtggtggccttagctgagtaaccccacactgacgtcaactggcaggacagggaggggaacgcagccctaaatacagctgcacaggcaggagctgcctctggccccatgggcaccgttgccttggacactggctctcagccttgtgcttcctggtcagcatcacgtgggctggttcatttgagctttaacacagatctggtggaaacacaggctgccaggccctgcccctggagtctttctttgaataggcctggggtggggcccaagaatgagcagaagaacaggtttcctggtgaggctgatgccgctggcccagggttctcacgttgaggaccgagagctttgaggttttcatacctgatgatgtccaggaacccttctcagtaggcactgaagaccatcagcagaatcacagaccccaggagagatgtcgtcagacagacacagaggcatcaccgaattaaagtgaaaatgaagaaaggagctgagcatctgtttcatgactttcgtggctgttttactaaagaggctatcctggcccagtcagggcacgctatcatcaccaactacttgttgaactacgttcagggtcttgatcttgaaggagggacgcgttcgggttgaaagccgccatgcagggtcgaacggatcgcatcggagccctgagctagcaggggcgggtgtccacgcgagggcccccgccgtgggatgtcgccagaggagtggccacttatacgtccgcctcatgcagaggctcctggagcgcccctgccgggagctgttggggaaaaagtaccagcttgagctgccgccgctccccgagaggccgcaaaagcccgagggctccaagaactgcctgcagaggctcagggactgcgagctgtccgcgctgacgccgcgctccatgcggggcccagaggaccggggcgccctggaccacatggtcaggatgaccacgagcctctaacagccccgccggggccctcgcgtgccagactatgtgccccgagagcaccttgtgctgggggaagaggcggctggcggtgcaggaaatcctggcggcgcaggaaattccggcggcgcggcgaggggtggggggaggcaggcgcaggaggcgggcgaagaggagggcgcagagtagcataagccgctcggcctagcggccg

SEQ ID NO: 294265 - DNA, 345 bp, Homo sapiens
ttttttttttaactcaagcaacccacaggccggtttaaagtggtctttaattactgaagactttcccttatttaaagaaataggggaaacttggaggtctagattagatttctttccaacggttgctatgtaactttgtgacatttgaaagattaaagttgcttctgacggcactacagtagaacctcaatatttgcatgtttcttccttaaatttcccctttccctgacactgtacatacactttctaaaatttgttttttaatttttacttttcacttttcaatttttaaggaaatagagatggggtttcaccatgttgcccaggctggtctcaaactcctgg

SEQ ID NO: 294266 - DNA, 1445 bp, Homo sapiens
tgggtccggtcctagggtcacacccaccgcagggtctggcttggtacagttgggtgcatgcagaagtaggtggagctgctgttgcagccttgagagagttttattgtaaaactcttgtaatttatagtaatcggaggggaaaacacctcttccttttaattgctctgaggaccgctgccaaagaaacgcagtagatccgctccctcttgggggcggggagaaagaacgggttgtgtccgccatgttggtgaagtcaagcgaaggcgactagagctccaggagggccagttctgtgggctctagtcggccatattaataaagagaaagggaaggctgaccgtccttcgcctccgcccccacatacacaccccttcttcccactccgctctcacgactaagctctcacgattaaggcacgcctgcctcgattgtccagcctctgccagaagaaagcttagcagccagcgcctcagtagagacctaagggcgctgaatgagtgggaaagggaaatgccgaccaattgcgctgcggcgggctgtgccactacctacaacaagcacattaacatcagcttccacaggtaacctgggcagggagtgggggtgacggaaactggagttcctattgtggctatctcttgtgtggaaggaacaggaggattctgctaattctaataactttcccagctggtagcagggaagcatcgtatgtcctttgtgtttctcaaatctgcccaattgttctctgctttcggggaagctttactcattttctaaaagaaatccaagtactgtttggtcattaccccttagtaaaaaaaagtaacaggaggatatcgtaattttctactgttttattcctctgttagaccgggccttgacatgaatgacgccgtaagggagaaagagatcttcccaatcagcaatcaccgtaaaagcctgctgtgttcccgttaaaattaggaaattctcactagatgaattgacatgggaggcatttagatttctaatagtcacatagtaattctgcggaggaattgagtcatctttgatagccatggaattaagcgatgttaattaaagtgcaaaagataacctttctgttcttactagaatagagtaataaaaagaacctaggttttcttttgtttgctggaagaaaaatcaaaattctttagttctgtcaaaccagaactcttgaaagcactttgaacaatgcctggaaaataacaggtactctgtaaatgtttaccttctctgcaagtgcctgccacgtgcccgaagaaaagacacattaaaaagttaagtgacaccagtcctgattttatatattttatatacctaacaacgtatatgttagtatgtagaaattatatccttgacctttttccctacctattacgaactgtacttttattaaaagctgccacttaaaaaaaatcttg

SEQ ID NO: 294267 - DNA, 4741 bp, Homo sapiens
tgggtccggtcctagggtcacacccaccgcagggtctggcttggtacagttgggtgcatgcagaagtaggtggagctgctgttgcagccttgagagagttttattgtaaaactcttgtaatttatagtaatcggaggggaaaacacctcttccttttaattgctctgaggaccgctgccaaagaaacgcagtagatccgctccctcttgggggcggggagaaagaacgggttgtgtccgccatgttggtgaagtcaagcgaaggcgactagagctccaggagggccagttctgtgggctctagtcggccatattaataaagagaaagggaaggctgaccgtccttcgcctccgcccccacatacacaccccttcttcccactccgctctcacgactaagctctcacgattaaggcacgcctgcctcgattgtccagcctctgccagaagaaagcttagcagccagcgcctcagtagagacctaagggcgctgaatgagtgggaaagggaaatgccgaccaattgcgctgcggcgggctgtgccactacctacaacaagcacattaacatcagcttccacaggtttcctttggatcctaaaagaagaaaagaatgggttcgcctggttaggcgcaaaaattttgtgccaggaaaacacacttttctttgttcaaagcactttgaagcctcctgttttgacctaacaggacaaactcgacgacttaaaatggatgctgttccaaccatttttgatttttgtacccatataaagtctatgaaactcaagtcaaggaatcttttgaagaaaaacaacagttgttctccagctggaccatctaatttaaaatcaaacattagtagtcagcaagtactacttgaacacagctatgcctttaggaatcctatggaggcaaaaaagaggatcattaaactggaaaaagaaatagcaagcttaagaagaaaaatgaaaacttgcctacaaaaggaacgcagagcaactcgaagatggatcaaagccacgtgtttggtaaagaatttagaagcaaatagtgtattacctaaaggtacatcagaacacatgttaccaactgccttaagcagtcttcctttggaagattttaagatccttgaacaagatcaacaagataaaacactgctaagtctaaatctaaaacagaccaagagtaccttcatttaaatttagcttgcacagagcttgatgcctatccttcattcttttcagaagtaaagataattatggcacttatgccaaaattcattatttaataaagttttacttgaagtaacattactgaatttgtgaagacttgattacaaaagaataaaaaacttcatatggaaattttatttgaaaatgagtggaagtgccttacattagaattacggacttaaaaattttgctaataaattgtgtgtttgaaaggtgttttttgtttttgtctttttaaactactgttaaaagaacagcttatgataagtaatatgtttaacttagagaagaattttttcctgtaccaaagttggcatattgcattctaaataagatgctaaataagagttaaccaacattcaacatgaccttaaaactgctgggttttgtattaattaaattataattggcactgtgatttgaaaaatttatagaaaaaaaggtacagggcaagtttttaaattaaaactttctatattttgttttaccagtaaaagtgagcttatcatggcctctctcataagaatgattttaaaataggttgtaaaatattttgaaaatatttgaatgtgaagtaccattgagtcatccaaactaggtaaggcctcaagtactttaaactagtaaaatctagtagctgataatattcacctaagtaagtgttgtaaaataattcagagttcaggacctagcttagataaatgtatactactctttttctcatagtaaaaatcttacatttccaacttcaaaattggtgcttccatatttgttgataaccaaaactcctaaggttttttgttttctttttaactactttccaaatgcatactatacctcagaaatagtgtatcaatatagtgggctttttttttcctcttcataaacccacagtaaaatttaatcacaggaaactacttatatcttcacactttgtattgataacttaaaatggcatcagtttatcttagacatcagcttgctttttatctccttttttagtgagtgaaatagagcaactagcatgcctgtgttcccagctacttgggaggctaaggtgggaagatcaattgaacctaggaggttgaggctatagtgagctgtgattgcacgactgcactccagcctgggcaatggagtgagactcctgtctctaaaacagcaacaacaaaaataaagcaaccatagtgcataagggaaattaaatgttccctatagaaatatgtgtatgtctgtgatagtggtatgcaaatgctaattattttataaaataaaagttcagaactattcttatcattgccacttgaacaattaaagggtttgctttatttcactaatgtttaataggaaccctttgcttcaaacagctttgttgaaatcatgtaaaaatttgttaatagagaatcaagttatttaactcaacttatttaattcaagcttgtgatactaacatacaaaggtagcataaaccaagtcataaattgctgtaatctttcctgtaaagtaatagctacttcatgatttttttaaaaatttcatttttttgctatttaggattgcatttgcttggctcctagtaacaattcttttacagtattagcactctctttactaaggaatgcctcccaaggaaatgcaaaggtaggaaaagtctcttagaatgcccatgaggtatttaaaacagatatttatgaaaatctttttgtgaatgttataaatcttgctagttattttatctttatcttaagtattagatgtagttccttggaattgtcattacatatttatttttttctagtatggtttcaaataactttttgccaacatataatcatcatcaaacattcactgaccatatctattttataactcaaaataagttggacaaataatcattttaataaaaactattttttccaagtataaccactgtcatgtggttcacccttcaccccagatacaaaacacttatttgtgtagcccagttcccatctacagtaataccttgaaaccttaataaattttaaaaatcataaaaataaaatattgtaaaatacaacaaattttggacaaggttacttcatcttcattcattattacctgacagtattaaactactactcaataattttagagtaaacttttctgtgttttccccgtgattttcattgtgctgtcctgacaacatgctccaaactctttgcatcaaattgttttattaacatacatttgtctaccttaaaactagctttattcacagagaaagacctaaaaggagtctattaaaatgctgctttcagtttgatagttttttttttaatcactctgaccataaactaactgaaattataatggattttttttcctctcccggtcacaacacagatcttctgttcatttgttctctgtctactgggcaccaacctctacaaagaaccagccaaaggctaggtacttgatataaaaaggaatattacattattttctgccctcaagttgctctatctcctgaaagaaacaagtaatatttataatacaatatgataaatgctacaaaagaaatagctgtaaagtcctttggtaaatgctgttgaattggaattcagtaagaactataaactgtagacctttttataatcaaatgcttttgtcttgaaacaaaacagattcctccttatattgacttagcaaaggaggtacaaggacattggcatttgacctgaattatggtgttttattgaatgagctataagacaacatttttaccctttaaaatgaacactgaacaaatgtgttaatggtatctttgttaaaaggaaaacatagctataaataaaatactacatcgaaatccagcactggagttcatttgaaatttgatattttgtgtaaagtaacaaacctattaacacagatttttaaaataactcagaatcgtataaagcactttggtacttatttgttctcttttcccttacattctgtgtggtaggtggtattatctctgatttacacatgaagacatccttgttaatgcaatttatttattcattcgggcatttactgtgtgccaacttgcaaaaggaatagaaatgtctgtgatctagatagttctagattgaacatagattttctgccaacaaatcctctctgctgttcacattatcctttgtttaacgtatgaaccaggttactaaaataggataaatcatgtgtcttaaaatatgaaaatagtaaagtctttgaggtcacttgatcttctctaagtagactttataatattgtgttttatctcatttctcaatattagaatacgggtagattttaattttgctataatataggaaatggttcatctttgtaccaaaatattgcattcttctgatatttagacagttggaaactttctaaaattgaggattttgtagtgtatactaaataattgcatattcaaaaaaatgtattctgagtatggtgatattaaacatttttccccaaggaaaaaaagtca

SEQ ID NO: 294268 - DNA, 1439 bp, Homo sapiens
tgggtccggtcctagggtcacacccaccgcagggtctggcttggtacagttgggtgcatgcagaagtaggtggagctgctgttgcagccttgagagagttttattgtaaaactcttgtaatttatagtaatcggaggggaaaacacctcttccttttaattgctctgaggaccgctgccaaagaaacgcagtagatccgctccctcttgggggcggggagaaagaacgggttgtgtccgccatgttggtgaagtcaagcgaaggcgactagagctccaggagggccagttctgtgggctctagtcggccatattaataaagagaaagggaaggctgaccgtccttcgcctccgcccccacatacacaccccttcttcccactccgctctcacgactaagctctcacgattaaggcacgcctgcctcgattgtccagcctctgccagaagaaagcttagcagccagcgcctcagtagagacctaagggcgctgaatgagtgggaaagggaaatgccgaccaattgcgctgcggcgggctgtgccactacctacaacaagcacattaacatcagcttccacaggtttcctttggatcctaaaagaagaaaagaatgggttcgcctggttaggcgcaaaaattttgtgccaggaaaacacacttttctttgttcaaagcactttgaagcctcctgttttgacctaacaggacaaactcgacgacttaaaatggatgctgttccaaccatttttgatttttgtacccatataaagtctatgaaactcaagtcaaggaatcttttgaagaaaaacaacagttgttctccagctggaccatctaatttaaaatcaaacattagtagtcagcaagtactacttgaacacagctatgcctttaggaatcctatggaggcaaaaaagaggatcattaaactggaaaaagaaatagcaagcttaagaagaaaaatgaaaacttgcctacaaaaggaacgcagagcaactcgaagatggatcaaagccacgtgtttggtaaagaatttagaagcaaatagtgtattacctaaaggtacatcagaacacatgttaccaactgccttaagcagtcttcctttggaagattttaagatccttgaacaagatcaacaagataaaacactgctaagtctaaatctaaaacagaccaagagtaccttcatttaaatttagcttgcacagagcttgatgcctatccttcattcttttcagaagtaaagataattatggcacttatgccaaaattcattatttaataaagttttacttgaagtaacattactgaatttgtgaagacttgattacaaaagaataaaaaacttcatatggaaattttatttgaaaatgagtggaagtgccttacattagaattacggacttaaaaattttgctaataaattgtgtgtttg

SEQ ID NO: 294269 - DNA, 3095 bp, Homo sapiens
ggtgcgcgacggcggcggcggcgcgggaggttcggagcgggagctcgggctcgcggacggtatggaggactacgagcaggagctgtgcggcgtcgaggatgatttccacaaccagttcgcggccgagctggaggtgctggcagagctggaaggggcgtcgactccgtcgccctccggggtccccctgttcaccgcgggccgacccccgcggacgttcgaggaggcccttgccagaggggacgcggcctccagtcccgccccagccgcatctgtgggcagcagccagggcggcgccaggaagaggcaggtggacgccgacctgcagccggccgggtccctgccccacgcccccaggatcaaacggcctaggctgcaggtggtcaagaggctgaacttcaggtcggaggagatggaggagccgcccctcccgactcctcgccgacggacatcaccccgccgccgagccctgaggacctcgcagagctttggggccacggagtctcagaagctgctgccgacgtgggtctcacacgggcctcaccagctgcccgcaatcccgtcctgaggcggccccccatcttggaggactacgtccacgtgacatccacggagggcgtccgggcttatctggtgctgcgtgctgaccccatggccccgggggtgcagggctctctcctccacgtcccatggcgaggcggtggccagctggacctgctgggtgtgtccttagcctccctgaagaagcaggtcgacggcgagcggcgggagcggctgcttcaggaggcccagaggctttcagacaccctgcacagtctcaggtcgggggaggaggaggcagcccagcccttgggggcccctgaggaggagccgactgacggtcaagacgcctccagtcactgcctctgggtggatgagtttgcaccccgccactacacggagctgctcagtgatgacttcaccaaccgctgcctgctcaagtggctgaagttgtgggacctggtggtgtttggccacgagaggccttcccggaagcccaggcccagtgttgagccggcccgggtcagcaaggaggccacagccccaggcaagtggaagagccacgaacaggtgctggaggagatgctggaggctgggctggacccgagccagcgaccgaagcagaaggtggcactgctctgtgggcccccggggctggggaagaccaccctggcacacgtgattgcgcgtcacgcggggtactctgtggtggagatgaacgccagtgacgaccgtagcccggaggtcttccgcacacgcatcgaggcggccacccagatggagtcggtgctgggtgctggcgggaagcccaactgcctggtcatcgatgagatcgacggggcccccgtggccgccatcaacgtcctcctgagcatcctgaaccgcaaggggccacaggaggtggggccacagggcccggctgtgccttcgggaggcggccgacggcgccgggcagagggggggctcctcatgaggcccattatctgcatttgcaatgaccagttcgcaccgtccctgcggcagctgaagcagcaggccttcctgctccacttcccgccgactctgccctcgaggctggtgcagcggctccaggaggtctccctgcggcagggcatgagggccgacccaggggtgctggccgccctctgtgagaaaactgacaatgacatccgggcctgcatcaacaccctgcagttcctgtacagccggggccagcgggagctgagcgtgcgggacgtgcaggccacacgcgtgggcctcaaggaccagcgcagagggctcttctcggtgtggcaggaggtcttccagctgcctcgagcccagaggcgccgtgtgggccaggaccccgccctgcctgctgacacactcctgctgggtgacggggacgcgggctccctcacctccgcctcacagcgattctaccgtgtcctgcatgccgctgcctctgcgggcgagcacgagaaggtggtccagggcttgtttgacaacttcctgcgtctgcggctgcgagactccagcctgggtgctgtgtgtgtggccctcgactggctggccttcgatgacctgctggcgggggctgctcatcacagccagagcttccagctgctgcgctacccacccttcctgcccgtggccttccatgtgctgtttgcttccagccacacacccaggatcaccttccccagcagccagcaggaggcccagaaccggatgagccagatgaggaacctgatccagacgctggtgtccggcatcgcgccagccacgcgcagccgggccacgccccaggccctgctcctcgatgccctctgcctgctcctggacattcttgcacccaagctccgccccgtgagcacacagctgtacagcacccgtgaaaagcaacagctggccagcctggtgggcacgatgctcgcttacagcctgacctaccgccaggagcgcacgcccgatggccagtacatctacaggctggagccgaacgtggaggaactctgccgcttccctgagctgcctgcccgcaagcccctcacctaccagacgaagcagctcatcgcccgcgagatcgaggtggagaagatgcggcgggcggaggcttctgcccgggtagagaacagcccccaggtggatgggagccccccagggctcgagggtctgctggggggcattggggagaaaggggtgcaccgacctgccccacgcaaccatgagcagcggctggagcacatcatgaggcgagcggcccgggaggaacagcctgagaaggacttctttggacgtgtggtcgtcaggagcacagcagtcccgagtgcaggggacacggccccggagcaggactcagtggagcggcgcatgggcacagcggtgggcaggagcgaggtctggttccgcttcaacgagggtgtctccaacgccgtgcggcgcagcctgtacatcagggacttgctctagttctctgagccgcggacatgccctcgcattgcttcccgcagagtgcagagacaggaagctggagatgtctttataaagtcacacctttacagactgtaaaaaaaagc

SEQ ID NO: 294270 - DNA, 4514 bp, Homo sapiens
ggtgcgcgacggcggcggcggcgcgggaggttcggagcgggagctcgggctcgcggacggtatggaggactacgagcaggagctgtgcggcgtcgaggatgatttccacaaccagttcgcggccgagctggaggtgctggcagagctggaaggggcgtcgactccgtcgccctccggggtccccctgttcaccgcgggccgacccccgcggacgttcgaggaggcccttgccagaggggacgcggcctccagtcccgccccagccgcatctgtgggcagcagccagggcggcgccaggaagaggcaggtggacgccgacctgcagccggccgggtccctgccccacgcccccaggatcaaacggcctaggctgcaggtggtcaagaggctgaacttcaggtcggaggagatggaggagccgcccctcccgactcctcgccgacggacatcaccccgccgccgagccctgaggacctcgcagagctttggggccacggagtctcagaagctgctgccgacgtgggtctcacacgggcctcaccagctgcccgcaatcccgtcctgaggcggccccccatcttggaggactacgtccacgtgacatccacggagggcgtccgggcttatctggtgctgcgtgctgaccccatggccccgggggtgcagctgacccatctggatggcttcattcctttggcacccctgtccagtctcccacccctcactggccagcttactggggttgtcccacccgggtccctgagcactgatgggggctgacgtgaatcctgtgacctaggaggggcccagaggcaattgtcctcccttccccacagggctctctcctccacgtcccatggcgaggcggtggccagctggacctgctgggtgtgtccttagcctccctgaagaagcaggtcgacggcgagcggcgggagcggctgcttcaggaggcccagaggctttcagacaccctgcacagtctcaggtcgggggaggaggaggcagcccagcccttgggggcccctgaggaggagccgactgacggtcaagacgcctccagtcactgcctctgggtggatgagtttgcaccccgccactacacggagctgctcagtgatgacgtgaggtcttgttctcactcaagtgtggctggcttcctctgttcccaagatggaagaacctgggcccagtgatttttgcacagccaatccactgggcctcggagacggagtgggctctggtttgcccttttgagttgtaggtggtgaactgagcacagggctgtgtgctactggtcccctgtgacctgtgaggcaggctaggggtccagggtgtcacctgatccaagtctctgttccctttcctaccttcacagcagctgacactggagtgcccctggggagggcaggggcctcccagatgggttgtggccagagccgtgggggtggagcccctggtgtgagccttgcggtcactcgctggcaggaagacgggggtggccattcatcctgtggcttggcatcccatggggcatggggctcatggtggcaggtggactgtccgtgcctggaggcggtgccctcaggctgtgcttcccttcccgtccttcccgcagttcaccaaccgctgcctgctcaagtggctgaagttgtgggacctggtggtgtttggccacgagaggccttcccggaagcccaggcccagtgttgagccggcccgggtcagcaaggaggccacagccccaggcaagtggaagagccacgaacaggtgctggaggagatgctggaggctgggctggacccgagccagcgaccgaagcagaaggtgagccccgctggctgtgccgccgggaacaagcctgaggctttgcactcggcgccggcacccttgcagcctgttgactttctccaggagccgtgggtgtggtgacgtgtgggtcttggcgtgaagcgccattagcgtgagttagaactggagcgttgcagtaacaactcgggggaagtcgttgtccctgaagggctctgcggctggccaggatgatctgggtggacggtgggtggtttctgggggccagtcacactggtatcagctgtgttttgtctgcacgaactttgctttgtgtaggtttttttttccgttgccatcttggtgtgtgaaagtgctcaattttgttcttatttgatggctggagtggggtggagggagcgcccagcctgtgggacacatgtggcagtccctggctgctaggccgggagcgtcctgtaggtgcggtgcacactacgccttcatctacctgggctgcaggtggcactgctctgtgggcccccggggctggggaagaccaccctggcacacgtgattgcgcgtcacgcggggtactctgtggtggagatgaacgccaggtgagtgatgtgaggtccgtctctggctcgccttctgtcctgacgtgtttgagttctggtggcggacctgaaaccgggtgtggatgttcccgtcttgagggtggtgggggcctgggtgtgtgggccgggaaaacgtgtccttcctcggggttcacgggatcggcagcagccgcgtcatgtgacggtctccacgcaaatgcggcagccccggccttgggaggctgccctgccagggacgcccactgccctgacgacccctgacctccccattgcagtgacgaccgtagcccggaggtcttccgcacacgcatcgaggcggccacccagatggagtcggtgctgggtgctggcgggaagcccaactgcctggtcatcgatgagatcgacggggcccccgtggccgccatcaacgtcctcctgagcatcctgaaccgcaaggggccacaggaggtggggccacagggcccggctgtgccttcgggaggcggccgacggcgccgggcagagggggggctcctcatgaggcccattatctgcatttgcaatgaccagttcgcaccgtccctgcggcagctgaagcagcaggccttcctgctccacttcccgccgactctgccctcgaggctggtgcagcggctccaggaggtctccctgcggcagggcatgagggccgacccaggggtgctggccgccctctgtgagaaaactgacaatgacatccgggcctgcatcaacaccctgcagttcctgtacagccggggccagcgggagctgagcgtgcgggacgtgcaggccacacgcgtgggcctcaaggaccagcgcagagggctcttctcggtgtggcaggaggtcttccagctgcctcgagcccagaggcgccgtgtgggccaggaccccgccctgcctgctgacacactcctgctgggtgacggggacgcgggctccctcacctccgcctcacagcgattctaccgtgtcctgcatgccgctgcctctgcgggcgagcacgagaaggtggtccagggcttgtttgacaacttcctgcgtctgcggctgcgagactccagcctgggtgctgtgtgtgtggccctcgactggctggccttcgatgacctgctggcgggggctgctcatcacagccagagcttccagctgctgcgctacccacccttcctgcccgtggccttccatgtgctgtttgcttccagccacacacccaggatcaccttccccagcagccagcaggaggcccagaaccggatgagccagatgaggaacctgatccagacgctggtgtccggcatcgcgccagccacgcgcagccgggccacgccccaggccctgctcctcgatgccctctgcctgctcctggacattcttgcacccaagctccgccccgtgagcacacagctgtacagcacccgtgaaaagcaacagctggccagcctggtgggcacgatgctcgcttacagcctgacctaccgccaggagcgcacgcccgatggccagtacatctacaggctggagccgaacgtggaggaactctgccgcttccctgagctgcctgcccgcaagcccctcacctaccagacgaagcagctcatcgcccgcgagatcgaggtggagaagatgcggcgggcggaggcttctgcccgggtagagaacagcccccaggtggatgggagccccccagggctcgagggtctgctggggggcattggggagaaaggggtgcaccgacctgccccacgcaaccatgagcagcggctggagcacatcatgaggcgagcggcccgggaggaacagcctgagaaggacttctttggacgtgtggtcgtcaggagcacagcagtcccgagtgcaggggacacggccccggagcaggactcagtggagcggcgcatgggcacagcggtgggcaggagcgaggtctggttccgcttcaacgagggtgtctccaacgccgtgcggcgcagcctgtacatcagggacttgctctagttctctgagccgcggacatgccctcgcattgcttcccgcagagtgcagagacaggaagctggagatgtctttataaagtcacacctttacagactgtaaaaaaaagc

SEQ ID NO: 294271 - DNA, 3179 bp, Homo sapiens
ggtgcgcgacggcggcggcggcgcgggaggttcggagcgggagctcgggctcgcggacggtatggaggactacgagcaggagctgtgcggcgtcgaggatgatttccacaaccagttcgcggccgagctggaggtgctggcagagctggaaggggcgtcgactccgtcgccctccggggtccccctgttcaccgcgggccgacccccgcggacgttcgaggaggcccttgccagaggggacgcggcctccagtcccgccccagccgcatctgtgggcagcagccagggcggcgccaggaagaggcaggtggacgccgacctgcagccggccgggtccctgccccacggtaggttggcggcattgccccagggcctccggagtgggcgcgaggctgaggaggcctctggttccctgcatgtgtctcccccagcccccaggatcaaacggcctaggctgcaggtggtcaagaggctgaacttcaggtcggaggagatggaggagccgcccctcccgactcctcgccgacggacatcaccccgccgccgagccctgaggacctcgcagagctttggggccacggagtctcagaagctgctgccgacgtgggtctcacacgggcctcaccagctgcccgcaatcccgtcctgaggcggccccccatcttggaggactacgtccacgtgacatccacggagggcgtccgggcttatctggtgctgcgtgctgaccccatggccccgggggtgcagggctctctcctccacgtcccatggcgaggcggtggccagctggacctgctgggtgtgtccttagcctccctgaagaagcaggtcgacggcgagcggcgggagcggctgcttcaggaggcccagaggctttcagacaccctgcacagtctcaggtcgggggaggaggaggcagcccagcccttgggggcccctgaggaggagccgactgacggtcaagacgcctccagtcactgcctctgggtggatgagtttgcaccccgccactacacggagctgctcagtgatgacttcaccaaccgctgcctgctcaagtggctgaagttgtgggacctggtggtgtttggccacgagaggccttcccggaagcccaggcccagtgttgagccggcccgggtcagcaaggaggccacagccccaggcaagtggaagagccacgaacaggtgctggaggagatgctggaggctgggctggacccgagccagcgaccgaagcagaaggtggcactgctctgtgggcccccggggctggggaagaccaccctggcacacgtgattgcgcgtcacgcggggtactctgtggtggagatgaacgccagtgacgaccgtagcccggaggtcttccgcacacgcatcgaggcggccacccagatggagtcggtgctgggtgctggcgggaagcccaactgcctggtcatcgatgagatcgacggggcccccgtggccgccatcaacgtcctcctgagcatcctgaaccgcaaggggccacaggaggtggggccacagggcccggctgtgccttcgggaggcggccgacggcgccgggcagagggggggctcctcatgaggcccattatctgcatttgcaatgaccagttcgcaccgtccctgcggcagctgaagcagcaggccttcctgctccacttcccgccgactctgccctcgaggctggtgcagcggctccaggaggtctccctgcggcagggcatgagggccgacccaggggtgctggccgccctctgtgagaaaactgacaatgacatccgggcctgcatcaacaccctgcagttcctgtacagccggggccagcgggagctgagcgtgcgggacgtgcaggccacacgcgtgggcctcaaggaccagcgcagagggctcttctcggtgtggcaggaggtcttccagctgcctcgagcccagaggcgccgtgtgggccaggaccccgccctgcctgctgacacactcctgctgggtgacggggacgcgggctccctcacctccgcctcacagcgattctaccgtgtcctgcatgccgctgcctctgcgggcgagcacgagaaggtggtccagggcttgtttgacaacttcctgcgtctgcggctgcgagactccagcctgggtgctgtgtgtgtggccctcgactggctggccttcgatgacctgctggcgggggctgctcatcacagccagagcttccagctgctgcgctacccacccttcctgcccgtggccttccatgtgctgtttgcttccagccacacacccaggatcaccttccccagcagccagcaggaggcccagaaccggatgagccagatgaggaacctgatccagacgctggtgtccggcatcgcgccagccacgcgcagccgggccacgccccaggccctgctcctcgatgccctctgcctgctcctggacattcttgcacccaagctccgccccgtgagcacacagctgtacagcacccgtgaaaagcaacagctggccagcctggtgggcacgatgctcgcttacagcctgacctaccgccaggagcgcacgcccgatggccagtacatctacaggctggagccgaacgtggaggaactctgccgcttccctgagctgcctgcccgcaagcccctcacctaccagacgaagcagctcatcgcccgcgagatcgaggtggagaagatgcggcgggcggaggcttctgcccgggtagagaacagcccccaggtggatgggagccccccagggctcgagggtctgctggggggcattggggagaaaggggtgcaccgacctgccccacgcaaccatgagcagcggctggagcacatcatgaggcgagcggcccgggaggaacagcctgagaaggacttctttggacgtgtggtcgtcaggagcacagcagtcccgagtgcaggggacacggccccggagcaggactcagtggagcggcgcatgggcacagcggtgggcaggagcgaggtctggttccgcttcaacgagggtgtctccaacgccgtgcggcgcagcctgtacatcagggacttgctctagttctctgagccgcggacatgccctcgcattgcttcccgcagagtgcagagacaggaagctggagatgtctttataaagtcacacctttacagactgtaaaaaaaagc

SEQ ID NO: 294272 - DNA, 2873 bp, Homo sapiens
ggtgcgcgacggcggcggcggcgcgggaggttcggagcgggagctcgggctcgcggacggtatggaggactacgagcaggagctgtgcggcgtcgaggatgatttccacaaccagttcgcggccgagctggaggtgctggcagagctggaaggggcgtcgactccgtcgccctccggggtccccctgttcaccgcgggccgacccccgcggacgttcgaggaggcccttgccagaggggacgcggcctccagtcccgccccagccgcatctgtgggcagcagccagggcggcgccaggaagaggcaggtggacgccgacctgcagccggccgggtccctgccccacgcccccaggatcaaacggcctaggctgcaggtggtcaagaggctgaacttcaggtcggaggagatggaggagccgcccctcccgactcctcgccgacggacatcaccccgccgccgagccctgaggacctcgcagagctttggggccacggagtctcagaagctgctgccgacgtgggtctcacacgggcctcaccagctgcccgcaatcccgtcctgaggcggccccccatcttggaggactacgtccacgtgacatccacggagggcgtccgggcttatctggtgctgcgtgctgaccccatggccccgggggtgcagggctctctcctccacgtcccatggcgaggcggtggccagctggacctgctgggtgtgtccttagcctccctgaagaagcaggtcgacggcgagcggcgggagcggctgcttcaggaggcccagaggctttcagacaccctgcacagtctcaggtcgggggaggaggaggcagcccagcccttgggggcccctgaggaggagccgactgacggtcaagacgcctccagtcactgcctctgggtggatgagtttgcaccccgccactacacggagctgctcagtgatgacttcaccaaccgctgcctgctcaagtggctgaagttgtgggacctggtggtgtttggccacgagaggccttcccggaagcccaggcccagtgttgagccggcccgggtcagcaaggaggccacagccccaggcaagtggaagagccacgaacaggtgctggaggagatgctggaggctgggctggacccgagccagcgaccgaagcagaaggccgccatcaacgtcctcctgagcatcctgaaccgcaaggggccacaggaggtggggccacagggcccggctgtgccttcgggaggcggccgacggcgccgggcagagggggggctcctcatgaggcccattatctgcatttgcaatgaccagttcgcaccgtccctgcggcagctgaagcagcaggccttcctgctccacttcccgccgactctgccctcgaggctggtgcagcggctccaggaggtctccctgcggcagggcatgagggccgacccaggggtgctggccgccctctgtgagaaaactgacaatgacatccgggcctgcatcaacaccctgcagttcctgtacagccggggccagcgggagctgagcgtgcgggacgtgcaggccacacgcgtgggcctcaaggaccagcgcagagggctcttctcggtgtggcaggaggtcttccagctgcctcgagcccagaggcgccgtgtgggccaggaccccgccctgcctgctgacacactcctgctgggtgacggggacgcgggctccctcacctccgcctcacagcgattctaccgtgtcctgcatgccgctgcctctgcgggcgagcacgagaaggtggtccagggcttgtttgacaacttcctgcgtctgcggctgcgagactccagcctgggtgctgtgtgtgtggccctcgactggctggccttcgatgacctgctggcgggggctgctcatcacagccagagcttccagctgctgcgctacccacccttcctgcccgtggccttccatgtgctgtttgcttccagccacacacccaggatcaccttccccagcagccagcaggaggcccagaaccggatgagccagatgaggaacctgatccagacgctggtgtccggcatcgcgccagccacgcgcagccgggccacgccccaggccctgctcctcgatgccctctgcctgctcctggacattcttgcacccaagctccgccccgtgagcacacagctgtacagcacccgtgaaaagcaacagctggccagcctggtgggcacgatgctcgcttacagcctgacctaccgccaggagcgcacgcccgatggccagtacatctacaggctggagccgaacgtggaggaactctgccgcttccctgagctgcctgcccgcaagcccctcacctaccagacgaagcagctcatcgcccgcgagatcgaggtggagaagatgcggcgggcggaggcttctgcccgggtagagaacagcccccaggtggatgggagccccccagggctcgagggtctgctggggggcattggggagaaaggggtgcaccgacctgccccacgcaaccatgagcagcggctggagcacatcatgaggcgagcggcccgggaggaacagcctgagaaggacttctttggacgtgtggtcgtcaggagcacagcagtcccgagtgcaggggacacggccccggagcaggactcagtggagcggcgcatgggcacagcggtgggcaggagcgaggtctggttccgcttcaacgagggtgtctccaacgccgtgcggcgcagcctgtacatcagggacttgctctagttctctgagccgcggacatgccctcgcattgcttcccgcagagtgcagagacaggaagctggagatgtctttataaagtcacacctttacagactgtaaaaaaaagc

SEQ ID NO: 294273 - DNA, 3925 bp, Homo sapiens
ggtgcgcgacggcggcggcggcgcgggaggttcggagcgggagctcgggctcgcggacggtatggaggactacgagcaggagctgtgcggcgtcgaggatgatttccacaaccagttcgcggccgagctggaggtgctggcagagctggaaggggcgtcgactccgtcgccctccggggtccccctgttcaccgcgggccgacccccgcggacgttcgaggaggcccttgccagaggggacgcggcctccagtcccgccccagccgcatctgtgggcagcagccagggcggcgccaggaagaggcaggtggacgccgacctgcagccggccgggtccctgccccacgcccccaggatcaaacggcctaggctgcaggtggtcaagaggctgaacttcaggtcggaggagatggaggagccgcccctcccgactcctcgccgacggacatcaccccgccgccgagccctgaggacctcgcagagctttggggccacggagtctcagaagctgctgccgacgtgggtctcacacgggcctcaccagctgcccgcaatcccgtcctgaggcggccccccatcttggaggactacgtccacgtgacatccacggagggcgtccgggcttatctggtgctgcgtgctgaccccatggccccgggggtgcagctgacccatctggatggcttcattcctttggcacccctgtccagtctcccacccctcactggccagcttactgggggctctctcctccacgtcccatggcgaggcggtggccagctggacctgctgggtgtgtccttagcctccctgaagaagcaggtcgacggcgagcggcgggagcggctgcttcaggaggcccagaggctttcagacaccctgcacagtctcaggtcgggggaggaggaggcagcccagcccttgggggcccctgaggaggagccgactgacggtcaagacgcctccagtcactgcctctgggtggatgagtttgcaccccgccactacacggagctgctcagtgatgacttcaccaaccgctgcctgctcaagtggctgaagttgtgggacctggtggtgtttggccacgagaggccttcccggaagcccaggcccagtgttgagccggcccgggtcagcaaggaggccacagccccaggcaagtggaagagccacgaacaggtgctggaggagatgctggaggctgggctggacccgagccagcgaccgaagcagaaggtgagccccgctggctgtgccgccgggaacaagcctgaggctttgcactcggcgccggcacccttgcagcctgttgactttctccaggagccgtgggtgtggtgacgtgtgggtcttggcgtgaagcgccattagcgtgagttagaactggagcgttgcagtaacaactcgggggaagtcgttgtccctgaagggctctgcggctggccaggatgatctgggtggacggtgggtggtttctgggggccagtcacactggtatcagctgtgttttgtctgcacgaactttgctttgtgtaggtttttttttccgttgccatcttggtgtgtgaaagtgctcaattttgttcttatttgatggctggagtggggtggagggagcgcccagcctgtgggacacatgtggcagtccctggctgctaggccgggagcgtcctgtaggtgcggtgcacactacgccttcatctacctgggctgcaggtggcactgctctgtgggcccccggggctggggaagaccaccctggcacacgtgattgcgcgtcacgcggggtactctgtggtggagatgaacgccaggtgagtgatgtgaggtccgtctctggctcgccttctgtcctgacgtgtttgagttctggtggcggacctgaaaccgggtgtggatgttcccgtcttgagggtggtgggggcctgggtgtgtgggccgggaaaacgtgtccttcctcggggttcacgggatcggcagcagccgcgtcatgtgacggtctccacgcaaatgcggcagccccggccttgggaggctgccctgccagggacgcccactgccctgacgacccctgacctccccattgcagtgacgaccgtagcccggaggtcttccgcacacgcatcgaggcggccacccagatggagtcggtgctgggtgctggcgggaagcccaactgcctggtcatcgatgagatcgacggggcccccgtggccgccatcaacgtcctcctgagcatcctgaaccgcaaggggccacaggaggtggggccacagggcccggctgtgccttcgggaggcggccgacggcgccgggcagagggggggctcctcatgaggcccattatctgcatttgcaatgaccagttcgcaccgtccctgcggcagctgaagcagcaggccttcctgctccacttcccgccgactctgccctcgaggctggtgcagcggctccaggaggtctccctgcggcagggcatgagggccgacccaggggtgctggccgccctctgtgagaaaactgacaatgacatccgggcctgcatcaacaccctgcagttcctgtacagccggggccagcgggagctgagcgtgcgggacgtgcaggccacacgcgtgggcctcaaggaccagcgcagagggctcttctcggtgtggcaggaggtcttccagctgcctcgagcccagaggcgccgtgtgggccaggaccccgccctgcctgctgacacactcctgctgggtgacggggacgcgggctccctcacctccgcctcacagcgattctaccgtgtcctgcatgccgctgcctctgcgggcgagcacgagaaggtggtccagggcttgtttgacaacttcctgcgtctgcggctgcgagactccagcctgggtgctgtgtgtgtggccctcgactggctggccttcgatgacctgctggcgggggctgctcatcacagccagagcttccagctgctgcgctacccacccttcctgcccgtggccttccatgtgctgtttgcttccagccacacacccaggatcaccttccccagcagccagcaggaggcccagaaccggatgagccagatgaggaacctgatccagacgctggtgtccggcatcgcgccagccacgcgcagccgggccacgccccaggccctgctcctcgatgccctctgcctgctcctggacattcttgcacccaagctccgccccgtgagcacacagctgtacagcacccgtgaaaagcaacagctggccagcctggtgggcacgatgctcgcttacagcctgacctaccgccaggagcgcacgcccgatggccagtacatctacaggctggagccgaacgtggaggaactctgccgcttccctgagctgcctgcccgcaagcccctcacctaccagacgaagcagctcatcgcccgcgagatcgaggtggagaagatgcggcgggcggaggcttctgcccgggtagagaacagcccccaggtggatgggagccccccagggctcgagggtctgctggggggcattggggagaaaggggtgcaccgacctgccccacgcaaccatgagcagcggctggagcacatcatgaggcgagcggcccgggaggaacagcctgagaaggacttctttggacgtgtggtcgtcaggagcacagcagtcccgagtgcaggggacacggccccggagcaggactcagtggagcggcgcatgggcacagcggtgggcaggagcgaggtctggttccgcttcaacgagggtgtctccaacgccgtgcggcgcagcctgtacatcagggacttgctctagttctctgagccgcggacatgccctcgcattgcttcccgcagagtgcagagacaggaagctggagatgtctttataaagtcacacctttacagactgtaaaaaaaagc

SEQ ID NO: 294274 - DNA, 3228 bp, Homo sapiens
ggtgcgcgacggcggcggcggcgcgggaggttcggagcgggagctcgggctcgcggacggtatggaggactacgagcaggagctgtgcggcgtcgaggatgatttccacaaccagttcgcggccgagctggaggtgctggcagagctggaaggggcgtcgactccgtcgccctccggggtccccctgttcaccgcgggccgacccccgcggacgttcgaggaggcccttgccagaggggacgcggcctccagtcccgccccagccgcatctgtgggcagcagccagggcggcgccaggaagaggcaggtggacgccgacctgcagccggccgggtccctgccccacgcccccaggatcaaacggcctaggctgcaggtggtcaagaggctgaacttcaggtcggaggagatggaggagccgcccctcccgactcctcgccgacggacatcaccccgccgccgagccctgaggacctcgcagagctttggggccacggagtctcagaagctgctgccgacgtgggtctcacacgggcctcaccagctgcccgcaatcccgtcctgaggcggccccccatcttggaggactacgtccacgtgacatccacggagggcgtccgggcttatctggtgctgcgtgctgaccccatggccccgggggtgcagggctctctcctccacgtcccatggcgaggcggtggccagctggacctgctgggtgtgtccttagcctccctgaagaagcaggtcgacggcgagcggcgggagcggctgcttcaggaggcccagaggctttcagacaccctgcacagtctcaggtcgggggaggaggaggcagcccagcccttgggggcccctgaggaggagccgactgacggtcaagacgcctccagtcactgcctctgggtggatgagtttgcaccccgccactacacggagctgctcagtgatgacttcaccaaccgctgcctgctcaagtggctgaagttgtgggacctggtggtgtttggccacgagaggccttcccggaagcccaggcccagtgttgagccggcccgggtcagcaaggaggccacagccccaggcaagtggaagagccacgaacaggtgctggaggagatgctggaggctgggctggacccgagccagcgaccgaagcagaaggtgagccccgctggctgtgccgccgggaacaagcctgaggctttgcactcggcgccggcacccttgcagcctgttgactttctccaggagccgtgggtgtggtgacgtgtgggtcttggcgtgaagcgccattagcgtgagttagaactggagcgttgcagtaacaactcgggggaagtcgttgtccctgaagggctctgcggctggccaggatgatctgggtggacggtgggtggtttctgggggccagtcacactggtatcagctgtgttttgtctgcacgaactttgctttgtgtaggtttttttttccgttgccatcttggtgtgtgaaagtgctcaattttgttcttatttgatggctggagtggggtggagggagcgcccagcctgtgggacacatgtggcagtccctggctgctaggccgggagcgtcctgtaggtgcggtgcacactacgccttcatctacctgggctgcaggtggcactgctctgtgggcccccggggctggggaagaccaccctggcacacgtgattgcgcgtcacgcggggtactctgtggtggagatgaacgccaggtgagtgatgtgaggtccgtctctggctcgccttctgtcctgacgtgtttgagttctggtggcggacctgaaaccgggtgtggatgttcccgtcttgagggtggtgggggcctgggtgtgtgggccgggaaaacgtgtccttcctcggggttcacgggatcggcagcagccgcgtcatgtgacggtctccacgcaaatgcggcagccccggccttgggaggctgccctgccagggacgcccactgccctgacgacccctgacctccccattgcagtgacgaccgtagcccggaggtcttccgcacacgcatcgaggcggccacccagatggagtcggtgctgggtgctggcgggaagcccaactgcctggtcatcgatgagatcgacggggcccccgtggccgccatcaacgtcctcctgagcatcctgaaccgcaaggggccacaggaggtggggccacagggcccggctgtgccttcgggaggcggccgacggcgccgggcagagggggggctcctcatgaggcccattatctgcatttgcaatgaccagttcgcaccgtccctgcggcagctgaagcagcaggccttcctgctccacttcccgccgactctgccctcgaggctggtgcagcggctccaggaggtctccctgcggcagggcatgagggccgacccaggggtgctggccgccctctgtgagaaaactgacaatgacatccgggcctgcatcaacaccctgcagtcctggacattcttgcacccaagctccgccccgtgagcacacagctgtacagcacccgtgaaaagcaacagctggccagcctggtgggcacgatgctcgcttacagcctgacctaccgccaggagcgcacgcccgatggccagtacatctacaggctggagccgaacgtggaggaactctgccgcttccctgagctgcctgcccgcaagcccctcacctaccagacgaagcagctcatcgcccgcgagatcgaggtggagaagatgcggcgggcggaggcttctgcccgggtagagaacagcccccaggtggatgggagccccccagggctcgagggtctgctggggggcattggggagaaaggggtgcaccgacctgccccacgcaaccatgagcagcggctggagcacatcatgaggcgagcggcccgggaggaacagcctgagaaggacttctttggacgtgtggtcgtcaggagcacagcagtcccgagtgcaggggacacggccccggagcaggactcagtggagcggcgcatgggcacagcggtgggcaggagcgaggtctggttccgcttcaacgagggtgtctccaacgccgtgcggcgcagcctgtacatcagggacttgctctagttctctgagccgcggacatgccctcgcattgcttcccgcagagtgcagagacaggaagctggagatgtctttataaagtcacacctttacagactgtaaaaaaaagc

SEQ ID NO: 294275 - DNA, 3643 bp, Homo sapiens
  misc_feature (24)..(24): n is a, c, g, or t
cggcaaatagctaggactgaaggncggtttatcggcgaggggccccacgtccgccaccgcatctgtgggcagcagccagggcggcgccaggaagaggcaggtggacgccgacctgcagccggccgggtccctgccccacgcccccaggatcaaacggcctaggctgcaggtggtcaagaggctgaacttcaggtcggaggagatggaggagccgcccctcccgactcctcgccgacggacatcaccccgccgccgagccctgaggacctcgcagagctttggggccacggagtctcagaagctgctgccgacgtgggtctcacacgggcctcaccagctgcccgcaatcccgtcctgaggcggccccccatcttggaggactacgtccacgtgacatccacggagggcgtccgggcttatctggtgctgcgtgctgaccccatggccccgggggtgcagggctctctcctccacgtcccatggcgaggcggtggccagctggacctgctgggtgtgtccttagcctccctgaagaagcaggtcgacggcgagcggcgggagcggctgcttcaggaggcccagaggctttcagacaccctgcacagtctcaggtcgggggaggaggaggcagcccagcccttgggggcccctgaggaggagccgactgacggtcaagacgcctccagtcactgcctctgggtggatgagtttgcaccccgccactacacggagctgctcagtgatgacttcaccaaccgctgcctgctcaagtggctgaagttgtgggacctggtggtgtttggccacgagaggccttcccggaagcccaggcccagtgttgagccggcccgggtcagcaaggaggccacagccccaggcaagtggaagagccacgaacaggtgctggaggagatgctggaggctgggctggacccgagccagcgaccgaagcagaaggtgagccccgctggctgtgccgccgggaacaagcctgaggctttgcactcggcgccggcacccttgcagcctgttgactttctccaggagccgtgggtgtggtgacgtgtgggtcttggcgtgaagcgccattagcgtgagttagaactggagcgttgcagtaacaactcgggggaagtcgttgtccctgaagggctctgcggctggccaggatgatctgggtggacggtgggtggtttctgggggccagtcacactggtatcagctgtgttttgtctgcacgaactttgctttgtgtaggtttttttttccgttgccatcttggtgtgtgaaagtgctcaattttgttcttatttgatggctggagtggggtggagggagcgcccagcctgtgggacacatgtggcagtccctggctgctaggccgggagcgtcctgtaggtgcggtgcacactacgccttcatctacctgggctgcaggtggcactgctctgtgggcccccggggctggggaagaccaccctggcacacgtgattgcgcgtcacgcggggtactctgtggtggagatgaacgccaggtgagtgatgtgaggtccgtctctggctcgccttctgtcctgacgtgtttgagttctggtggcggacctgaaaccgggtgtggatgttcccgtcttgagggtggtgggggcctgggtgtgtgggccgggaaaacgtgtccttcctcggggttcacgggatcggcagcagccgcgtcatgtgacggtctccacgcaaatgcggcagccccggccttgggaggctgccctgccagggacgcccactgccctgacgacccctgacctccccattgcagtgacgaccgtagcccggaggtcttccgcacacgcatcgaggcggccacccagatggagtcggtgctgggtgctggcgggaagcccaactgcctggtcatcgatgagatcgacggggcccccgtggccgccatcaacgtcctcctgagcatcctgaaccgcaaggggccacaggaggtggggccacagggcccggctgtgccttcgggaggcggccgacggcgccgggcagagggggggctcctcatgaggcccattatctgcatttgcaatgaccagttcgcaccgtccctgcggcagctgaagcagcaggccttcctgctccacttcccgccgactctgccctcgaggctggtgcagcggctccaggaggtctccctgcggcagggcatgagggccgacccaggggtgctggccgccctctgtgagaaaactgacaatgacatccgggcctgcatcaacaccctgcagttcctgtacagccggggccagcgggagctgagcgtgcgggacgtgcaggccacacgcgtgggcctcaaggaccagcgcagagggctcttctcggtgtggcaggaggtcttccagctgcctcgagcccagaggcgccgtgtgggccaggaccccgccctgcctgctgacacactcctgctgggtgacggggacgcgggctccctcacctccgcctcacagcgattctaccgtgtcctgcatgccgctgcctctgcgggcgagcacgagaaggtggtccagggcttgtttgacaacttcctgcgtctgcggctgcgagactccagcctgggtgctgtgtgtgtggccctcgactggctggccttcgatgacctgctggcgggggctgctcatcacagccagagcttccagctgctgcgctacccacccttcctgcccgtggccttccatgtgctgtttgcttccagccacacacccaggatcaccttccccagcagccagcaggaggcccagaaccggatgagccagatgaggaacctgatccagacgctggtgtccggcatcgcgccagccacgcgcagccgggccacgccccaggccctgctcctcgatgccctctgcctgctcctggacattcttgcacccaagctccgccccgtgagcacacagctgtacagcacccgtgaaaagcaacagctggccagcctggtgggcacgatgctcgcttacagcctgacctaccgccaggagcgcacgcccgatggccagtacatctacaggctggagccgaacgtggaggaactctgccgcttccctgagctgcctgcccgcaagcccctcacctaccagacgaagcagctcatcgcccgcgagatcgaggtggagaagatgcggcgggcggaggcttctgcccgggtagagaacagcccccaggtggatgggagccccccagggctcgagggtctgctggggggcattggggagaaaggggtgcaccgacctgccccacgcaaccatgagcagcggctggagcacatcatgaggcgagcggcccgggaggaacagcctgagaaggacttctttggacgtgtggtcgtcaggagcacagcagtcccgagtgcaggggacacggccccggagcaggactcagtggagcggcgcatgggcacagcggtgggcaggagcgaggtctggttccgcttcaacgagggtgtctccaacgccgtgcggcgcagcctgtacatcagggacttgctctagttctctgagccgcggacatgccctcgcattgcttcccgcagagtgcagagacaggaagctggagatgtctttataaagtcacacctttacagactgtaaaaaaaagc

SEQ ID NO: 294276 - DNA, 3518 bp, Homo sapiens
ggtgcgcgacggcggcggcggcgcgggaggttcggagcgggagctcgggctcgcggacggtatggaggactacgagcaggagctgtgcggcgtcgaggatgatttccacaaccagttcgcggccgagctggaggtgctggcagagctggaaggggcgtcgactccgtcgccctccggggtccccctgttcaccgcgggccgacccccgcggacgttcgaggaggcccttgccagaggggacgcggcctccagtcccgccccagccgcatctgtgggcagcagccagggcggcgccaggaagaggcaggtggacgccgacctgcagccggccgggtccctgccccacgcccccaggatcaaacggcctaggctgcaggtggtcaagaggctgaacttcaggtcggaggagatggaggagccgcccctcccgactcctcgccgacggacatcaccccgccgccgagccctgaggacctcgcagagctttggggccacggagtctcagaagctgctgccgacgtgggtctcacacgggcctcaccagctgcccgcaatcccgtcctgaggcggccccccatcttggaggactacgtccacgtgacatccacggagggcgtccgggcttatctggtgctgcgtgctgaccccatggccccgggggtgcagggctctctcctccacgtcccatggcgaggcggtggccagctggacctgctgggtgtgtccttagcctccctgaagaagcaggtcgacggcgagcggcgggagcggctgcttcaggaggcccagaggctttcagacaccctgcacagtctcaggtcgggggaggaggaggcagcccagcccttgggggcccctgaggaggagccgactgacggtcaagacgcctccagtcactgcctctgggtggatgagtttgcaccccgccactacacggagctgctcagtgatgacttcaccaaccgctgcctgctcaagtggctgaagttgtgggacctggtggtgtttggccacgagaggccttcccggaagcccaggcccagtgttgagccggcccgggtcagcaaggaggccacagccccaggcaagtggaagagccacgaacaggtgctggaggagatgctggaggctgggctggacccgagccagcgaccgaagcagaaggtgagccccgctggctgtgccgccgggaacaagcctgaggctttgcactcggcgccggcacccttgcagcctgttgactttctccaggagccgtgggtgtggtgacgtgtgggtcttggcgtgaagcgccattagcgtgagttagaactggagcgttgcagtaacaactcgggggaagtcgttgtccctgaagggctctgcggctggccaggatgatctgggtggacggtgggtggtttctgggggccagtcacactggtatcagctgtgttttgtctgcacgaactttgctttgtgtaggtttttttttccgttgccatcttggtgtgtgaaagtgctcaattttgttcttatttgatggctggagtggggtggagggagcgcccagcctgtgggacacatgtggcagtccctggctgctaggccgggagcgtcctgtaggtgcggtgcacactacgccttcatctacctgggctgcaggtggcactgctctgtgggcccccggggctggggaagaccaccctggcacacgtgattgcgcgtcacgcggggtactctgtggtggagatgaacgccaggtgagtgatgtgaggtccgtctctggctcgccttctgtcctgacgtgtttgagttctggtggcggacctgaaaccgggtgtggatgttcccgtcttgagggtggtgggggcctgggtgtgtgggccgggaaaacgtgtccttcctcggggttcacgggatcggcagcagccgcgtcatgtgacggtctccacgcaaatgcggcagccccggccttgggaggctgccctgccagggacgcccactgccctgacgacccctgacctccccattgcagtgacgaccgtagcccggaggtcttccgcacacgcatcgaggcggccacccagatggagtcggtgctgggtgctggcgggaagcccaactgcctggtcatcgatgagatcgacggggcccccgtggccgccatcaacgtcctcctgagcatcctgaaccgcaaggggccacaggaggtggggccacagggcccggctgtgccttcgggaggcggccgacggcgccgggcagagggggggctcctcatgaggcccattatctgcatttgcaatgaccagttcgcaccgtccctgcggcagctgaagcagcaggccttcctgctccacttcccgccgactctgccctcgaggctggtgcagcggctccaggaggtctccctgcggcagggcatgagggccgacccaggggtgctggccgccctctgtgagaaaactgacaatgacatccgggcctgcatcaacaccctgcagttcctgtacagccggggccagcgggagctgagcgtgcgggacgtgcaggccacacgcgtgggcctcaaggaccagcgcagagggctcttctcggtgtggcaggaggtcttccagctgcctcgagcccagaggcgccgtgtgggccaggaccccgccctgcctgctgacacactcctgctgggtgacggggacgcgggctccctcacctccgcctcacagcgattctaccgtgtcctgcatgccgctgcctctgcgggcgagcacgagaaggtggtccagggcttgtttgacaacttcctgcgtctgcggctgcgagactccagcctgggtgctgtgtgtgtggccctcgactggctggccttcgatgacctgctggcgggggctgctcatcacagccagagcttccagctgctgcgctacccacccttcctgcccgtggccttccatgtgctgtttgcttccagccacacacccaggatcaccttccccagcagccagcaggaggcccagaaccggatgagccagatgaggaacctgatccagacgctggtgtccggcatcgcgccagccacgcgcagccgggccacgccccaggccctgctcctcgatgccctctgcctgctcctggacattcttgcacccaagctccgccccgtgagcacacagctgtacagcacccgtgaaaagcaacagctggccagcctggtgggcacgatgctcgcttacagcctgacctaccgccaggagcgcacgcccgatggccagtacatctacaggctggagccgaacgtggaggaactctgccgcttccctgagctgcctgcccgcaagcccctcacctaccagacgaagcagctcatcgcccgcgagatcgaggtggagaagatgcggcgggcggaggcttctgcccgggtagagaacagcccccagtggttggagccccagggtcgaagtcgctggggcatggggaaaggggcgacggcccgcaaatagcagggggacacataggagggcggggaacgaaaacctgcg

SEQ ID NO: 294277 - DNA, 3403 bp, Homo sapiens
ggtgcgcgacggcggcggcggcgcgggaggttcggagcgggagctcgggctcgcggacggtatggaggactacgagcaggagctgtgcggcgtcgaggatgatttccacaaccagttcgcggccgagctggaggtgctggcagagctggaaggggcgtcgactccgtcgccctccggggtccccctgttcaccgcgggccgacccccgcggacgttcgaggaggcccttgccagaggggacgcggcctccagtcccgccccagccgcatctgtgggcagcagccagggcggcgccaggaagaggcaggtggacgccgacctgcagccggccgggtccctgccccacgcccccaggatcaaacggcctaggctgcaggtggtcaagaggctgaacttcaggtcggaggagatggaggagccgcccctcccgactcctcgccgacggacatcaccccgccgccgagccctgaggacctcgcagagctttggggccacggagtctcagaagctgctgccgacgtgggtctcacacgggcctcaccagctgcccgcaatcccgtcctgaggcggccccccatcttggaggactacgtccacgtgacatccacggagggcgtccgggcttatctggtgctgcgtgctgaccccatggccccgggggtgcagggctctctcctccacgtcccatggcgaggcggtggccagctggacctgctgggtgtgtccttagcctccctgaagaagcaggtcgacggcgagcggcgggagcggctgcttcaggaggcccagaggctttcagacaccctgcacagtctcaggtcgggggaggaggaggcagcccagcccttgggggcccctgaggaggagccgactgacggtcaagacgcctccagtcactgcctctgggtggatgagtttgcaccccgccactacacggagctgctcagtgatgacttcaccaaccgctgcctgctcaagtggctgaagttgtgggacctggtggtgtttggccacgagaggccttcccggaagcccaggcccagtgttgagccggcccgggtcagcaaggaggccacagccccaggcaagtggaagagccacgaacaggtgctggaggagatgctggaggctgggctggacccgagccagcgaccgaagcagaaggtgagccccgctggctgtgccgccgggaacaagcctgaggctttgcactcggcgccggcacccttgcagcctgttgactttctccaggagccgtgggtgtggtgacgtgtgggtcttggcgtgaagcgccattagcgtgagttagaactggagcgttgcagtaacaactcgggggaagtcgttgtccctgaagggctctgcggctggccaggatgatctgggtggacggtgggtggtttctgggggccagtcacactggtatcagctgtgttttgtctgcacgaactttgctttgtgtaggtttttttttccgttgccatcttggtgtgtgaaagtgctcaattttgttcttatttgatggctggagtggggtggagggagcgcccagcctgtgggacacatgtggcagtccctggctgctaggccgggagcgtcctgtaggtgcggtgcacactacgccttcatctacctgggctgcaggtggcactgctctgtgggcccccggggctggggaagaccaccctggcacacgtgattgcgcgtcacgcggggtactctgtggtggagatgaacgccaggtgagtgatgtgaggtccgtctctggctcgccttctgtcctgacgtgtttgagttctggtggcggacctgaaaccgggtgtggatgttcccgtcttgagggtggtgggggcctgggtgtgtgggccgggaaaacgtgtccttcctcggggttcacgggatcggcagcagccgcgtcatgtgacggtctccacgcaaatgcggcagccccggccttgggaggctgccctgccagggacgcccactgccctgacgacccctgacctccccattgcagtgacgaccgtagcccggaggtcttccgcacacgcatcgaggcggccacccagatggagtcggtgctgggtgctggcgggaagcccaactgcctggtcatcgatgagatcgacggggcccccgtggccgccatcaacgtcctcctgagcatcctgaaccgcaaggggccacaggaggtggggccacagggcccggctgtgccttcgggaggcggccgacggcgccgggcagagggggggctcctcatgaggcccattatctgcatttgcaatgaccagttcgcaccgtccctgcggcagctgaagcagcaggccttcctgctccacttcccgccgactctgccctcgaggctggtgcagcggctccaggaggtctccctgcggcagggcatgagggccgacccaggggtgctggccgccctctgtgagaaaactgacaatgacatccgggcctgcatcaacaccctgcagttcctgtacagccggggccagcgggagctgagcgtgcgggacgtgcaggccacacgcgtgggcctcaaggaccagcgcagagggctcttctcggtgtggcaggaggtcttccagctgcctcgagcccagaggcgccgtgtgggccaggaccccgccctgcctgctgacacactcctgctgggtgacggggacgcgggctccctcacctccgcctcacagcgattctaccgtgtcctgcatgccgctgcctctgcgggcgagcacgagaaggtggtccagggcttgtttgacaacttcctgcgtctgcggctgcgagactccagcctgggtgctgtgtgtgtggccctcgactggctggccttcgatgacctgctggcgggggctgctcatcacagccagagcttccagctgctgcgctacccacccttcctgcccgtggccttccatgtgctgtttgcttccagccacacacccaggatcaccttccccagcagccagcaggaggcccagaaccggatgagccagatgaggaacctgatccagacgctggtgtccggcatcgcgccagccacgcgcagccgggccacgccccaggccctgctcctcgatgccctctgcctgctcctggacattcttgcacccaagctccgcccccaaccctgtggccccgcaggggacacggccccggagcaggactcagtggagcggcgcatgggcacagcggtgggcaggagcgaggtctggttccgcttcaacgagggtgtctccaacgccgtgcggcgcagcctgtacatcagggacttgctctagttctctgagccgcggacatgccctcgcattgcttcccgcagagtgcagagacaggaagctggagatgtctttataaagtcacacctttacagactgtaaaaaaaagc

SEQ ID NO: 294278 - DNA, 3570 bp, Homo sapiens
ggtgcgcgacggcggcggcggcgcgggaggttcggagcgggagctcgggctcgcggacggtatggaggactacgagcaggagctgtgcggcgtcgaggatgatttccacaaccagttcgcggccgagctggaggtgctggcagagctggaaggggcgtcgactccgtcgccctccggggtccccctgttcaccgcgggccgacccccgcggacgttcgaggaggcccttgccagaggggacgcggcctccagtcccgccccagccgcatctgtgggcagcagccagggcggcgccaggaagaggcaggtggacgccgacctgcagccggccgggtccctgccccacgcccccaggatcaaacggcctaggctgcaggtggtcaagaggctgaacttcaggtcggaggagatggaggagccgcccctcccgactcctcgccgacggacatcaccccgccgccgagccctgaggacctcgcagagctttggggccacggagtctcagaagctgctgccgacgtgggtctcacacgggcctcaccagctgcccgcaatcccgtcctgaggcggccccccatcttggaggactacgtccacgtgacatccacggagggcgtccgggcttatctggtgctgcgtgctgaccccatggccccgggggtgcagggctctctcctccacgtcccatggcgaggcggtggccagctggacctgctgggtgtgtccttagcctccctgaagaagcaggtcgacggcgagcggcgggagcggctgcttcaggaggcccagaggctttcagacaccctgcacagtctcaggtcgggggaggaggaggcagcccagcccttgggggcccctgaggaggagccgactgacggtcaagacgcctccagtcactgcctctgggtggatgagtttgcaccccgccactacacggagctgctcagtgatgacttcaccaaccgctgcctgctcaagtggctgaagttgtgggacctggtggtgtttggccacgagaggccttcccggaagcccaggcccagtgttgagccggcccgggtcagcaaggaggccacagccccaggcaagtggaagagccacgaacaggtgctggaggagatgctggaggctgggctggacccgagccagcgaccgaagcagaaggtgagccccgctggctgtgccgccgggaacaagcctgaggctttgcactcggcgccggcacccttgcagcctgttgactttctccaggagccgtgggtgtggtgacgtgtgggtcttggcgtgaagcgccattagcgtgagttagaactggagcgttgcagtaacaactcgggggaagtcgttgtccctgaagggctctgcggctggccaggatgatctgggtggacggtgggtggtttctgggggccagtcacactggtatcagctgtgttttgtctgcacgaactttgctttgtgtaggtttttttttccgttgccatcttggtgtgtgaaagtgctcaattttgttcttatttgatggctggagtggggtggagggagcgcccagcctgtgggacacatgtggcagtccctggctgctaggccgggagcgtcctgtaggtgcggtgcacactacgccttcatctacctgggctgcaggtggcactgctctgtgggcccccggggctggggaagaccaccctggcacacgtgattgcgcgtcacgcggggtactctgtggtggagatgaacgccaggtgagtgatgtgaggtccgtctctggctcgccttctgtcctgacgtgtttgagttctggtggcggacctgaaaccgggtgtggatgttcccgtcttgagggtggtgggggcctgggtgtgtgggccgggaaaacgtgtccttcctcggggttcacgggatcggcagcagccgcgtcatgtgacggtctccacgcaaatgcggcagccccggccttgggaggctgccctgccagggacgcccactgccctgacgacccctgacctccccattgcagtgacgaccgtagcccggaggtcttccgcacacgcatcgaggcggccacccagatggagtcggtgctgggtgctggcgggaagcccaactgcctggtcatcgatgagatcgacggggcccccgtggccgccatcaacgtcctcctgagcatcctgaaccgcaaggggccacaggaggtggggccacagggcccggctgtgccttcgggaggcggccgacggcgccgggcagagggggggctcctcatgaggcccattatctgcatttgcaatgaccagttcgcaccgtccctgcggcagctgaagcagcaggccttcctgctccacttcccgccgactctgccctcgaggctggtgcagcggctccaggaggtctccctgcggcagggcatgagggccgacccaggggtgctggccgccctctgtgagaaaactgacaatgacatccgggcctgcatcaacaccctgcagttcctgtacagccggggccagcgggagctgagcgtgcgggacgtgcaggccacacgcgtgggcctcaaggaccagcgcagagggctcttctcggtgtggcaggaggtcttccagctgcctcgagcccagaggcgccgtgtgggccaggaccccgccctgcctgctgacacactcctgctgggtgacggggacgcgggctccctcacctccgcctcacagcgattctaccgtgtcctgcatgccgctgcctctgcgggcgagcacgagaaggtggtccagggcttgtttgacaacttcctgcgtctgcggctgcgagactccagcctgggtgctgtgtgtgtggccctcgactggctggccttcgatgacctgctggcgggggctgctcatcacagccagagcttccagctgctgcgctacccacccttcctgcccgtggccttccatgtgctgtttgcttccagccacacacccaggatcaccttccccagcagccagcaggaggcccagaaccggatgagccagatgaggaacctgatccagacgctggtgtccggcatcgcgccagccacgcgcagccgggccacgccccaggccctgctcctcgatgccctctgcctgctcctggacattcttgcacccaagctccgccccgtgagcacacagctgtacagcacccgtgaaaagcaacagctggccagcctggtgggcacgatgctcgcttacagcctgacctaccgccaggagcgcacgcccgatggccagtacatctacaggctggagccgaacgtggaggaactctgcccgcaagcccctcacctaccagacaagaaccacacggctcttaccgccatcttggctcctgtggaggcctgctgggaacgggacttctaaaaggagctatgtctggaaggctgtggtccaaggccatttttgctggctataagcggggtctccggatccaaagagagcacacagctcttcttcaaattgaaggtgtttacgcccgagatgaaacagagttctatttgggcaagagatgtgcttatgtatataaagcaaagaacatcacagtccctcctgg

SEQ ID NO: 294279 - DNA, 2918 bp, Homo sapiens
ggtgcgcgacggcggcggcggcgcgggaggttcggagcgggagctcgggctcgcggacggtatggaggactacgagcaggagctgtgcggcgtcgaggatgatttccacaaccagttcgcggccgagctggaggtgctggcagagctggaaggggcgtcgactccgtcgccctccggggtccccctgttcaccgcgggccgacccccgcggacgttcgaggaggcccttgccagaggggacgcggcctccagtcccgccccagccgcatctgtgggcagcagccagggcggcgccaggaagaggcaggtggacgccgacctgcagccggccgggtccctgccccacgcccccaggatcaaacggcctaggctgcaggtggtcaagaggctgaacttcaggtcggaggagatggaggagccgcccctcccgactcctcgccgacggacatcaccccgccgccgagccctgaggacctcgcagagctttggggccacggagtctcagaagctgctgccgacgtgggtctcacacgggcctcaccagctgcccgcaatcccgtcctgaggcggccccccatcttggaggactacgtccacgtgacatccacggagggcgtccgggcttatctggtgctgcgtgctgaccccatggccccgggggtgcagggctctctcctccacgtcccatggcgaggcggtggccagctggacctgctgggtgtgtccttagcctccctgaagaagcaggtcgacggcgagcggcgggagcggctgcttcaggaggcccagaggctttcagacaccctgcacagtctcaggtcgggggaggaggaggcagcccagcccttgggggcccctgaggaggagccgactgacggtcaagacgcctccagtcactgcctctgggtggatgagtttgcaccccgccactacacggagctgctcagtgatgacttcaccaaccgctgcctgctcaagtggctgaagttgtgggacctggtggtgtttggccacgagaggccttcccggaagcccaggcccagtgttgagccggcccgggtcagcaaggaggccacagccccaggcaagtggaagagccacgaacaggtgctggaggagatgctggaggctgggctggacccgagccagcgaccgaagcagaaggtgagccccgctggctgtgccgccgggaacaagcctgaggctttgcactcggcgccggcacccttgcagcctgttgactttctccaggagccgtgggtgtggtgacgtgtgggtcttggcgtgaagcgccattagcgtgagttagaactggagcgttgcagtaacaactcgggggaagtcgttgtccctgaagggctctgcggctggccaggatgatctgggtggacggtgggtggtttctgggggccagtcacactggtatcagctgtgttttgtctgcacgaactttgctttgtgtaggtttttttttccgttgccatcttggtgtgtgaaagtgctcaattttgttcttatttgatggctggagtggggtggagggagcgcccagcctgtgggacacatgtggcagtccctggctgctaggccgggagcgtcctgtaggtgcggtgcacactacgccttcatctacctgggctgcaggtggcactgctctgtgggcccccggggctggggaagaccaccctggcacacgtgattgcgcgtcacgcggggtactctgtggtggagatgaacgccaggtgagtgatgtgaggtccgtctctggctcgccttctgtcctgacgtgtttgagttctggtggcggacctgaaaccgggtgtggatgttcccgtcttgagggtggtgggggcctgggtgtgtgggccgggaaaacgtgtccttcctcggggttcacgggatcggcagcagccgcgtcatgtgacggtctccacgcaaatgcggcagccccggccttgggaggctgccctgccagggacgcccactgccctgacgacccctgacctccccattgcagtgacgaccgtagcccggaggtcttccgcacacgcatcgaggcggccacccagatggagtcggtgctgggtgctggcgggaagcccaactgcctggtcatcgatgagatcgacggggcccccgtggccgccatcaacgtcctcctgagcatcctgaaccgcaaggggccacaggaggtggggccacagggcccggctgtgccttcgggaggcggccgacggcgccgggcagagggggggctcctcatgaggcccattatctgcatttgcaatgaccagttcgcaccgtccctgcggcagctgaagcagcaggccttcctgctccacttcccgccgactctgccctcgaggctggtgcagcggctccaggaggtctccctgcggcagggcatgagggccgacccaggggtgctggccgccctctgtgagaaaactgacaatgacatccgggcctgcatcaacaccctgcagttcctgtacagccggggccagcgggagctgagcgtgcgggacgtgcaggccacacgcgtgggcctcaaggaccagcgcagagggctcttctcggtgtggcaggaggtcttccagctgcctcgagcccagaggcgccgtgtgggccaggaccccgccctgcctgctgacacactcctgctgggtgacggggacgcgggctccctcacctccgcctcacagcgattctaccgtgtcctgcatgccgctgcctctgcgggcgagcacgagaaggtggtccagctccaacgccgtgcggcgcagcctgtacatcagggacttgctctagttctctgagccgcggacatgccctcgcattgcttcccgcagagtgcagagacaggaagctggagatgtctttataaagtcacacctttacagactgtaaaaaaaagc

SEQ ID NO: 294280 - DNA, 521 bp, Homo sapiens
cgccctccggggtccccctgttcaccgcgggccgacccccgcggacgttcgaggaggcccttgccagaggggacgcggcctccagtcccgccccagccgcatctgtgggcagcagccagggcggcgccaggaagaggcaggtggacgccgacctgcagccggccgggtccctgccccacggtaggttggcggcattgccccagggcctccggagtgggcgcgaggctgaggaggcctctggttccctgcatgtgtctcccccagcccccaggatcaaacggcctaggctgcaggtggtcaagaggctgaacttcaggtcggaggagatggaggagccgcccctcccgactcctcgccgacggacatcaccccgccgccgagccctgaggacctcgcagagctttggggccacgggtgtgtggcttggacatgggcgtcccatcccatctgtccagtgggactcagatggagcccatcccgtgccctggatgaggcctggggggtggggagggttccatggc

SEQ ID NO: 294281 - DNA, 1070 bp, Homo sapiens
cctggtacggtccgcagttttgggacaactgtgtggggctggcggccggcgggagaggcggccggcctggactggcccgagagggatcccggttcccagaacagacctaggaggcggcctcgagggcggacggcagggagggccagcatgccccgactgctgcaccccgccctgccgctgctcctgggcgccacgctgaccttccgggcgctccggcgcgcgctctgtcgcctgcccctacccgtgcacgtgcgcgccgaccccctgcgcacctggcgctggcacaacctgctcgtctccttcgctcactccattgtgtcggggatctgggcactgctgtgtgtatggcagactcctgacatgttagtggagattgagacggcgtggtcactttctggctatttgctcgtttgcttctctgcggggtatttcatccacgatacggtggacatcgtggctagcggacagacgcgagcctcttgggaataccttgtccatcacgtcatggccatgggtgccttcttctccggcatcttttggagcagctttgtcggtgggggtgtcttaacactactggtggaagtcagcaacatcttcctcaccattcgcatgatgatgaaaatcagtaatgcccaggatcatctcctctaccgggttaacaagtatgtgaacctggtcatgtactttctcttccgcctggcccctcaggcctacctcacccatttcttcttgcgttatgtgaaccagaggaccctgggcaccttcctgctgggtatcctgctcatgctggacgtgatgatcataatctacttttcccgcctcctccgctctgacttctgccctgagcatgtccccaagaagcaacacaaagacaagttcttgactgagtgaggggcacagagcctgggacaacaaaaacggacaaggccagaaacagcttcatatggacactgggacttagccccaagcctgggtgtcctctgaggccagcctctccaccttctgagcctgcgcccacactattgaaaacactaatgaaagtaacaaaacaaaaaaaacacaagtcgagc

SEQ ID NO: 294282 - DNA, 1077 bp, Homo sapiens
ggctaggtgaggccgtgttttatcggcacggacaactgtgtggggctggcggccggcgggagaggcggccggcctggactggcccgagagggatcccggttcccagaacagacctaggaggcggcctcgagggcggacggcagggagggccagcatgccccgactgctgcaccccgccctgccgctgctcctgggcgccacgctgaccttccgggcgctccggcgcgcgctctgtcgcctgcccctacccgtgcacgtgcgcgccgaccccctgcgcacctggcgctggcacaacctgctcgtctccttcgctcactccattgtgtcggggatctgggcactgctgtgtgtatggcagactcctgacatgttagtggagattgagacggcgtggtcactttctggctatttgctcgtttgcttctctgcggggtatttcatccacgatacggtggacatcgtggctagcggacagacgcgagcctcttgggaataccttgtccatcacgtcatggccatgggtgccttcttctccggcatcttttggagcagctttgtcggtgggggtgtcttaacactactggtggaagtcagcaacatcttcctcaccattcgcatgatgatgaaaatcagtaatgcccaggatcatctcctctaccgggttaacaagtatgtgaacctggtcatgtactttctcttccgcctggcccctcaggcctacctcacccatttcttcttgcgttatgtgaaccagaggaccctgggcaccttcctgctgggtatcctgctcatgctggacgtgatgatcataatctacttttcccgcctcctccgctctgacttctgccctgagcatgtccccaagaagcaacacaaagacaagttcttgactgagtgaggggcacagagcctgggacaacaaaaacggacaaggccagaaacagcttcatatggacactgggacttagccccaagcctgggtgtcctctgaggccagcctctccaccttctgagcctgcgcccacactattgaaaacactaatgaaagtaacaaaacaaaaaaaacacaagtcgagc

SEQ ID NO: 294283 - DNA, 906 bp, Homo sapiens
ggcaaatcggaggtcttgcttgcccagcctccggggagccgggccgagggccgggactgtctgagggaggactgtgacagccgcccggccccaggagtttaagagccggcgggaagaggtggcgatgggttactcagcagttcccaagtgcccacctcgcgggcgcgggagggacagtgtatggcagactcctgacatgttagtggagattgagacggcgtggtcactttctggctatttgctcgtttgcttctctgcggggtatttcatccacgatacggtggacatcgtggctagcggacagacgcgagcctcttgggaataccttgtccatcacgtcatggccatgggtgccttcttctccggcatcttttggagcagctttgtcggtgggggtgtcttaacactactggtggaagtcagcaacatcttcctcaccattcgcatgatgatgaaaatcagtaatgcccaggatcatctcctctaccgggttaacaagtatgtgaacctggtcatgtactttctcttccgcctggcccctcaggcctacctcacccatttcttcttgcgttatgtgaaccagaggaccctgggcaccttcctgctgggtatcctgctcatgctggacgtgatgatcataatctacttttcccgcctcctccgctctgacttctgccctgagcatgtccccaagaagcaacacaaagacaagttcttgactgagtgaggggcacagagcctgggacaacaaaaacggacaaggccagaaacagcttcatatggacactgggacttagccccaagcctgggtgtcctctgaggccagcctctccaccttctgagcctgcgcccacactattgaaaacactaatgaaagtaacaaaacaaaaaaaacacaagtcgagc

SEQ ID NO: 294284 - DNA, 821 bp, Homo sapiens
ggcaaatcggaggtcttgcttgcccagcctccggggagccgggccgagggccgggactgtctgagggaggactgtgacagccgcccggccccaggagtttaagagccggcgggaagaggtggcgatgggttactcagcagttcccaagtgcccacctcgcgggcgcgggagggacagtgtatggcagactcctgacatgttagtggagattgagacggcgtggtcactttctggctatttgctcgtttgcttctctgcggggtatttcatccacgatacggtggacatcgtggctagcggacagacgcgagcctcttgggaataccttgtccatcacgtcatggccatgggtgccttcttctccggcatcttttggagcagctttgtcggtgggggtgtcttaacactactggtggaagtcagcaacatcttcctcaccattcgcatgatgatgaaaatcagtaatgcccaggatcatctcctctaccgggttaacaaaggaccctgggcaccttcctgctgggtatcctgctcatgctggacgtgatgatcataatctacttttcccgcctcctccgctctgacttctgccctgagcatgtccccaagaagcaacacaaagacaagttcttgactgagtgaggggcacagagcctgggacaacaaaaacggacaaggccagaaacagcttcatatggacactgggacttagccccaagcctgggtgtcctctgaggccagcctctccaccttctgagcctgcgcccacactattgaaaacactaatgaaagtaacaaaacaaaaaaaacacaagtcgagc

SEQ ID NO: 294285 - DNA, 907 bp, Homo sapiens
ggctaggtgaggccgtgttttatcggcacggacaactgtgtggggctggcggccggcgggagaggcggccggcctggactggcccgagagggatcccggttcccagaacagacctaggaggcggcctcgagggcggacggcagggagggccagcatgccccgactgctgcaccccgccctgccgctgctcctgggcgccacgctgaccttccgggcgctccggcgcgcgctctgtcgcctgcccctacccgtgcacgtgcgcgccgaccccctgcgcacctggcgctggcacaacctgctcgtctccttcgctcactccattgtgtcggggatctgggcactgctgtgtgtatggcagactcctgacatgttagtggagattgagacggcgtggtcactttctggctatttgctcgtttgcttctctgcggggtatttcatccacgatacggtggacatcgtggctagcggacagacgcgagcctcttgggaataccttgtccatcacgtcatggccatgggtgccttcttctccggcatcttttggagcagctttgtcggtgggggtgtcttaattgggtgctggtatctcctctaagtaaggaagatgctggagaatatgagtgccatgcatccaattcccaaggacaggcttcagcatcagcgaaaattacagtggttgatgccttacatgaaataccagtgaaaacaaggtgaaggttgccgagctataaaacctccaagaatattcatttagtctggcatggttaacagtagtccttggataactacgattacctggttcttgcctaataagtttcttttaatccaattcactaacacttaagttatattcactgggttttacacacgagacattcccattaaggagtcaccctcaggactt

SEQ ID NO: 294286 - DNA, 557 bp, Homo sapiens
ggctaggtgaggccgtgttttatcggcacggacaactgtgtggggctggcggccggcgggagaggcggccggcctggactggcccgagagggatcccggttcccagaacagacctaggaggcggcctcgagggcggacggcagggagggccagcatgccccgactgctgcaccccgccctgccgctgctcctgggcgccacgctgaccttccgggcgctccggcgcgcgctctgtcgcctgcccctacccgtgcacgtgcgcgccgaccccctgcgcacctggcgctggcacaacctgctcgtctccttcgctcactccattgtgtcggggatctgggcactgctgtgtgtatggcagactcctgacatgttagtggagattgagacggcgtggtcactttctggctatttgctcgtttgcttctctgcggggtatttcatccacgatacggtggacatcgtggctagcggacagacgcgagcctcttgggaataccttgtccatcacgtcatgcacatggacactcggacggggcatggccatcggaacggggggg

SEQ ID NO: 294287 - DNA, 2140 bp, Homo sapiens
tttttggtttcagttacggtaaatctctctggatttcagccaaattctttcagagttcaaaagtacaaagctctttaggaggtttgttcttttgaaacattttttcagaggttaaaaattaaatttcaaaagaatacctggagtggaaaagagttctcagcagagacaaagaccccgaacacctccaacatgaagcttcttcatgttttcctgttatttctgtgcttccacttaaggttttgcaaggtcacttatacatctcaagaggatctggtggagaaaaagtgcttagcaaaaaaatatactcacctctcctgcgataaagtcttctgccagccatggcagagatgcattgagggcacctgtgtttgtaaactaccgtatcagtgcccaaagaatggcactgcagtgtgtgcaactaacaggagaagcttcccaacatactgtcaacaaaagagtttggaatgtcttcatccagggacaaagtttttaaataacggaacatgcacagccgaaggaaagtttagtgtttccttgaagcatggaaatacagattcagagggaatagttgaagtaaaacttgtggaccaagataagacaatgttcatatgcaaaagcagctggagcatgagggaagccaacgtggcctgccttgaccttgggtttcaacaaggtgctgatactcaaagaaggtttaagttgtctgatctctctataaattccactgaatgtctacatgtgcattgccgaggattagagaccagtttggctgaatgtacttttactaagagaagaactatgggttaccaggatttcgctgatgtggtttgttatacaccagaaagcagattctccaatggatgacttctttcagtgtgtgaatgggaaatacatttctcagatgaaagcctgtgatggtatcaatgattgtggagaccaaagtgatgaactgtgttgtaaagcatgccaaggcaaaggcttccattgcaaatcgggtgtttgcattccaagccagtatcaatgcaatggtgaggtggactgcattacaggggaagatgaagttggctgtgcaggctttgcatctgtggctcaagaagaaacagaaattttgactgctgacatggatgcagaaagaagacggataaaatcattattacctaaactatcttgtggagttaaaaacagaatgcacattcgaaggaaacgaattgtgggaggaaagcgagcacaactgggagacctcccatggcaggtggcaattaaggatgccagtggaatcacctgtgggggaatttatattggtggctgttggattctgactgctgcacattgtctcagagccagtaaaactcatcgttaccaaatatggacaacagtagtagactggatacaccccgaccttaaacgtatagtaattgaatacgtggatagaattattttccatgaaaactacaatgcaggcacttaccaaaatgacatcgctttgattgaaatgaaaaaagacggaaacaaaaaagattgtgagctgcctcgttccatccctgcctgtgtcccctggtctccttacctattccaacctaatgatacatgcatcgtttctggctggggacgagaaaaagataacgaaagagtcttttcacttcagtggggtgaagttaaactaataagcaactgctctaagttttacggaaatcgtttctatgaaaaagaaatggaatgtgcaggtacatatgatggttccatcgatgcctgtaaaggggactctggaggccccttagtctgtatggatgccaacaatgtgacttatgtctggggtgttgtgagttggggggaaaactgtggaaaaccagagttcccaggtgtttacaccaaagtggccaattattttgactggattagctaccatgtaggaaggccttttatttctcagtacaatgtataaaattgtgatctctctcttcattctattctttttctctcaagagttccatttaatggaaataaaacggtataattaataattctctaggggggaaaaatgaagcaaatctcattggatatttttaaaggtctccacagagtttatgccatattggaattttgttgtataattctcaaataaatattttggtgaagcata

SEQ ID NO: 294288 - DNA, 1336 bp, Homo sapiens
tttttggtttcagttacggtaaatctctctggatttcagccaaattctttcagagttcaaaagtacaaagctctttaggaggtttgttcttttgaaacattttttcagaggttaaaaattaaatttcaaaagaatacctggagtggaaaagagttctcagcagagacaaagaccccgaacacctccaacatgaagcttcttcatgttttcctgttatttctgtgcttccacttaaggttttgcaaggtcacttatacatctcaagaggatctggtggagaaaaagtgcttagcaaaaaaatatactcacctctcctgcgataaagtcttctgccagccatggcagagatgcattgagggcacctgtgtttgtaaactaccgtatcagtgcccaaagaatggcactgcagtgtgtgcaactaacaggagaagcttcccaacatactgtcaacaaaagagtttggaatgtcttcatccagggacaaagtttttaaataacggaacatgcacagccgaaggaaagtttagtgtttccttgaagcatggaaatacagattcagagggaatagttgaagtaaaacttgtggaccaagataagacaatgttcatatgcaaaagcagctggagcatgagggaagccaacgtggcctgccttgaccttgggtttcaacagtgagcgcttgtatcagtggattttctcatggctgatttaattgttctgtttgctttttgattacctaacctttctgtgtattaatttccatatgtgtaacctaagaaaattaactatgtgcatcatagcattgttatgaggatgatatgcattcatgtttacccaacacttggaaccctgctgacaacaaagcatggataataagtctgttgaagtatctggatgtgaatcctttagtgattctgagagtcacaaacacattcatttctgtctgtctcctactcgtctacaattatgtacactttttcacacttagtatagtttatatactgtgtgtgagtatagtttatagttatataatatagtttatactataaactatacagtgagtataaactatacagttatagtataaactatatagttaggataaattatagtttatagttttatagtatagtttactataattatagtatataagtatatatactatgagtatagtgtacagactataatttatatatagcttgtatactataattatagtatatatacttatatataagtgatattttatttattgtttggttcaaaatatcttctaactttcaatataatttcttctttgccccatatgtaatttagaagttttctttattat

SEQ ID NO: 294289 - DNA, 2124 bp, Homo sapiens
tttttggtttcagttacggtaaatctctctggatttcagccaaattctttcagagttcaaaagtacaaagctctttaggaggtttgttcttttgaaacattttttcagaggttaaaaattaaatttcaaaagaatacctggagtggaaaagagttctcagcagagacaaagaccccgaacacctccaacatgaagcttcttcatgttttcctgttatttctgtgcttccacttaaggttttgcaaggtcacttatacatctcaagaggatctggtggagaaaaagtgcttagcaaaaaaatatactcacctctcctgcgataaagtcttctgccagccatggcagagatgcattgagggcacctgtgtttgtaaactaccgtatcagtgcccaaagaatggcactgcagtgtgtgcaactaacaggagaagcttcccaacatactgtcaacaaaagagtttggaatgtcttcatccagggacaaagtttttaaataacggaacatgcacagccgaaggaaagtttagtgtttccttgaagcatggaaatacagattcagagggaatagttgaagtaaaacttgtggaccaagataagacaatgttcatatgcaaaagcagctggagcatgagggaagccaacgtggcctgccttgaccttgggtttcaacaaggtgctgatactcaaagaaggtttaagttgtctgatctctctataaattccactgaatgtctacatgtgcattgccgaggattagagaccagtttggctgaatgtacttttactaagagaagaactatgggttaccaggatttcgctgatgtggtttgttatacaccagaaagcagattctccaatggatgacttctttcagtgtgtgaatgggaaatacatttctcagatgaaagcctgtgatggtatcaatgattgtggagaccaaagtgatgaactgtgttgtaaagcatgccaaggcaaaggcttccattgcaaatcgggtgtttgcattccaagccagtatcaatgcaatggtgaggtggactgcattacaggggaagatgaagttggctgtgcagtcaagaagaaacagaaattttgactgctgacatggatgcagaaagaagacggataaaatcattattacctaaactatcttgtggagttaaaaacagaatgcacattcgaaggaaacgaattgtgggaggaaagcgagcacaactgggagacctcccatggcaggtggcaattaaggatgccagtggaatcacctgtgggggaatttatattggtggctgttggattctgactgctgcacattgtctcagagccagtaaaactcatcgttaccaaatatggacaacagtagtagactggatacaccccgaccttaaacgtatagtaattgaatacgtggatagaattattttccatgaaaactacaatgcaggcacttaccaaaatgacatcgctttgattgaaatgaaaaaagacggaaacaaaaaagattgtgagctgcctcgttccatccctgcctgtgtcccctggtctccttacctattccaacctaatgatacatgcatcgtttctggctggggacgagaaaaagataacgaaagagtcttttcacttcagtggggtgaagttaaactaataagcaactgctctaagttttacggaaatcgtttctatgaaaaagaaatggaatgtgcaggtacatatgatggttccatcgatgcctgtaaaggggactctggaggccccttagtctgtatggatgccaacaatgtgacttatgtctggggtgttgtgagttggggggaaaactgtggaaaaccagagttcccaggtgtttacaccaaagtggccaattattttgactggattagctaccatgtaggaaggccttttatttctcagtacaatgtataaaattgtgatctctctcttcattctattctttttctctcaagagttccatttaatggaaataaaacggtataattaataattctctaggggggaaaaatgaagcaaatctcattggatatttttaaaggtctccacagagtttatgccatattggaattttgttgtataattctcaaataaatattttggtgaagcata

SEQ ID NO: 294290 - DNA, 2163 bp, Homo sapiens
tttttggtttcagttacggtaaatctctctggatttcagccaaattctttcagagttcaaaagtacaaagctctttaggaggtttgttcttttgaaacattttttcagaggttaaaaattaaatttcaaaagaatacctggagtggaaaagagttctcagcagagacaaagaccccgaacacctccaacatgaagcttcttcatgttttcctgttatttctgtgcttccacttaaggttttgcaaggtcacttatacatctcaagaggatctggtggagaaaaagtgcttagcaaaaaaatatactcacctctcctgcgataaagtcttctgccagccatggcagagatgcattgagggcacctgtgtttgtaaactaccgtatcagtgcccaaagaatggcactgcagtgtgtgcaactaacaggagaagcttcccaacatactgtcaacaaaagagtttggaatgtcttcatccagggacaaagtttttaaataacggaacatgcacagccgaaggaaagtttagtgtttccttgaagcatggaaatacagattcagagggaatagttgaagtaaaacttgtggaccaagataagacaatgttcatatgcaaaagcagctggagcatgagggaagccaacgtggcctgccttgaccttgggtttcaacaaggtgctgatactcaaagaaggtttaagttgtctgatctctctataaattccactgaatgtctacatgtgcattgccgaggattagagaccagtttggctgaatgtacttttactaagagaagaactatgggttaccaggatttcgctgatgtggtttgttatacaccagaaagcagattctccaatggatgacttctttcagtgtgtgaatgggaaatacatttctcagatgaaagcctgtgatggtatcaatgattgtggagaccaaagtgatgaactgtgttgtaaagcatgccaaggcaaaggcttccattgcaaatcgggtgtttgcattccaagccagtatcaatgcaatggtgaggtggactgcattacaggggaagatgaagttggctgtgcaggctttgcatctgtggctcaagaagaaacagaaattttgactgctgacatggatgcagaaagaagacggataaaatcattattacctaaactatcttgtggagttaaaaacagaatgcacattcgaaggaaacgaattgtgggaggaaagcgagcacaactgggagacctcccatggcaggtggcaattaaggatgccagtggaatcacctgtgggggaatttatattggtggctgttggattctgactgctgcacattgtctcagagccagtaaaactcatcgttaccaaatatggacaacagtagtagactggatacaccccgaccttaaacgtatagtaattgaatacgtggatagaattattttccatgaaaactacaatgcaggcacttaccaaaatgacatcgctttgattgaaatgaaaaaagacggaaacaaaaaagattgtgagctgcctcgttccatccctgcctgtgtcccctggtctccttacctattccaacctaatgatacatgcatcgtttctggctggggacgagaaaaagataacgaaagagtcttttcacttcagtggggtgaagttaaactaataagcaactgctctaagttttacggaaatcgtttctatgaaaaagaaatggaatgtgcaggtacatatgatggttccatcgatgcctgtaaaggggactctggaggccccttagtctgtatggatgccaacaatgtgacttatgtctggggtgttgtgagttggggggaaaactgtggaaaaccagagttcccaggtgtttacaccaaagtggccaattattttgactggattagctaccatgtaggaaggccttttatttctcagtacaatgtataaaattgtgatctctctcttcattctattctttttctctcaagagttccatttaatggaaataaaacggtataattaataattctctaggggggaaaaatgaagcaaatctcattggatatttttaaaggtctccacagagtttatgccatattggaattttgttgtataattctcaaataaatattttggtgaagcataaacacacaccaaaaagggcggcc

SEQ ID NO: 294291 - DNA, 971 bp, Homo sapiens
tcggtaccactattcacggttggctcataagaaggaaacgaatgtgaggaaagcgagcacaactgggagacctcccatggcaggtggcaattaaggatgccagtggaatcacctgtgggggaatttatattggtggctgttggattctgactgctgcacattgtctcagagccagtaaaactcatcgttaccaaatatggacaacagtagtagactggatacaccccgaccttaaacgtatagtaattgaatacgtggatagaattattttccatgaaaactacaatgcaggcacttaccaaaatgacatcgctttgattgaaatgaaaaaagacggaaacaaaaaagattgtgagctgcctcgttccatccctgcctgtgtcccctggtctccttacctattccaacctaatgatacatgcatcgtttctggctggggacgagaaaaagataacgaaagagtcttttcacttcagtggggtgaagttaaactaataagcaactgctctaagttttacggaaatcgtttctatgaaaaagaaatggaatgtgcaggtacatatgatggttccatcgatgcctgtaaaggggactctggaggccccttagtctgtatggatgccaacaatgtgacttatgtctggggtgttgtgagttggggggaaaactgtggaaaaccagagttcccaggtgtttacaccaaagtggccaattattttgactggattagctaccatgtaggaaggccttttatttctcagtacaatgtataaaattgtgatctctctcttcattctattctttttctctcaagagttccatttaatggaaataaaacggtataattaataattctctaggggggaaaaatgaagcaaatctcattggatatttttaaaggtctccacagagtttatgccatattggaattttgttgtataattctcaaataaatattttggtgaagcata

SEQ ID NO: 294292 - DNA, 1710 bp, Homo sapiens
tttttggtttcagttacggtaaatctctctggatttcagccaaattctttcagagttcaaaagtacaaagctctttaggaggtttgttcttttgaaacattttttcagaggttaaaaattaaatttcaaaagaatacctggagtggaaaagagttctcagcagagacaaagaccccgaacacctccaacatgaagcttcttcatgttttcctgttatttctgtgcttccacttaaggttttgcaaggtcacttatacatctcaagaggatctggtggagaaaaagtgcttagcaaaaaaatatactcacctctcctgcgataaagtcttctgccagccatggcagagatgcattgagggcacctgtgtttgtaaactaccgtatcagtgcccaaagaatggcactgcagtgtgtgcaactaacaggagaagcttcccaacatactgtcaacaaaagagtttggaatgtcttcatccagggacaaagtttttaaataacggaacatgcacagccgaaggaaagtttagtgtttccttgaagcatggaaatacagattcagagggaatagttgaagtaaaacttgtggaccaagataagacaatgttcatatgcaaaagcagctggagcatgagggaagccaacgtggcctgccttgaccttgggtttcaacaaggtgctgatactcaaagaaggtttaagttgtctgatctctctataaattccactgaatgtctacatgtgcattgccgaggattagagaccagtttggctgaatgtacttttactaagagaagaactatgggttaccaggatttcgctgatgtggtttgttatacaccagaaagcagattctccaatggatgacttctttcagtgtgtgaatgggaaatacatttctcagatgaaagcctgtgatggtatcaatgattgtggagaccaaagtgatgaactgtgttgtaaagcatgccaaggcaaaggcttccattgcaaatcgggtgtttgcattccaagccagtatcaatgcaatggtgaggtggactgcattacaggggaagatgaagttggctgtgcaggctttgcatctgtggctcaagaagaaacagaaattttgactgctgacatggatgcagaaagaagacggataaaatcattattacctaaactatcttgtggagttaaaaacagaatgcacattcgaaggaaacgaattgtgggaggaaagcgagcacaactgggagacctcccatggcaggtggcaattaaggatgccagtggaatcacctgtgggggaatttatattggtggctgttggattctgactgctgcacattgtctcagagccagtaaaactcatcgttaccaaatatggacaacagtagtagactggatacaccccgaccttaaacgtatagtaattgaatacgtggatagaattattttccatgaaaactacaatgcaggcacttaccaaaatgacatcgctttgattgaaatgaaaaaagacggaaacaaaaaagattgtgagctgcctcgttccatccctgcctgtgtcccctggtctccttacctattccaacctaatgatacatgcatcgtttctggctggggacgagaaaaagataacgaaagagtcttttcacttcagtggggtgaagttaaactaataagcaactgctctaagttgcccgccaatcgaagtgaacctctaga

SEQ ID NO: 294293 - DNA, 896 bp, Homo sapiens
tcgaagctccgttaaccctaagcccaggtggaatcacctgtgggggaatttatattggtggctgttggattctgactgctgcacattgtctcagagccagtaaaactcatcgttaccaaatatggacaacagtagtagactggatacaccccgaccttaaacgtatagtaattgaatacgtggatagaattattttccatgaaaactacaatgcaggcacttaccaaaatgacatcgctttgattgaaatgaaaaaagacggaaacaaaaaagattgtgagctgcctcgttccatccctgcctgtgtcccctggtctccttacctattccaacctaatgatacatgcatcgtttctggctggggacgagaaaaagataacgaaagagtcttttcacttcagtggggtgaagttaaactaataagcaactgctctaagttttacggaaatcgtttctatgaaaaagaaatggaatgtgcaggtacatatgatggttccatcgatgcctgtaaaggggactctggaggccccttagtctgtatggatgccaacaatgtgacttatgtctggggtgttgtgagttggggggaaaactgtggaaaaccagagttcccaggtgtttacaccaaagtggccaattattttgactggattagctaccatgtaggaaggccttttatttctcagtacaatgtataaaattgtgatctctctcttcattctattctttttctctcaagagttccatttaatggaaataaaacggtataattaataattctctaggggggaaaaatgaagcaaatctcattggatatttttaaaggtctccacagagtttatgccatattggaattttgttgtataattctcaaataaatattttggtgaagcata

SEQ ID NO: 294294 - DNA, 853 bp, Homo sapiens
gatcacgcggagtatatggggtgtgaattctgactgctaccattgtctcacagccagtaaaactcatcgttaccaaatatggacaacagtagtagactggatacaccccgaccttaaacgtatagtaattgaatacgtggatagaattattttccatgaaaactacaatgcaggcacttaccaaaatgacatcgctttgattgaaatgaaaaaagacggaaacaaaaaagattgtgagctgcctcgttccatccctgcctgtgtcccctggtctccttacctattccaacctaatgatacatgcatcgtttctggctggggacgagaaaaagataacgaaagagtcttttcacttcagtggggtgaagttaaactaataagcaactgctctaagttttacggaaatcgtttctatgaaaaagaaatggaatgtgcaggtacatatgatggttccatcgatgcctgtaaaggggactctggaggccccttagtctgtatggatgccaacaatgtgacttatgtctggggtgttgtgagttggggggaaaactgtggaaaaccagagttcccaggtgtttacaccaaagtggccaattattttgactggattagctaccatgtaggaaggccttttatttctcagtacaatgtataaaattgtgatctctctcttcattctattctttttctctcaagagttccatttaatggaaataaaacggtataattaataattctctaggggggaaaaatgaagcaaatctcattggatatttttaaaggtctccacagagtttatgccatattggaattttgttgtataattctcaaataaatattttggtgaagcata

SEQ ID NO: 294295 - DNA, 1555 bp, Homo sapiens
tttttggtttcagttacggtaaatctctctggatttcagccaaattctttcagagttcaaaagtacaaagctctttaggaggtttgttcttttgaaacattttttcagaggttaaaaattaaatttcaaaagaatacctggagtggaaaagagttctcagcagagacaaagaccccgaacacctccaacatgaagcttcttcatgttttcctgttatttctgtgcttccacttaaggttttgcaaggtcacttatacatctcaagaggatctggtggagaaaaagtgcttagcaaaaaaatatactcacctctcctgcgataaagtcttctgccagccatggcagagatgcattgagggcacctgtgtttgtaaactaccgtatcagtgcccaaagaatggcactgcagtgtgtgcaactaacaggagaagcttcccaacatactgtcaacaaaagagtttggaatgtcttcatccagggacaaagtttttaaataacggaacatgcacagccgaaggaaagtttagtgtttccttgaagcatggaaatacagattcagagggaatagttgaagtaaaacttgtggaccaagataagacaatgttcatatgcaaaagcagctggagcatgagggaagccaacgtggcctgccttgaccttgggtttcaacaaggtgctgatactcaaagaaggtttaagttgtctgatctctctataaattccactgaatgtctacatgtgcattgccgaggattagagaccagtttggctgaatgtacttttactaagagaagaactatgggttaccaggatttcgctgatgtggtttgttatacaccagaaagcagattctccaatggatgacttctttcagtgtgtgaatgggaaatacatttctcagatgaaagcctgtgatggtatcaatgattgtggagaccaaagtgatgaactgtgttgtaaagcatgccaaggcaaaggcttccattgcaaatcgggtgtttgcattccaagccagtatcaatgcaatggtgaggtggactgcattacaggggaagatgaagttggctgtgcaggctttgcatctgtggctcaagaagaaacagaaattttgactgctgacatggatgcagaaagaagacggataaaatcattattacctaaactatcttgtggagttaaaaacagaatgcacattcgaaggaaacgaattgtgggaggaaagcgagcacaactgggagacctcccatggcaggtggcaattaaggatgccagtggaatcacctgtgggggaatttatattggtggctgttggattctgactgctgcacattgtctcagagccagtaaaactcatcgttaccaaatatggacaacagtagtagactggatacaccccgaccttaaacgtatagtaattgaatacgtggatagaattattttccatgaaaactacaatgcaggccatctcaccatggcattgatacgggctgggagggcaaagagctgatttgcgagggaagggttagccttggtatgattgagaacacagttcatc

SEQ ID NO: 294296 - DNA, 1190 bp, Homo sapiens
tttttggtttcagttacggtaaatctctctggatttcagccaaattctttcagagttcaaaagtacaaagctctttaggaggtttgttcttttgaaacattttttcagaggttaaaaattaaatttcaaaagaatacctggagtggaaaagagttctcagcagagacaaagaccccgaacacctccaacatgaagcttcttcatgttttcctgttatttctgtgcttccacttaaggttttgcaaggtcacttatacatctcaagaggatctggtggagaaaaagtgcttagcaaaaaaatatactcacctctcctgcgataaagtcttctgccagccatggcagagatgcattgagggcacctgtgtttgtaaactaccgtatcagtgcccaaagaatggcactgcagtgtgtgcaactaacaggagaagcttcccaacatactgtcaacaaaagagtttggaatgtcttcatccagggacaaagtttttaaataacggaacatgcacagccgaaggaaagtttagtgtttccttgaagcatggaaatacagattcagagggaatagttgaagtaaaacttgtggaccaagataagacaatgttcatatgcaaaagcagctggagcatgagggaagccaacgtggcctgccttgaccttgggtttcaacaaggtgctgatactcaaagaaggtttaagttgtctgatctctctataaattccactgaatgtctacatgtgcattgccgaggattagagaccagtttggctgaatgtacttttactaagagaagaactatgggttaccaggatttcgctgatgtggtttgttatacaccagaaagcagattctccaatggatgacttctttcagtgtgtgaatgggaaatacatttctcagatgaaagcctgtgatggtatcaatgattgtggagaccaaatgtgatgaagaattccagtattgcctctccaagatctgccgagatgtacagaaaacactaggactaactcagcatgttcaggcatgtgaaacaacagtggagctcttgtttgacagtgttatacatttaggttgtaaaccatatctggacagccaacgagccgcatgcaggtgtcattatgaagaaaaaactgatctttaaaggagatgccgacagctagtgacagatgaagatggaagaacatacctt

SEQ ID NO: 294297 - DNA, 293 bp, Homo sapiens
tttatattggtggctgttggattctgactgctgcacattgtctcaggtaaaagatgtcttcagtaaattttagatttcccgaaacaatgaaagtgagtaatagagattgtggcagatgataaagcatatctgaaaaaggtactgacaaactccactatattaattgcaaagtatcctctggtattcgcgactggaattccagaggctaatcccgtagaatctactgtgtcctccacagaccaaaattgctgatctcactggcaaaggcagatcaaacccatagctgccaaatt

SEQ ID NO: 294298 - DNA, 544 bp, Homo sapiens
gagagcccatgctattgctgtcaggaaactgtaaaaaagccaaagttgttaaatgccatggaggaggcatggcagccttgaaaaatggaaggaaatgtgtgattttctctttcacatttctttcttaggtacatatgatggttccatcgatgcctgtaaaggggactctggaggccccttagtctgtatggatgccaacaatgtgacttatgtctggggtgttgtgagttggggggaaaactgtggaaaaccagagttcccaggtgtttacaccaaagtggccaattattttgactggattagctaccatgtaggaaggccttttatttctcagtacaatgtataaaattgtgatctctctcttcattctattctttttctctcaagagttccatttaatggaaataaaacggtataattaataattctctaggggggaaaaatgaagcaaatctcattggatatttttaaaggtctccacagagtttatgccatattggaattttgttgtataattctcaaataaatattttggtgaagcata

SEQ ID NO: 294299 - DNA, 1452 bp, Homo sapiens
aatgttataaagccatagtaatcaaaactgtggtattggagaaaggatacatagatcatcagaacagagcagagcagagcatccataaatatgcacacataaatatagtctaccaaaatttacaatagtgcaaaggtaattcatttgagaaagtagtcttttcaacaaatggtgatgaaacacttggatatccatatgcataaaatgaaacttgatacacattttatgtctcatacacaaataagtcatgaacctaaatgtaaaacataaaactatacaacttctagagcaatggtctcaagtggtagtaacttttgtctccaagaaacaaagtatagagacatttttgactgtcagtacttggggggaggagatcactggcatctaatgggtgcagaccagggatgtcactaaatatcccacaatgcacagcacagtcaccatcacacacacgaaaatgccaatttctagtctggataaatataccatggttatgtaactatctcttattagaggaacagaaacttggtaaagagtgtatgggaatgctttttactccctttgcaactcttcagggcaatagactatacttcaaagtctaacatttaataatttcctattctatttctgtgaaggcatcatgtactgtagcagatgtattctgctttgatgtcttgcaaaatcactttgattcttcaattaaatttattaaatgtgtaaatattgccagtcatgtattatatgttaaaaatttgagaccaataaaatattttcaaatgtctcctctttataggagctttcctgtttcatctaacctaaaataccacctttctccaccaatctttctgatgttctccccatggaacttttttctgactgttttcccttttctagggtatatgctccatgaaggcagggactttgttgtacctccagggccagaactggcacactagagatggatgcttaataaatatttgttgagtgaatgaattatatgtatttgtgttgcgtcttcccaataagtggtctttattcaaacgttggagcttcagtaaacccctatttggctgtgaacagattagtctcaatcctagtatttaatttaccccgagtgaaagtaacacctttctcttaagcagcaagatgcattaatctttacgttaagatttttcatggcaaaaaacaaatccattttttttcttccctttcttcagctctggggatgccaggcaagaaggagatgacggggtagataatggttactttgtaattttctggaagatcatgctggttctactagaagacttttacctcacatgattggatgctcctcaagctgaacttcttccatttgtgatagtatttggaccatttctagaatatgttataagatttttataagattgtctttccaattaaagttttaggttaaagttctaaaaaaaaaaa

SEQ ID NO: 294300 - DNA, 568 bp, Homo sapiens
tttctgtacattggaagacaagctattccacttgagctggtactgcagatgtgacctcaagaaatttggttaatgaaaatgctgcatctctgatctgcatctccactttctcccagcgggtcctaccatttggcccttgttccctgcctcaaaaactggcccagccccaaactcactggttgccgtgggaaagatgcctaaaaggtgtttgaagatgaggaagaaaagggaagttctgggagctggtgaagaaacccacaactcctcaaggtcagcccatggggaagagctaggagctcagaatccaaccagcaagaggacattttaaaacagctctggggatgccaggcaagaaggagatgacggggtagataatggttactttgtaattttctggaagatcatgctggttctactagaagacttttacctcacatgattggatgctcctcaagctgaacttcttccatttgtgatagtatttggaccatttctagaatatgttataagatttttataagattgtctttccaattaaagttttaggttaaagttctaaaaaaaaaaa

SEQ ID NO: 294301 - DNA, 2896 bp, Homo sapiens
tgtttggtatatttaaagcagtgactgagtgtgtttgagtgagtggctgagtgcagtgtcttttgtttaaacacactgcctcgtgtctttgtagctgattcagagagtttgaattgtggggtgggagactaacttcagctccaggctgcagtaatgtgttggtagttacacttgaggcatttttttgttgttgttaattaactctatagtctcaaactatttttgcaaatatatcatttttcctaattggttcttgacgtgcagtggactggctctgtgaatgattggcagggtcttagttttgcgagagcatttccttctaagaattattgtgatctgcagaaacagccatttgattcaaaaatcatgtagaaaaggagtaggagaagcaaaacgtttcatttttgggccttaaccatttgaaatgtttggactttaaacataaagccatggagtttataaagccaagtaaccatttgatatggataataatatctactctagagagagtatatatatgcacattgatttttaatgctgttaagatacttttgtaaaactgtaggaacaagagtaattagaccaaattgaagcttaggggacagtaaagtggttgctttccatttagggtaaccatgcatgtggttagtcctctcctcctgagattcagaaccagttgactgtccccttaggtgtataaggagaaaagttgacatgtctgggacctctgacatgtgtacacatgcttgcacacatgcacacacagtgaatgttttaagttatacaaacataagaccttaagatgcaaagagccagaatattctaaagaggtgatgaacagagggggtggaaactgcatcacagatgttttccaagggccagggtggaatctgagctctagtgtctgactttgagatgcattatatttttaacacataaatgaggggatccatatcacattctttcttgtggaccaccaaattgaaggctttcttgtaattcacaagcagcagctctccagcatctctccgtagcctgggtgaagtcccagaagctggtgtgcatcattttccaaggtggcagagctgcttgctctgcagatcattcctttgagagaggagtacaagtgaagaaacaaggaggcacttcctgtaggagcactgatgtgccttgtccacactcccctctgagctttactggtaagagagctccgactgaacatgctgagcagttgagcacttttccatcagcaacaacagcgaggatggaaatggaaaggaaccgaactaaaatgcatttccctttgcagggcagagagctaagctcttaggaatagtgttatagaaataagcaccctaacttcaattcctgaaaatgttggttaatggagagaattttggagtttcacttaatattttcccatcggtcgccataaataagtcttcaggcgctcctagaagagtcccagcccaaggctcgattaaggaccacactgcaggtctgaggctcactgctctgagtcctgaacaccagagccctgcagagagtggtgataacacatcatctctgcaaagaggaacctctcccccggccgccacttcactcaggcttctactgagcagcaaggacagcctgggtttcaaatgccacttcccctgctttagggatccaggtgtcctgatagcgtgaccctgctgaggcaaggtatcaactccgagagtgactgagtcactgagcgtggcacatgaacaaacgtcatgacaaagattctctgagtgaagttaacaccacgtattttacctttgcaaaaaacaaactggcaccctgagttctaactacggacggacgatatctttgcctccacacccagattcctggaaatggctaacgtttcctttctaggggaagggtcgaggaatactcaagtgctagcttagcagctttgttcagtccagatcagagctgttaggtaaaggcctaaccacctccctgcagtctcttatatctcaagctttaggaacccatttctaaatgtacactagcggagaatttatattgtcagccttgattaccataggacaggcagaaaggcgataatttgtatcttttaatataaaagaagcttttaacttttccagcctattataataactgagttatattcactgtggctcaaactaattggcattgtggaacatttctttaccttcaaagttttctccaccaatcatttcagttctattgcagtcctggtgccatatgtcccctgcaaattgtgaaagtaattagtgacaaaatagcagcctgctccttttcaatggcgaaactgtcggcattagcagttttgggtaagctggcggtactataacacgtactggaaacctgttcctcatcaccacctaccagattctggaaatgccgtcttctagaaaacgatggcgtttgtggtggtcttcttttgaaaggaacagtaatttgtgtggatattgttaaagtgtttaaagaatattttgacaattaagtttacattttacaattgctttattttttattaaaatagttgtatataaatattaccctatttcactgttgttcaagtaaatctaaaccttgtagacaagtgagtcatctgatatgtatagaagctgtgatatatagagtacatttattgtgtaaatgtttatgaatataattgttcctgtgtttttataagttggggatattttgttgttttacggcaacaaaatttattgcatttaaatggtttttatgtaatagaaatcacgcaaaatagtgaaggatttaaaatatgtatatgatacatgtaaatgtacaaactttagaaagaaataaatccaacaaatttcaaacaaaagcggatcctctagagtcgacc

SEQ ID NO: 294302 - DNA, 2869 bp, Homo sapiens
tgtttggtatatttaaagcagtgactgagtgtgtttgagtgagtggctgagtgcagtgtcttttgtttaaacacactgcctcgtgtctttgtagctgattcagagagtttgaattgtggggtgggagactaacttcagctccaggctgcagtaatgtgttggtagttacacttgaggcatttttttgttgttgttaattaactctatagtctcaaactatttttgcaaatatatcatttttcctaattggttcttgacgtgcagtggactggctctgtgaatgattggcagggtcttagttttgcgagagcatttccttctaagaattattgtgatctgcagaaacagccatttgattcaaaaatcatgtagaaaaggagtaggagaagcaaaacgtttcatttttgggccttaaccatttgaaatgtttggactttaaacataaagccatggagtttataaagccaagtaaccatttgatatggataataatatctactctagagagagtatatatatgcacattgatttttaatgctgttaagatacttttgtaaaactgtaggaacaagagtaattagaccaaattgaagcttaggggacagtaaagtggttgctttccatttagggtaaccatgcatgtggttagtcctctcctcctgagattcagaaccagttgactgtccccttaggtgtataaggagaaaagttgacatgtctgggacctctgacatgtgtacacatgcttgcacacatgcacacacagtgaatgttttaagttatacaaacataagaccttaagatgcaaagagccagaatattctaaagaggtgatgaacagagggggtggaaactgcatcacagatgttttccaagggccagggtggaatctgagctctagtgtctgactttgagatgcattatatttttaacacataaatgaggggatccatatcacattctttcttgtggaccaccaaattgaaggctttcttgtaattcacaagcagcagctctccagcatctctccgtagcctgggtgaagtcccagaagctggtgtgcatcattttccaaggtggcagagctgcttgctctgcagatcattcctttgagagaggagtacaagtgaagaaacaaggaggcacttcctgtaggagcactgatgtgccttgtccacactcccctctgagctttactggtaagagagctccgactgaacatgctgagcagttgagcacttttccatcagcaacaacagcgaggatggaaatggaaaggaaccgaactaaaatgcatttccctttgcagggcagagagctaagctcttaggaatagtgttatagaaataagcaccctaacttcaattcctgaaaatgttggttaatggagagaattttggagtttcacttaatattttcccatcggtcgccataaataagtcttcaggcgctcctagaagagtcccagcccaaggctcgattaaggaccacactgcaggtctgaggctcactgctctgagtcctgaacaccagagccctgcagagagtggtgataacacatcatctctgcaaagaggaacctctcccccggccgccacttcactcaggcttctactgagcagcaaggacagcctgggtttcaaatgccacttcccctgctttagggatccaggtgtcctgatagcgtgaccctgctgaggcaaggtatcaactccgagagtgactgagtcactgagcgtggcacatgaacaaacgtcatgacaaagattctctgagtgaagttaacaccacgtattttacctttgcaaaaaacaaactggcaccctgagttctaactacggacggacgatatctttgcctccacacccagattcctggaaatggctaacgtttcctttctaggggaagggtcgaggaatactcaagtgctagcttagcagctttgttcagtccagatcagagctgttaggtaaaggcctaaccacctccctgcagtctcttatatctcaagctttaggaacccatttctaaatgtacactagcggagaatttatattgtcagccttgattaccataggacaggcagaaaggcgataatttgtatcttttaatataaaagaagcttttaacttttccagcctattataataactgagttatattcactgtggctcaaactaattggcattgtggaacatttctttaccttcaaagttttctccaccaatcatttcagttctattgcagtcctggtgccatatgtcccctgcaaattgtgaaagtaattagtgacaaaatagcagcctgctccttttcaatggcgaaactgtcggcattagcagttttgggtaagctggcggtactataacacgtactggaaacctgttcctcatcaccacctaccagattctggaaatgccgtcttctagaaaacgatggcgtttgtggtggtcttcttttgaaaggaacagtaatttgtgtggatattgttaaagtgtttaaagaatattttgacaattaagtttacattttacaattgctttattttttattaaaatagttgtatataaatattaccctatttcactgttgttcaagtaaatctaaaccttgtagacaagtgagtcatctgatatgtatagaagctgtgatatatagagtacatttattgtgtaaatgtttatgaatataattgttcctgtgtttttataagttggggatattttgttgttttacggcaacaaaatttattgcatttaaatggtttttatgtaatagaaatcacgcaaaatagtgaaggatttaaaatatgtatatgatacatgtaaatgtacaaactttagaaagaaataaatccaacaaatttcaa

SEQ ID NO: 294303 - DNA, 1841 bp, Homo sapiens
  misc_feature (74)..(74): n is a, c, g, or t
cgctctgaacttaggcctggctctgaacttaggcctggctctgaacttaggcctggctctgaacttaggcctgnctctcaacttagggaggagtacaagtgaagaaacaaggaggcacttcctgtaggagcactgatgtgccttgtccacactcccctctgagctttactggtaagagagctccgactgaacatgctgagcagttgagcacttttccatcagcaacaacagcgaggatggaaatggaaaggaaccgaactaaaatgcatttccctttgcagggcagagagctaagctcttaggaatagtgttatagaaataagcaccctaacttcaattcctgaaaatgttggttaatggagagaattttggagtttcacttaatattttcccatcggtcgccataaataagtcttcaggcgctcctagaagagtcccagcccaaggctcgattaaggaccacactgcaggtctgaggctcactgctctgagtcctgaacaccagagccctgcagagagtggtgataacacatcatctctgcaaagaggaacctctcccccggccgccacttcactcaggcttctactgagcagcaaggacagcctgggtttcaaatgccacttcccctgctttagggatccaggtgtcctgatagcgtgaccctgctgaggcaaggtatcaactccgagagtgactgagtcactgagcgtggcacatgaacaaacgtcatgacaaagattctctgagtgaagttaacaccacgtattttacctttgcaaaaaacaaactggcaccctgagttctaactacggacggacgatatctttgcctccacacccagattcctggaaatggctaacgtttcctttctaggggaagggtcgaggaatactcaagtgctagcttagcagctttgttcagtccagatcagagctgttaggtaaaggcctaaccacctccctgcagtctcttatatctcaagctttaggaacccatttctaaatgtacactagcggagaatttatattgtcagccttgattaccataggacaggcagaaaggcgataatttgtatcttttaatataaaagaagcttttaacttttccagcctattataataactgagttatattcactgtggctcaaactaattggcattgtggaacatttctttaccttcaaagttttctccaccaatcatttcagttctattgcagtcctggtgccatatgtcccctgcaaattgtgaaagtaattagtgacaaaatagcagcctgctccttttcaatggcgaaactgtcggcattagcagttttgggtaagctggcggtactataacacgtactggaaacctgttcctcatcaccacctaccagattctggaaatgccgtcttctagaaaacgatggcgtttgtggtggtcttcttttgaaaggaacagtaatttgtgtggatattgttaaagtgtttaaagaatattttgacaattaagtttacattttacaattgctttattttttattaaaatagttgtatataaatattaccctatttcactgttgttcaagtaaatctaaaccttgtagacaagtgagtcatctgatatgtatagaagctgtgatatatagagtacatttattgtgtaaatgtttatgaatataattgttcctgtgtttttataagttggggatattttgttgttttacggcaacaaaatttattgcatttaaatggtttttatgtaatagaaatcacgcaaaatagtgaaggatttaaaatatgtatatgatacatgtaaatgtacaaactttagaaagaaataaatccaacaaatttcaa

SEQ ID NO: 294304 - DNA, 367 bp, Homo sapiens
gcggccgccggcgcagggtggggagccaggaagcggcgcggcccggagatcccgcctcccgcccatcccagcgcccggctcccggactgggcggcccggcgacgcgggggggcttctggcctgcgcccggctgccgtgtgcgccgggtgcccgccacgacccatgtcgcccatgccccaagtgccctctgccttccctccgcagaaactggaggcctgccaccaagccccaatctctgcctcagtttcctcatctgtacacaggccccataacactggtgccagcgcttggcaggagccagcacgtggaagtaccctgtggggcgattcctgctattgtcctcatcttcccggagctggagctccct

SEQ ID NO: 294305 - DNA, 680 bp, Homo sapiens
gagcggcttccgccgggctgctccgcgggcgcgtcggccatgagcgagttgccgggcgacgtgcgggcgtttctgcgggagcacccgagcctgcggctccagacggacgcccgcaaggtgaggtgcatcctgacaggtcacgagctgccctgccgcctgccggagctccaggtctacacccgcggcaaaaagtaccagcggctggtccgcgcctccccggccttcgactatgcagagttcgagccgcacatcgtgcccagcaccaagaacccgcaccagttgttctgcaaactcaccctgcggcacatcaacaagtgcccagaacacgtgctgaggcacacccagggccggcggtaccagcgagctctgtgtaaataagcagttgggctcgttgaaaaagaagttcaagagtcatcaccgcaaacccaagagcttcagctcctgtaaacagccaggttaataaaagcaaaaaaaaaaaaaaaaaaaaaaaacttcgaagggcataaatggccgggggtggcgggaagaaagaagggtattggaaattgggcacttggggccaatagtgtggtttcgtggaccaaagttttttttggtaccaagtgtgggtagattgggggggtccccctaataagggaggccggtataaattgcaaaaagccgggtgatcgtggttgatg

SEQ ID NO: 294306 - DNA, 1030 bp, Homo sapiens
gagcggcttccgccgggctgctccgcgggcgcgtcggccatgagcgagttgccgggcgacgtgcgggcgtttctgcgggagcacccgagcctgcggctccagacggacgcccgcaaggtgaggtgcatcctgacaggtcacgagctgccctgccgcctgccggagctccaggtctacacccgcggcaaaaagtaccagcggctggtccgcgcctccccggccttcgactatgcagagttcgagccgcacatcgtgcccagcaccaagaacccgcaccagttgttctgcaaactcaccctgcggcacatcaacaagtgcccagaacacgtgctgaggcacacccagggccggcggtaccagcgagctctgtgtaaatatgaagaatgtcagaagcaaggggtggagtacgtgcctgcctgcctggtgcaccggaggaggaggagggaggaccagatggacggtgacgggcctcgcccgcgggaagccttctgggagcccacatccagtgatgaggggggagctgcaagtgatgacagcatgacagacctgtacccacctgagctattcaccagaaaggaccttggaagcacggaggatggggatggcactgatgactttttgacagacaaagaggatgagaaggcaaagcccccaagagagaaggccactgatgagagcaggagagagacgaccgtgtaccgagggctggtccagaagcgcgggaagaagcagttgggctcgttgaaaaagaagttcaagagtcatcaccgcaaacccaagagcttcagctcctgtaaacagccaggttaataaaagcaaaaaaaaaaaaaaaaaaaaaaaacttcgaagggcataaatggccgggggtggcgggaagaaagaagggtattggaaattgggcacttggggccaatagtgtggtttcgtggaccaaagttttttttggtaccaagtgtgggtagattgggggggtccccctaataagggaggccggtataaattgcaaaaagccgggtgatcgtggttgatg

SEQ ID NO: 294307 - DNA, 1196 bp, Homo sapiens
gagcggcttccgccgggctgctccgcgggcgcgtcggccatgagcgagttgccgggcgacgtgcgggcgtttctgcgggagcacccgagcctgcggctccagacggacgcccgcaaggtgaggtgcatcctgacaggtcacgagctgccctgccgcctgccggagctccaggtctacacccgcggcaaaaagtaccagcggctggtccgcgcctccccggccttcgactatgcagagttcgagccgcacatcgtgcccagcaccaagaacccgtaggtggtccgcggcggcgcggggaggcccagggcaattaggacagcccctccgctggactccgccagtgctgcagcccctactctttcagagttgggagccctgggacccaggtgggcgcccgggtgctggaatcacctgcggtcccagcggcgaggcctcttggcaccagttgttctgcaaactcaccctgcggcacatcaacaagtgcccagaacacgtgctgaggcacacccagggccggcggtaccagcgagctctgtgtaaatatgaagaatgtcagaagcaaggggtggagtacgtgcctgcctgcctggtgcaccggaggaggaggagggaggaccagatggacggtgacgggcctcgcccgcgggaagccttctgggagcccacatccagtgatgaggggggagctgcaagtgatgacagcatgacagacctgtacccacctgagctattcaccagaaaggaccttggaagcacggaggatggggatggcactgatgactttttgacagacaaagaggatgagaaggcaaagcccccaagagagaaggccactgatgagagcaggagagagacgaccgtgtaccgagggctggtccagaagcgcgggaagaagcagttgggctcgttgaaaaagaagttcaagagtcatcaccgcaaacccaagagcttcagctcctgtaaacagccaggttaataaaagcaaaaaaaaaaaaaaaaaaaaaaaacttcgaagggcataaatggccgggggtggcgggaagaaagaagggtattggaaattgggcacttggggccaatagtgtggtttcgtggaccaaagttttttttggtaccaagtgtgggtagattgggggggtccccctaataagggaggccggtataaattgcaaaaagccgggtgatcgtggttgatg

SEQ ID NO: 294308 - DNA, 274 bp, Homo sapiens
tctgaggccctgctgagcggggtctaatcctgcagctgttaaggaaacgggggtggagaaagcctctgtgggtatttgaccgacacctctgaggctgtgtgggtggggagagccctgcactccagggccccttctccatgggatcagaaaggctcagtaatcagaattttgtttatcccacagaagcagttgggctcgttgaaaaagaagttcaagagtcatcaccgcaaacccaagagcttcagctcctgtaaacagccaggttaataaaagc

SEQ ID NO: 294309 - DNA, 431 bp, Homo sapiens
aattgggcgcattgcatctgattcagcctcttgaggagaaagacttcatactgatccaaatagactcccgagaggcagaaagaggaaaatgataaataaatgccagccaagctctaaaatggaacactctagctgtgtggccactgctttaatgaagacagctgccattctgtgagctgttctatgaaggagcccacttggcaaggaactgggggaggtctcagattaacagccagcaagaaactgaatcctgctaacaaccacctgaatgaacatgaaagcagacccttccccaattgagtcttcagatgagacccagtgctcacctgcacctaggttggagccctaagagaaaccttgaagcagaggaaccagcttaacctgatccatggaaactataaaataaaatgtgtgttgtttaaactgctaaa

SEQ ID NO: 294310 - DNA, 610 bp, Homo sapiens
acaggcgatgggctataggatgaggacctgccagggccaagaagacacatttcagaaggaggctcttaaaggccaagccaagaagcaagagcacggatttacatctcattggctgagggtgctccaggaatttctcacacagaagcgtgagtggctgaaacgaagagaatggacatggagcccacccggaagagcacccttaacatcatcatatccctgaagcacgagtcggggtggtgggactgccctggaaaccctgcacacagctggcttgagcagtgggtattttcataaggcatatatgggcatcacagaacacttggagctttaatgaagacagctgccattctgtgagctgttctatgaaggagcccacttggcaaggaactgggggaggtctcagattaacagccagcaagaaactgaatcctgctaacaaccacctgaatgaacatgaaagcagacccttccccaattgagtcttcagatgagacccagtgctcacctgcacctaggttggagccctaagagaaaccttgaagcagaggaaccagcttaacctgatccatggaaactataaaataaaatgtgtgttgtttaaactgctaaa

SEQ ID NO: 294311 - DNA, 396 bp, Homo sapiens
gtgctgcatggagtgagtggcggcatccaccgtgaggaggagaggagctctgataccctcaggacccgccaggaggggcatcacggaggcttctggacgacttggagctgtgtcctggggagaaaaccgctcctgtctgggccctgagtgctgaggaggaagctgccatgcacttttccctggcatttttcctgcatggttcgtctgtgtttttgcaaatgacatgttgtcatgaatttttatgcatgaggcatatttcatcatgtctgtatgctgaagtcccttcatcctttcattggttggtggacaggagagagaggtccaaggtgccctacatcgtgcgtcagtgcgtggaggagatcgagcgccgaggcatggaggaggtgggcatctacc

SEQ ID NO: 294312 - DNA, 371 bp, Homo sapiens
gtgctgcatggagtgagtggcggcatccaccgtgaggaggagaggagctctgataccctcaggacccgccaggaggggcatcacggaggcttctggacgacttggagctgtgtcctggggagaaaaccgctcctgtctgggccctgagtgctgaggaggaagctgccatgcacttttccctggcatttttcctgcatggttcgtctgtgtttttgcaaatgacatgttgtcatgaatttttatgcatgaggcatatttcatcatgtctgtatgctgaagtcccttcatcctttcattggttggtggacaggaaagagaggtctaaggggcacatacttcatgcaccagttcgtggatgatatctagccctt

SEQ ID NO: 294313 - DNA, 1584 bp, Homo sapiens
agtggcggccgggcgacgagtgcgggcctcggagcgactgcagcggcggcggcggacgcggcctgaggcgagcggcggggcgtggggcggtgcctcggcccgggctcgccctcgccggcgggagcgtccatggcccccgggcgccggcggggcgcggccgcggcctgaggggccatgtccggggtggtgcggaccctcagccgctgcctgctgccggccgaggccggcggggcccgcgagcgcagggcgggcagcggcgcgcgcgacgcggagcgcgaggcccggaggcgtagccgcgacatcgacgcgctgctggcccgcgagcggcgcgcggtccggcgcctggtgaagatcctgctgctgggcgcgggcgagagcggcaagtccacgttcctcaagcagatgcgcatcatccacggccgcgagttcgaccagaaggcgctgctggagttccgcgacaccatcttcgacaacatcctcaagggctcaagggttcttgttgatgcacgagataagcttggcattccttggcagtattctgaaaatgagaagcatgggatgttcctgatggccttcgagaacaaggcggggctgcctgtggagccggccaccttccagctgtacgtcccggccctgagcgcactctggagggattctggcatcagggaggctttcagccggagaagcgagtttcagctgggggagtcggtgaagtacttcctggacaacttggaccggatcggccagctgaattactttcctagtaagcaagatatcctgctggctaggaaagccaccaagggaattgtggagcatgacttcgttattaagaagatcccctttaagatggtggatgtgggcggccagcggtcccagcgccagaagtggttccagtgcttcgacgggatcacgtccatcctgttcatggtctcctccagcgagtacgaccaggtcctcatggaggacaggcgcaccaaccggctggtggagtccatgaacatcttcgagaccatcgtcaacaacaagctcttcttcaacgtctccatcattctcttcctcaacaagatggacctcctggtggagaaggtgaagaccgtgagcatcaagaagcacttcccggacttcaggggcgacccgcacaggctggaggacgtccagcgctacctggtccagtgcttcgacaggaagagacggaaccgcagcaagccactcttccaccacttcaccaccgccatcgacaccgagaacgtccgcttcgtgttccatgctgtgaaagacaccatcctgcaggagaacctgaaggacatcatgctgcagtgagcgaggaagccccggggtttgtcgtcgttgagcagcccccacggctgtcggtcagactcttgggtgtgtgttgtctgtgtggtccttgagtgggtttctcggatccgtgccctggaatacctggctcaggaatgctgtcagaccaggcagccagcgaagctctaggcaaaaggacatggaaactgtcacgttagctactgaatcctgggggcgagtgaaactactgaaaatccgagtgatgatgttgtgaatacggaacaccta

SEQ ID NO: 294314 - DNA, 679 bp, Homo sapiens
ataaaatgtactcaagtcacatataatttctacaccactcacaggttgtacaactgccatgcaaatgcatttcagatttactttttttttacacagtgaaccttcttgatttttattttggtttattttattttactttattttattttaaatatagggtcttgctctgcactccagcccaggcgagagagcgagagtctgtctcaaaaaaaaaaaaaaaaaaattcgaaatgccctttttcttaactccatttgaaccagctcacatcgatgggcacaagcgtcgccaggaaattcagtgtggtaagcttggcacctactcatggccaccgtgtcctgaactccctttcctgtgctcaggccccagcccacgcagcaggaggacacactgccgaagggaccagttggacggccttctggctttagcgcctgtgcctttcaggaccttaaatacagaaaggaaccgagtgctctgtgcagcccctccaagacggtcgctacagcgccagcaccacctgcgccgggccatcatgccgtgaccggacttggtttacgaatacagtgtacgaggttaagatatgataaagtgtaaaaatatatgttatagccacggtggttagtttaacatgttttgtatatatgatttttataaatctattaaaatgtgccttaaattaaa

SEQ ID NO: 294315 - DNA, 533 bp, Homo sapiens
tgagatggaattttgctcttttgcactccagcccaggcgagagagcgagagtctgtctcaaaaaaaaaaaaaaaaaaattcgaaatgccctttttcttaactccatttgaaccagctcacatcgatgggcacaagcgtcgccaggaaattcagtgtggtaagcttggcacctactcatggccaccgtgtcctgaactccctttcctgtgctcaggccccagcccacgcagcaggaggacacactgccgaagggaccagttggacggccttctggctttagcgcctgtgcctttcaggaccttaaatacagaaaggaaccgagtgctctgtgcagcccctccaagacggtcgctacagcgccagcaccacctgcgccgggccatcatgccgtgaccggacttggtttacgaatacagtgtacgaggttaagatatgataaagtgtaaaaatatatgttatagccacggtggttagtttaacatgttttgtatatatgatttttataaatctattaaaatgtgccttaaattaaa

SEQ ID NO: 294316 - DNA, 1081 bp, Homo sapiens
gccttcttgctgggcacctgatagtgtgttttttacatgactattttggaccgttagttgaatttccttaaaaactgtgtaacagtccaagcaagctctaaatcaccgtaagttgtaatgatcaacaaccaaaacacgggatggaggcagatgctatataaaaggctcaagaggggaaggagcaagagccactcagggggagtcggtgaagtacttcctggacaacttggaccggatcggccagctgaattactttcctagtaagcaagatatcctgctggctaggaaagccaccaagggaattgtggagcatgacttcgttattaagaagatcccctttaagatggtggatgtgggcggccagcggtcccagcgccagaagtggttccagtgcttcgacgggatcacgtccatcctgttcatggtctcctccagcgagtacgaccaggtcctcatggaggacaggcgcaccaaccggctggtggagtccatgaacatcttcgagaccatcgtcaacaacaagctcttcttcaacgtctccatcattctcttcctcaacaagatggacctcctggtggagaaggtgaagaccgtgagcatcaagaagcacttcccggacttcaggggcgacccgcacaggctggaggacgtccagcgctacctggtccagtgcttcgacaggaagagacggaaccgcagcaagccactcttccaccacttcaccaccgccatcgacaccgagaacgtccgcttcgtgttccatgctgtgaaagacaccatcctgcaggagaacctgaaggacatcatgctgcagtgagcgaggaagccccggggtttgtcgtcgttgagcagcccccacggctgtcggtcagactcttgggtgtgtgttgtctgtgtggtccttgagtgggtttctcggatccgtgccctggaatacctggctcaggaatgctgtcagaccaggcagccagcgaagctctaggcaaaaggacatggaaactgtcacgttagctactgaatcctgggggcgagtgaaactactgaaaatccgagtgatgatgttgtgaatacggaacaccta

SEQ ID NO: 294317 - DNA, 1018 bp, Homo sapiens
agtggcggccgggcgacgagtgcgggcctcggagcgactgcagcggcggcggcggacgcggcctgaggcgagcggcggggcgtggggcggtgcctcggcccgggctcgccctcgccggcgggagcgtccatggcccccgggcgccggcggggcgcggccgcggcctgaggggccatgtccggggtggtgcggaccctcagccgctgcctgctgccggccgaggccggcggggcccgcgagcgcagggcgggcagcggcgcgcgcgacgcggagcgcgaggcccggaggcgtagccgcgacatcgacgcgctgctggcccgcgagcggcgcgcggtccggcgcctggtgaagatcctgctgctgggcgcgggcgagagcggcaagtccacgttcctcaagcagatgcgcatcatccacggccgcgagttcgaccagaaggcgctgctggagttccgcgacaccatcttcgacaacatcctcaagggctcaagggttcttgttgatgcacgagataagcttggcattccttggcagtattctgaaaatgagaagcatgggatgttcctgatggccttcgagaacaaggcggggctgcctgtggagccggccaccttccagctgtacgtcccggccctgagcgcactctggagggattctggcatcagggaggctttcagccggagaagcgagtttcagctggccccagcccacgcagcaggaggacacactgccgaagggaccagttggacggccttctggctttagcgcctgtgcctttcaggaccttaaatacagaaaggaaccgagtgctctgtgcagcccctccaagacggtcgctacagcgccagcaccacctgcgccgggccatcatgccgtgaccggacttggtttacgaatacagtgtacgaggttaagatatgataaagtgtaaaaatatatgttatagccacggtggttagtttaacatgttttgtatatatgatttttataaatctattaaaatgtgccttaaattaaa

SEQ ID NO: 294318 - DNA, 286 bp, Homo sapiens
ggcatgcagggctgtggccagcagcgtgaacccctcgagactgtggcacccctcctcctcctcagtccgacagctggctcccaagggatctcccgcagcctcggggtgatgcaggagatcttcgccaccaatgtgtttcccatctgtgctcctcaaagaaggtcagtacaaactaggccgaggacacttggtcaggtaggagactttgaaactcgggcatcaagaactgaaccagacctgcatctggaaatcacacgaatgaagttggttctttgtggctctcccg

SEQ ID NO: 294319 - DNA, 1214 bp, Homo sapiens
ctaatttaggggttctgggcacagacatctaacctggtattgtaaggcagaggctcccattggaatggtagtggtccgggtcagttgttcatggtgtgatcatagctcatcgcagcctcaaaactcctgggctcaagcagtcctcccaccttggccttccaagtagctgggaccacaggcatgtggccaccacccgcacctggctaatttttaaattttgtatagagatggagtctcactgtgttgcccaggctggtgttgaactcttggcctcaagtgatcctcccacctcagccttcctgaagtgctgggattacaggcatgagtcgctgcacccagtctgggttcttaacaagcctatgcaaaatttaaaatctctgttgcatctgtcagtctcgaatctcaaaaaattaccttttgacctgtcaggcaaattggtttaaaacattcaaaatgtcctggctgggcacggtggctcacgcctgtaatcccagcacttggggaggctgaggcggatggatcacgaggtcaggagatcgacaccatcctggctaacacggtgaaaccccgtctctgctgaaatataaaaaattagccgggcatggtggcgggcgcctgtagtcccggctacttgggaggctgaggcaggagaatggcatgaacccgggaggcagagcttgcagtgagccgagatcgcgccactgcactccagcccaggcgagagagcgagagtctgtctcaaaaaaaaaaaaaaaaaaattcgaaatgccctttttcttaactccatttgaaccagctcacatcgatgggcacaagcgtcgccaggaaattcagtgtggtaagcttggcacctactcatggccaccgtgtcctgaactccctttcctgtgctcaggccccagcccacgcagcaggaggacacactgccgaagggaccagttggacggccttctggctttagcgcctgtgcctttcaggaccttaaatacagaaaggaaccgagtgctctgtgcagcccctccaagacggtcgctacagcgccagcaccacctgcgccgggccatcatgccgtgaccggacttggtttacgaatacagtgtacgaggttaagatatgataaagtgtaaaaatatatgttatagccacggtggttagtttaacatgttttgtatatatgatttttataaatctattaaaatgtgccttaaattaaa

SEQ ID NO: 294320 - DNA, 583 bp, Homo sapiens
tcccgctcacccaggctgtctggatgcacccgggtgcatgttgccacattcccctgcaaacaggtgccagcagctcttgtgacttagctgtgggtgacaggtgctgagcacgcgtctgcagcagggcccccacacagcccacaggcaccgtgggctgtacactctgtggtgctttcttattaggagtcaacctgttcaatttttttttcttcttttataaaatgtactcaagtcacatataatttctacaccactcacaggttgtacaactgccatgcaaatgcatttcagatttactttttttttacacagtgaaccttcttgatttttattttggtttattttattttactttattttattttaaatatagggtcttgctctgtggcccaggctggagtgcagtggtgtgatcatagctcatcgcagcctcaaaactcctgggctcaagcagtcctcccaccttggccttccaagtagctgggaccacaggcatgtggccaccacccgcacctggctaatttttaaattttgtatagagatggagtctcactgtgttgcccaggctggtgttgaactcttg

SEQ ID NO: 294321 - DNA, 1490 bp, Homo sapiens
ggctgcaggcagctgggaaccgcgggcgctaggcgcgcgcacccagcgactcggtcccagccgataaatctggggcagcgcgcggtaggagctgcgggcggccaggccccttcctgcgtccgcacctggccccgcgcgcccctctcgggcgtccggcttccggcgtcctggcggctcgggtggcggcggttcgggcggccgcctggctgctcctcggggcggcgaccgggctcacgcgcgggcccgccgcggccttcaccgccgcgcgctctgacgccggcataagggccatgtgttctgaaattattttgaggcaagaagttttgaaagatggtttccacagagaccttttaatcaaagtgaagtttggggaaagcattgaggacttgcacacctgccgtctcttaattaaacaggacattcctgcaggactttatgtggatccgtatgagttggcttcattacgagagagaaacataacagaggcagtgatggtttcagaaaattttgatatagaggcccctaactatttgtccaaggagtctgaagttctcatttatgccagacgagattcacagtgcattgactgttttcaagcctttttgcctgtgcactgccgctatcatcggccgcacagtgaagatggagaagcctcgattgtggtcaataacccagatttgttgatgttttgtgaccaagagttcccgattttgaaatgctgggctcactcagaagtggcagccccttgtgctttggagaatgaggatatctgccaatggaacaagatgaagtataaatcagtatataagaatgtgattctacaagttccagtgggactgactgtacatacctctctagtatgttctgtgactctgctcattacaatcctgtgctctacattgatccttgtagcagttttcaaatatggccatttttccctataagttttatgtagttaaatgcttcctagaaacctaaataagatctattaatttctgacgagaggtgttcttctagaattaattacttttatcttttgtcttcatttgtggccaaaattatgtttactagaggaaatttgggatcattctcagctaattccaaaatgtagtgctctattgcatggatccttggtaatcctcaagcatcagatgccataaggggaaacttaattctgctaaattaatgtttattttgtgagaagtgactttatcttcatttggggtagaaaaattatttctttatgtagtagagacaaattattctcattttgcaagtactttcaatttaagctacaaattgagaaaaccgttataaataagaataaaaataggccaggcacagtggctcacacctgtaatccagcactttgggaggccgaagtgggcggatcaccagaggtcaagagtttgagaccagcttggtgaaaccctgtctctactaaaaatacaaaagttagctggggctggtggtgggcatctgtagtccca

SEQ ID NO: 294322 - DNA, 920 bp, Homo sapiens
ggctgcaggcagctgggaaccgcgggcgctaggcgcgcgcacccagcgactcggtcccagccgataaatctggggcagcgcgcggtaggagctgcgggcggccaggccccttcctgcgtccgcacctggccccgcgcgcccctctcgggcgtccggcttccggcgtcctggcggctcgggtggcggcggttcgggcggccgcctggctgctcctcggggcggcgaccgggctcacgcgcgggcccgccgcggccttcaccgccgcgcgctctgacgccggcataagggccatgtgttctgaaattattttgaggcaagaagttttgaaagatggtttccacagagaccttttaatcaaagtgaagtttggggaaagcattgaggacttgcacacctgccgtctcttaattaaacaggacattcctgcaggactttatgtggatccgtatgagttggcttcattacgagagagaaacataacagaggcagtgatggtttcagaaaattttgatatagaggcccctaactatttgtccaaggagtctgaagttctcatttatgccagacgagattcacagtgcattgactgttttcaagcctttttgcctgtgcactgccgctatcatcggccgcacagtgaagatggagaagcctcgattgtggtcaataacccagatttgttgatgttttgtgaccaaggtgagggctgcaagtgttttctaagggttgaaacatcagaataaaggtatggtggcaagtcctccttctgctaggctggctggcaaggccctatgtcttgacctaggtggtagttacaagggtatttatttgccttataataattcactaaactatgtatttgagtagatttttatgtgtgtgctttaatttacaataaaaaagttaaaaagaaacatgca

SEQ ID NO: 294323 - DNA, 1544 bp, Homo sapiens
ggctgcaggcagctgggaaccgcgggcgctaggcgcgcgcacccagcgactcggtcccagccgataaatctggggcagcgcgcggtaggagctgcgggcggccaggccccttcctgcgtccgcacctggccccgcgcgcccctctcgggcgtccggcttccggcgtcctggcggctcgggtggcggcggttcgggcggccgcctggctgctcctcggggcggcgaccgggctcacgcgcgggcccgccgcggccttcaccgccgcgcgctctgacgccggcataagggccatgtgttctgaaattattttgaggcaagaagttttgaaagatggtttccacagagaccttttaatcaaagtgaagtttggggaaagcattgaggacttgcacacctgccgtctcttaattaaacaggacattcctgcaggactttatgtggatccgtatgagttggcttcattacgagagagaaacataacagaggcagtgatggtttcagaaaattttgatatagaggcccctaactatttgtccaaggagtctgaagttctcatttatgccagacgagattcacagtgcattgactgttttcaagcctttttgcctgtgcactgccgctatcatcggccgcacagtgaagatggagaagcctcgattgtggtcaataacccagatttgttgatgttttgtgaccaagctggctccagaagaatgatcagattccggtttgattcctttgacaaaactatagagttcccgattttgaaatgctgggctcactcagaagtggcagccccttgtgctttggagaatgaggatatctgccaatggaacaagatgaagtataaatcagtatataagaatgtgattctacaagttccagtgggactgactgtacatacctctctagtatgttctgtgactctgctcattacaatcctgtgctctacattgatccttgtagcagttttcaaatatggccatttttccctataagttttatgtagttaaatgcttcctagaaacctaaataagatctattaatttctgacgagaggtgttcttctagaattaattacttttatcttttgtcttcatttgtggccaaaattatgtttactagaggaaatttgggatcattctcagctaattccaaaatgtagtgctctattgcatggatccttggtaatcctcaagcatcagatgccataaggggaaacttaattctgctaaattaatgtttattttgtgagaagtgactttatcttcatttggggtagaaaaattatttctttatgtagtagagacaaattattctcattttgcaagtactttcaatttaagctacaaattgagaaaaccgttataaataagaataaaaataggccaggcacagtggctcacacctgtaatccagcactttgggaggccgaagtgggcggatcaccagaggtcaagagtttgagaccagcttggtgaaaccctgtctctactaaaaatacaaaagttagctggggctggtggtgggcatctgtagtccca

SEQ ID NO: 294324 - DNA, 2517 bp, Homo sapiens
tttccgtccgttccttccgctggtgctaaaataatctgatgccccacagcaaggaggtagcccagccccgcgttcggctgctctcgaggaggccggagcccccggagacgatgcgccccgcgcagccgcctgcgcctgcgggagccggctgcccttgagatggagttgctgcctctttggctctgcctgggttttcacttcctgaccgtgggctggaggaacagaagcggaacagccacagcagcctcccaaggagtctgcaagttggtgggtggagccgctgactgccgagggcagagcctcgcttcggtgcccagcagcctcccgccccacgcccggatgctcaccctggatgccaaccctctcaagaccctgtggaatcactccctccagccttaccctctcctggagagcctcagcctgcacagctgccacctggagcgcatcagccgcggcgccttccaggagcaaggtcacctgcgcagcctggtcctgggggacaactgcctctcagagaactacgaagagacggcagccgccctccacgccctgccgggcctgcggaggctggacttgtcaggaaacgccctgacggaggacatggcagcgctcatgctccagaacctctcctcgctgcggtccgtgtccctggcggggaacaccatcatgcggctggacgactccgtcttcgagggcctggagcgtctccgggagctggatctgcagaggaactacatcttcgagatcgagggcggcgctttcgacggcctggctgagctgaggcacctcaacctggccttcaacaacctcccctgcatcgtggacttcgggctcacgcggctgcgggtcctcaacgtcagctacaacgtcctggagtggttcctcgcgaccgggggagaggctgccttcgagctggagacgctggacctgtctcacaaccagctgctgttcttcccgctgctgccccagtacagcaagttgcggaccctcctgctgcgcgacaacaacatgggcttctaccgggacctgtacaacacctcgtcgccgagggagatggtggcccagttcctcctcgtggacggcaacgtgaccaacatcaccaccgtcagcctctgggaagaattctcctccagcgacctcgcagatctccgcttcctggacatgagccagaaccagttccagtacctgccagacggcttcctgaggaaaatgccttccctctcccacctgaacctccaccagaattgcctgatgacgcttcacattcgggagcacgagccccccggagcgctcaccgagctggacctgagccacaaccagctgtcggagctgcacctggctccggggctggccagctgcctgggcagcctgcgcttgttcaacctgagctccaaccagctcctgggcgtccccctggcctcttcgccaatgctaggaacatcactacacttgacatgagccacaatcagatctcactttgtcccctgccagctgcctcggaccgggtgggcccccctagctgtgtggatttcaggaatatggcatctttaaggagcctgtctctggagggctgtggcctgggggcattgccagactgcccattccaagggacctccctgacctacttagacctctcaagcaactggggggttctgaatgggagcctcgccccactccaggatgttgcccccatgttacaggtcctgtctctcaggaacatgggcctccactccagctttatggcgttggacttctctgggtttgggaatctcagggacttagatctgtcggggaattgcttgaccaccttcccaaggtttgggggcagcctggccctggagaccctggatctccgtagaaactcgctcacagcccttccccagaaggctgtgtctgagcagctctcgagaggtctgcggaccatctacctcagtcagaatccatatgactgctgtggggtggatggctggggggccctgcagcatgggcagacggtggccgactgggccatggtcacctgcaacctctcctccaagatcatccgcgtgacggagctgcccggaggtgtgcctcgggactgcaagtgggagcggctggacctgggcctgctctacctcgtgctcatcctccccagctgcctcaccctgctggtggcctgcactgtcatcgtcctcacttttaagaagcctctgcttcaggtcatcaagagccgctgccactggtcctccgtttactgacctggctgtgtgccaagactcgaaattcggtccgcacacaacaggacactttctctgccagctttcaagatgtgatgcagaggccaagtctgacgaattgaagtttcaattaaaatttaatatgtttccattcctcatcgcccaccccacccccgcccccaccaccgcccaagttctttttccatcattataattcatcctcattatcttggtaaaatatttattaagtgactttttcagaaataaaaggcaacgtgtctcataaatattttttaaatta

SEQ ID NO: 294325 - DNA, 1478 bp, Homo sapiens
tttccgtccgttccttccgctggtgctaaaataatctgatgccccacagcaaggaggtagcccagccccgcgttcggctgctctcgaggaggccggagcccccggagacgatgcgccccgcgcagccgcctgcgcctgcgggagccggctgcccttgagatggagttgctgcctctttggctctgcctgggttttcacttcctgaccgtgggctggaggaacagaagcggaacagccacagcagcctcccaaggagtctgcaagttggcataagggccatgtgttctgaaattattttgaggcaagaagttttgaaagatggtttccacagagaccttttaatcaaagtgaagtttggggaaagcattgaggacttgcacacctgccgtctcttaattaaacaggacattcctgcaggactttatgtggatccgtatgagttggcttcattacgagagagaaacataacagaggcagtgatggtttcagaaaattttgatatagaggcccctaactatttgtccaaggagtctgaagttctcatttatgccagacgagattcacagtgcattgactgttttcaagcctttttgcctgtgcactgccgctatcatcggccgcacagtgaagatggagaagcctcgattgtggtcaataacccagatttgttgatgttttgtgaccaagagttcccgattttgaaatgctgggctcactcagaagtggcagccccttgtgctttggagaatgaggatatctgccaatggaacaagatgaagtataaatcagtatataagaatgtgattctacaagttccagtgggactgactgtacatacctctctagtatgttctgtgactctgctcattacaatcctgtgctctacattgatccttgtagcagttttcaaatatggccatttttccctataagttttatgtagttaaatgcttcctagaaacctaaataagatctattaatttctgacgagaggtgttcttctagaattaattacttttatcttttgtcttcatttgtggccaaaattatgtttactagaggaaatttgggatcattctcagctaattccaaaatgtagtgctctattgcatggatccttggtaatcctcaagcatcagatgccataaggggaaacttaattctgctaaattaatgtttattttgtgagaagtgactttatcttcatttggggtagaaaaattatttctttatgtagtagagacaaattattctcattttgcaagtactttcaatttaagctacaaattgagaaaaccgttataaataagaataaaaataggccaggcacagtggctcacacctgtaatccagcactttgggaggccgaagtgggcggatcaccagaggtcaagagtttgagaccagcttggtgaaaccctgtctctactaaaaatacaaaagttagctggggctggtggtgggcatctgtagtccca

SEQ ID NO: 294326 - DNA, 1970 bp, Homo sapiens
ggctgcaggcagctgggaaccgcgggcgctaggcgcgcgcacccagcgactcggtcccagccgataaatctggggcagcgcgcggtaggagctgcgggcggccaggccccttcctgcgtccgcacctggccccgcgcgcccctctcgggcgtccggcttccggcgtcctggcggctcgggtggcggcggttcgggcggccgcctggctgctcctcggggcggcgaccgggctcacgcgcgggcccgccgcggccttcaccgccgcgcgctctgacgccggtaaggggggcggggcttggggggccagagcgtgggagcggtcccggctcccgggcctctcggcgggttgcggggatgtggggacccggcgcgggacctagatcagtagggcgagccggaggaggtcagacactagagccgtgtgccctccttccctcccgtgcgctttgctctgcggcggatcccgggtctccgggagagtcgggctcgggccctgcggttcccaggctggactggccgccctgttactaaagttctgagaaggaaagtcagccgtcaagcgtcttgggatgctcttgagctgcacgaagcttctgatcaccaaggggccaggcaaggccttagcgccctgtgaggcctgagaatccccaaactgaatataggactccgtggcaaactgctagttgttcgtgcaagtagtagttggcaaactgcttgtactactgagacgggcaagtgcgggaataattacaataaagggcataagggccatgtgttctgaaattattttgaggcaagaagttttgaaagatggtttccacagagaccttttaatcaaagtgaagtttggggaaagcattgaggacttgcacacctgccgtctcttaattaaacaggacattcctgcaggactttatgtggatccgtatgagttggcttcattacgagagagaaacataacagaggcagtgatggtttcagaaaattttgatatagaggcccctaactatttgtccaaggagtctgaagttctcatttatgccagacgagattcacagtgcattgactgttttcaagcctttttgcctgtgcactgccgctatcatcggccgcacagtgaagatggagaagcctcgattgtggtcaataacccagatttgttgatgttttgtgaccaagagttcccgattttgaaatgctgggctcactcagaagtggcagccccttgtgctttggagaatgaggatatctgccaatggaacaagatgaagtataaatcagtatataagaatgtgattctacaagttccagtgggactgactgtacatacctctctagtatgttctgtgactctgctcattacaatcctgtgctctacattgatccttgtagcagttttcaaatatggccatttttccctataagttttatgtagttaaatgcttcctagaaacctaaataagatctattaatttctgacgagaggtgttcttctagaattaattacttttatcttttgtcttcatttgtggccaaaattatgtttactagaggaaatttgggatcattctcagctaattccaaaatgtagtgctctattgcatggatccttggtaatcctcaagcatcagatgccataaggggaaacttaattctgctaaattaatgtttattttgtgagaagtgactttatcttcatttggggtagaaaaattatttctttatgtagtagagacaaattattctcattttgcaagtactttcaatttaagctacaaattgagaaaaccgttataaataagaataaaaataggccaggcacagtggctcacacctgtaatccagcactttgggaggccgaagtgggcggatcaccagaggtcaagagtttgagaccagcttggtgaaaccctgtctctactaaaaatacaaaagttagctggggctggtggtgggcatctgtagtccca

SEQ ID NO: 294327 - DNA, 2018 bp, Homo sapiens
gatacgtaccgatccgcgggcgctacgcgcgcagctacggataaattaagttgctacatgattgatctgtagcagagtcgcggtaataactacggtgctgtggccatgctcacttcctgaagatacacggcaccgtgcggccccagcgcagccgcttcttgcgagcgacagattccgagcatgcgcggtgctgcatggtcgacgtctacgtggtgtctgagtcgagctcggagctgcgacgcgtaggcttgatcctcggagtggtccaggccacggcgtgcacgcgcgggcccgccgcggccttcaccgccgcgcgctctgacgccggtaaggggggcggggcttggggggccagagcgtgggagcggtcccggctcccgggcctctcggcgggttgcggggatgtggggacccggcgcgggacctagatcagtagggcgagccggaggaggtcagacactagagccgtgtgccctccttccctcccgtgcgctttgctctgcggcggatcccgggtctccgggagagtcgggctcgggccctgcggttcccaggctggactggccgccctgttactaaagttctgagaaggaaagtcagccgtcaagcgtcttgggatgctcttgagctgcacgaagcttctgatcaccaaggggccaggcaaggccttagcgccctgtgaggcctgagaatccccaaactgaatataggactccgtggcaaactgctagttgttcgtgcaagtagtagttggcaaactgcttgtactactgagacgggcaagtgcgggaataattacaataaagggcataagggccatgtgttctgaaattattttgaggcaagaagttttgaaagatggtttccacagagaccttttaatcaaagtgaagtttggggaaagcattgaggacttgcacacctgccgtctcttaattaaacaggacattcctgcaggactttatgtggatccgtatgagttggcttcattacgagagagaaacataacagaggcagtgatggtttcagaaaattttgatatagaggcccctaactatttgtccaaggagtctgaagttctcatttatgccagacgagattcacagtgcattgactgttttcaagcctttttgcctgtgcactgccgctatcatcggccgcacagtgaagatggagaagcctcgattgtggtcaataacccagatttgttgatgttttgtgaccaagagttcccgattttgaaatgctgggctcactcagaagtggcagccccttgtgctttggagaatgaggatatctgccaatggaacaagatgaagtataaatcagtatataagaatgtgattctacaagttccagtgggactgactgtacatacctctctagtatgttctgtgactctgctcattacaatcctgtgctctacattgatccttgtagcagttttcaaatatggccatttttccctataagttttatgtagttaaatgcttcctagaaacctaaataagatctattaatttctgacgagaggtgttcttctagaattaattacttttatcttttgtcttcatttgtggccaaaattatgtttactagaggaaatttgggatcattctcagctaattccaaaatgtagtgctctattgcatggatccttggtaatcctcaagcatcagatgccataaggggaaacttaattctgctaaattaatgtttattttgtgagaagtgactttatcttcatttggggtagaaaaattatttctttatgtagtagagacaaattattctcattttgcaagtactttcaatttaagctacaaattgagaaaaccgttataaataagaataaaaataggccaggcacagtggctcacacctgtaatccagcactttgggaggccgaagtgggcggatcaccagaggtcaagagtttgagaccagcttggtgaaaccctgtctctactaaaaatacaaaagttagctggggctggtggtgggcatctgtagtccca

SEQ ID NO: 294328 - DNA, 1607 bp, Homo sapiens
ggctgcaggcagctgggaaccgcgggcgctaggcgcgcgcacccagcgactcggtcccagccgataaatctggggcagcgcgcggtaggagctgcgggcggccaggccccttcctgcgtccgcacctggccccgcgcgcccctctcgggcgtccggcttccggcgtcctggcggctcgggtggcggcggttcgggcggccgcctggctgctcctcggggcggcgaccgggctcacgcgcgggcccgccgcggccttcaccgccgcgcgctctgacgccggcataagggccatgtgttctgaaattattttgaggcaagaagttttgaaagatggtttccacagagaccttttaatcaaagtgaagtttggggaaagcattgaggacttgcacacctgccgtctcttaattaaacaggacattcctgcaggactttatgtggatccgtatgagttggcttcattacgagagagaaacataacagaggagaagacttcatggcggcggctatggttgccttctgataattgaaggatccctagtggaataaggaacgaatttattgcagacattgtaagcaagaacaactggtaaatgttataggcagtgatggtttcagaaaattttgatatagaggcccctaactatttgtccaaggagtctgaagttctcatttatgccagacgagattcacagtgcattgactgttttcaagcctttttgcctgtgcactgccgctatcatcggccgcacagtgaagatggagaagcctcgattgtggtcaataacccagatttgttgatgttttgtgaccaagagttcccgattttgaaatgctgggctcactcagaagtggcagccccttgtgctttggagaatgaggatatctgccaatggaacaagatgaagtataaatcagtatataagaatgtgattctacaagttccagtgggactgactgtacatacctctctagtatgttctgtgactctgctcattacaatcctgtgctctacattgatccttgtagcagttttcaaatatggccatttttccctataagttttatgtagttaaatgcttcctagaaacctaaataagatctattaatttctgacgagaggtgttcttctagaattaattacttttatcttttgtcttcatttgtggccaaaattatgtttactagaggaaatttgggatcattctcagctaattccaaaatgtagtgctctattgcatggatccttggtaatcctcaagcatcagatgccataaggggaaacttaattctgctaaattaatgtttattttgtgagaagtgactttatcttcatttggggtagaaaaattatttctttatgtagtagagacaaattattctcattttgcaagtactttcaatttaagctacaaattgagaaaaccgttataaataagaataaaaataggccaggcacagtggctcacacctgtaatccagcactttgggaggccgaagtgggcggatcaccagaggtcaagagtttgagaccagcttggtgaaaccctgtctctactaaaaatacaaaagttagctggggctggtggtgggcatctgtagtccca

SEQ ID NO: 294329 - DNA, 1670 bp, Homo sapiens
ggctgcaggcagctgggaaccgcgggcgctaggcgcgcgcacccagcgactcggtcccagccgataaatctggggcagcgcgcggtaggagctgcgggcggccaggccccttcctgcgtccgcacctggccccgcgcgcccctctcgggcgtccggcttccggcgtcctggcggctcgggtggcggcggttcgggcggccgcctggctgctcctcggggcggcgaccgggctcacgcgcgggcccgccgcggccttcaccgccgcgcgctctgacgccggcataagggccatgtgttctgaaattattttgaggcaagaagttttgaaagatggtttccacaggaactccaaatatatgtatactagactacttgatattgtttaaaggccatggaggcggttccttttttctccctggtcttttttcctctctgtgcttcagtgtgggtagtttctgttgctgtgtctccaagtcactgatcttttcttcttcagcatctaatggcttttaattacatctggagaccttttaatcaaagtgaagtttggggaaagcattgaggacttgcacacctgccgtctcttaattaaacaggacattcctgcaggactttatgtggatccgtatgagttggcttcattacgagagagaaacataacagaggcagtgatggtttcagaaaattttgatatagaggcccctaactatttgtccaaggagtctgaagttctcatttatgccagacgagattcacagtgcattgactgttttcaagcctttttgcctgtgcactgccgctatcatcggccgcacagtgaagatggagaagcctcgattgtggtcaataacccagatttgttgatgttttgtgaccaagagttcccgattttgaaatgctgggctcactcagaagtggcagccccttgtgctttggagaatgaggatatctgccaatggaacaagatgaagtataaatcagtatataagaatgtgattctacaagttccagtgggactgactgtacatacctctctagtatgttctgtgactctgctcattacaatcctgtgctctacattgatccttgtagcagttttcaaatatggccatttttccctataagttttatgtagttaaatgcttcctagaaacctaaataagatctattaatttctgacgagaggtgttcttctagaattaattacttttatcttttgtcttcatttgtggccaaaattatgtttactagaggaaatttgggatcattctcagctaattccaaaatgtagtgctctattgcatggatccttggtaatcctcaagcatcagatgccataaggggaaacttaattctgctaaattaatgtttattttgtgagaagtgactttatcttcatttggggtagaaaaattatttctttatgtagtagagacaaattattctcattttgcaagtactttcaatttaagctacaaattgagaaaaccgttataaataagaataaaaataggccaggcacagtggctcacacctgtaatccagcactttgggaggccgaagtgggcggatcaccagaggtcaagagtttgagaccagcttggtgaaaccctgtctctactaaaaatacaaaagttagctggggctggtggtgggcatctgtagtccca

SEQ ID NO: 294330 - DNA, 2116 bp, Homo sapiens
ggctgcaggcagctgggaaccgcgggcgctaggcgcgcgcacccagcgactcggtcccagccgataaatctggggcagcgcgcggtaggagctgcgggcggccaggccccttcctgcgtccgcacctggccccgcgcgcccctctcgggcgtccggcttccggcgtcctggcggctcgggtggcggcggttcgggcggccgcctggctgctcctcggggcggcgaccgggctcacgcgcgggcccgccgcggccttcaccgccgcgcgctctgacgccggtaaggggggcggggcttggggggccagagcgtgggagcggtcccggctcccgggcctctcggcgggttgcggggatgtggggacccggcgcgggacctagatcagtagggcgagccggaggaggtcagacactagagccgtgtgccctccttccctcccgtgcgctttgctctgcggcggatcccgggtctccgggagagtcgggctcgggccctgcggttcccaggctggactggccgccctgttactaaagttctgagaaggaaagtcagccgtcaagcgtcttgggatgctcttgagctgcacgaagcttctgatcaccaaggggccaggcaaggccttagcgccctgtgaggcctgagaatccccaaactgaatataggactccgtggcaaactgctagttgttcgtgcaagtagtagttggcaaactgcttgtactactgagacgggcaagtgcgggaataattacaataaagggcataagggccatgtgttctgaaattattttgaggcaagaagttttgaaagatggtttccacagttgattctaaatgaccaagctgtttccaaaaaagaaattatcttcaaaagatgaatatttgcccatattgaagatctttaaaagtctggtaaaaaggtgtggaaactgttccttaagaaaacttgcccaaactgaagcttcgcaagagaccttttaatcaaagtgaagtttggggaaagcattgaggacttgcacacctgccgtctcttaattaaacaggacattcctgcaggactttatgtggatccgtatgagttggcttcattacgagagagaaacataacagaggcagtgatggtttcagaaaattttgatatagaggcccctaactatttgtccaaggagtctgaagttctcatttatgccagacgagattcacagtgcattgactgttttcaagcctttttgcctgtgcactgccgctatcatcggccgcacagtgaagatggagaagcctcgattgtggtcaataacccagatttgttgatgttttgtgaccaagagttcccgattttgaaatgctgggctcactcagaagtggcagccccttgtgctttggagaatgaggatatctgccaatggaacaagatgaagtataaatcagtatataagaatgtgattctacaagttccagtgggactgactgtacatacctctctagtatgttctgtgactctgctcattacaatcctgtgctctacattgatccttgtagcagttttcaaatatggccatttttccctataagttttatgtagttaaatgcttcctagaaacctaaataagatctattaatttctgacgagaggtgttcttctagaattaattacttttatcttttgtcttcatttgtggccaaaattatgtttactagaggaaatttgggatcattctcagctaattccaaaatgtagtgctctattgcatggatccttggtaatcctcaagcatcagatgccataaggggaaacttaattctgctaaattaatgtttattttgtgagaagtgactttatcttcatttggggtagaaaaattatttctttatgtagtagagacaaattattctcattttgcaagtactttcaatttaagctacaaattgagaaaaccgttataaataagaataaaaataggccaggcacagtggctcacacctgtaatccagcactttgggaggccgaagtgggcggatcaccagaggtcaagagtttgagaccagcttggtgaaaccctgtctctactaaaaatacaaaagttagctggggctggtggtgggcatctgtagtccca

SEQ ID NO: 294331 - DNA, 1379 bp, Homo sapiens
  misc_feature (139)..(141): n is a, c, g, or t
gctggcggctcgccttgactgctaccttcgggggcggctgacacgggcctcactgcatcttggcaccgcacgacggctctatcacacgcgcgcggcgccctctgactgaccaggcatataggtgccactcgtgtatctnnngaaattacttgttgagtgcacagaaacgttttgataagaatggttctccactagatgactctgtttagatcacaagctgatagttatggcggaacagcgattgagagacgttgtcacactctgcacgtcgtcttatattaatacaaggacacttctctgcacggaactttaatgtggtatctcgtgatgaggttggcatcccatttaccgagcaggagaaaaccatacacagggcagtgatggtttcagaaaattttgatatagaggcccctaactatttgtccaaggagtctgaagttctcatttatgccagacgagattcacagtgcattgactgttttcaagcctttttgcctgtgcactgccgctatcatcggccgcacagtgaagatggagaagcctcgattgtggtcaataacccagatttgttgatgttttgtgaccaagagttcccgattttgaaatgctgggctcactcagaagtggcagccccttgtgctttggagaatgaggatatctgccaatggaacaagatgaagtataaatcagtatataagaatgtgattctacaagttccagtgggactgactgtacatacctctctagtatgttctgtgactctgctcattacaatcctgtgctctacattgatccttgtagcagttttcaaatatggccatttttccctataagttttatgtagttaaatgcttcctagaaacctaaataagatctattaatttctgacgagaggtgttcttctagaattaattacttttatcttttgtcttcatttgtggccaaaattatgtttactagaggaaatttgggatcattctcagctaattccaaaatgtagtgctctattgcatggatccttggtaatcctcaagcatcagatgccataaggggaaacttaattctgctaaattaatgtttattttgtgagaagtgactttatcttcatttggggtagaaaaattatttctttatgtagtagagacaaattattctcattttgcaagtactttcaatttaagctacaaattgagaaaaccgttataaataagaataaaaataggccaggcacagtggctcacacctgtaatccagcactttgggaggccgaagtgggcggatcaccagaggtcaagagtttgagaccagcttggtgaaaccctgtctctactaaaaatacaaaagttagctggggctggtggtgggcatctgtagtccca

SEQ ID NO: 294332 - DNA, 1303 bp, Homo sapiens
gacccgcgcagccgcgttcgccccctcgaggtcgtgagcgcgcgtgcccagagcaacgggcattgtcgcctgaggcaggcgactggggattggccccgcccccggcttccgcgcggattggctggggcggggcggcgcggctgcagtaggctagagagtccgcacctgcgccgcggccgtggggagagagggtgcgtcccggcagtcccgcacgacgggccccgcctcccctggtgaccccacgctccggcctcggggggagtggcggtcggcgcgccgagaccctcgggagccccgcccagacgcctgctccgcttccaggccacccgggctctccagccgcgctcgctcgtagagatcctagacgagttcgacagcgaggtcccgcagagcaagacctgccagcagatctccgaggaggacttggagaggcaggcggacacctacactgggcgcgcgctgcgcctcctcttccgcagccccgtccgcaacccgtcgctggcggagagggtggtacaattggaacagcgcgggctctcttttttccggatgcggccgcggggcatgggaccggctgggcgggaactgtcactacccgggtccgccgtcccctaggaaagagctccgacgattggagctttgggggccggggatgggggtggggtggagaggtcgccgtcggcctagctggggctgcagggtaggatctatcagaaagccgaggctgcacagcctggggagtggagcgggcaggcgtctcacgccccggacctccccctgccctgcctctcctactcttgttgcaggcgaagttcttctgtgttgtgcaggcggagctgaaccattgcaacagcatgggcgccctggagatgcacgagcaggtggagcagctgaagcagagcatccaccgcgtgcacctctactcccggggcgaggatcaacctctccccgtgctgggccctgggcgggggtctgagcccagtgcagccaggccgagggctaggtgaccacctccattcttccggttggatttgccctccttggatcaggttttatccagagcaggaaggggcctgggcagtctggacctgggaggagaggcgctgcccctagctagattctttagttaggagactgacttcagctctgctacttccttcctggctgtgtgatcctgagcaagttgggccacctttccgagagagagagccctcactgctcaccttggtgagtgttttggagtggtggatgaaggcctgtaggtagggctggctcaagcaaccaagcaaacctgaatcaatta

SEQ ID NO: 294333 - DNA, 1457 bp, Homo sapiens
tatagattttaaagtttcattttgtaagtcacaccagggcaggaagtagaatagagatttgagcccaagtgtacctgacaagtctctctgcctgcactcctagacaagatgatcaggacagacctcattcttctttggttgtccccaggcaggaggaaataaatgtcacttcctatgttggaagagctgaggggtggtggtttagcagtaagagatgaaaaatctgattaaacgtctcaggcacactatggatctcagggctgatggaggacaaggaggggacaagggaggacgcagtccagggtgcacccccttgttagtggctggggtcagtggctgaccaagtaggaggggagaggggtaagaaaagtagctttcagggagaagaagctgtgcgtgaatgtggacatgttcagcatgagatgcccaagaatcgtccccagtggtcatttggatgtgggtctggagctgaagggccacccgggctctccagccgcgctcgctcgtagagatcctagacgagttcgacagcgaggtcccgcagagcaagacctgccagcagatctccgaggaggacttggagaggcaggcggacacctacactgggcgcgcgctgcgcctcctcttccgcagccccgtccgcaacccgtcgctggcggagagggtggtacaattggaacagcgcgggctctcttttttccggatgcggccgcggggcatgggaccggctgggcgggaactgtcactacccgggtccgccgtcccctaggaaagagctccgacgattggagctttgggggccggggatgggggtggggtggagaggtcgccgtcggcctagctggggctgcagggtaggatctatcagaaagccgaggctgcacagcctggggagtggagcgggcaggcgtctcacgccccggacctccccctgccctgcctctcctactcttgttgcaggcgaagttcttctgtgttgtgcaggcggagctgaaccattgcaacagcatgggcgccctggagatgcacgagcaggtggagcagctgaagcagagcatccaccgcgtgcacctctactcccggggcgaggatcaacctctccccgtgctgggccctgggcgggggtctgagcccagtgcagccaggccgagggctaggtgaccacctccattcttccggttggatttgccctccttggatcaggttttatccagagcaggaaggggcctgggcagtctggacctgggaggagaggcgctgcccctagctagattctttagttaggagactgacttcagctctgctacttccttcctggctgtgtgatcctgagcaagttgggccacctttccgagagagagagccctcactgctcaccttggtgagtgttttggagtggtggatgaaggcctgtaggtagggctggctcaagcaaccaagcaaacctgaatcaatta

SEQ ID NO: 294334 - DNA, 480 bp, Homo sapiens
ctctggggagaggacagcatcaccaccttgggtgtgagaggactcactggagctgggaacccttgctggggctccaggagaggagaggtgggcccaggtggggttcacagagaggagccaggtccagaccagggtctccttgttacctggacacctaagggtgctcccagacgaggcctttgtactgtttgtctccctttgactagaaacttcttcccccagataaaacaaagagccgggtgcacccctcatctccctcaggccttgttcaagtatcaccacactggcaaggcctttcctgaccacccctccctacctcttcccgccacgggacaggctttgtccatcagcctccccagctggaaagtcagctccaggcagtagggagtctagaacagagcccgacaggtaggctcccagcagatactcctggaacaaacgcacaagtgaggggtggcgcagcagcactgagggaccgca

SEQ ID NO: 294335 - DNA, 526 bp, Homo sapiens
caaatatagacaagtgggactgcatcaactttaaaagcttctgcatagctaaggagacttaatagaatcaaatggcagtctatcgaatgggagaaggtattttcaaaccacatatttgctaagaggttaatcaaaatacaaaacgagctcctacaacttaatagaagaaaaaaatccatataaagactgattaaataatgggcaaaggactttaatagatatttctccaaagaagacacacaaatgaccaacaggtacgtgaagggatgctcaacatcactaatagagagatgcaaaattacaacgaggtattatctcacaactgttagaatggccatttgaaaaaaatagtgttggtgaggatgtggagaaattggaacccttatgtactgttactaggggtgtaaaatggtgcagctgttttgaaaaacagtatggaagttcctcagaagaattagaaatgctatatgattcaggattcccacttctggatattaaaaaaaaaaaatgaaaccaggatctggaa

SEQ ID NO: 294336 - DNA, 347 bp, Homo sapiens
tcggatacatccgattttactatgatctgaacagggagcaaggcaggggctttgcagggatagagtgagcagggggcgggaggcggcgctggtcgtcagcctgctgttcagccctaggtcagtcagcgtgcttccctctaagatcccccagagcaacaagtgtcgccaggtaaatccagacaccagcgaaacaagccaaagccaaacacgcatcggttctgatttgcctccctgcatgtgtgtctgtctgcacacacgcacaaatcacccttcatcatacaaattactttttttctaatacccttcccttattaaaagccaaaggtgaaaagacgatttacttttat

SEQ ID NO: 294337 - DNA, 405 bp, Homo sapiens
gcccggcgcttgcgcacctccgcccgagctcgcgggccttgcggctgcgttttcaatctgcttccttgtgagtcaggtgggtcctgggcccaggaaccggcccggagccgtggacgccctacagctgagaaggggacccaaggggtcggccgcggccaaggcccctaggaccgccgccccagctcacgctgccgacggcagctatagacattctgcgtgaggtccgggctcctggacttcgcctttcccgagccctggaggtggggagaaaagaaatcgaaaaagccctgccgggcgcggtggctcacgcctttaccgtaatcccagcactttgggaggccgcggggcggggtggggcgggggaggatcacgagttcgggagttcgagaccagcctggctaacat

SEQ ID NO: 294338 - DNA, 1869 bp, Homo sapiens
  misc_feature (1869)..(1869): n is a, c, g, or t
gcccggcgcttgcgcacctccgcccgagctcgcgggccttgcggctgcgttttcaatctgcttccttgtgagtcaggtgggtcctgggcccaggaaccggcccggagccgtggacgccctacagctgagaaggggacccaaggggtcggccgcggccaaggcccctaggaccgccgccccagctcacgctgccgacggcagctatagacattctgcgtgaggtccgggctcctggacttcgcctttcccgagccctggaggtggggagaaaaggttcaccaatttttaaaatccaaatatatctcatggtacagtggaagaactggccagagagtctggaagtttgggttctggtcctggctgtgccactgactcactgtgaccttgggatcttgtgctgtgaagacatttcccaagtgcttcatgttagccagcaaatctgacccacaaggcctggaaagaggtgattgttaggttgcgcagaggtggtcttatccagctcagcttcccctgggacccaccgtgggacctgaggcagaactggggtggacttggcctcctccatggcacaccggctgcagatacgactgctgacgtgggatgtgaaggacacgctgctcaggctccgccaccccttaggggaggcctatgccaccaaggcccgggcccatgggctggaggtggagccctcagccctggaacaaggcttcaggcaggcatacagggctcagagccacagcttccccaactacggcctgagccacggcctaacctcccgccagtggtggctggatgtggtcctgcagaccttccacctggcgggtgtccaggatgctcaggctgtagcccccatcgctgaacagctttataaagacttcagccacccctgcacctggcaggtgttggatggggctgaggacaccctgagggagtgccgcacacggggtctgagactggcagtgatctccaactttgaccgacggctagagggcatcctggagggccttggcctgcgtgaacacttcgactttgtgctgacctccgaggctgctggctggcccaagccggacccccgcattttccaggaggccttgcggcttgctcatatggaaccagtagtggcagcccatgttggggataattacctctgcgattaccaggggcctcgggctgtgggcatgcacagcttcctggtggttggcccacaggcactggaccccgtggtcagggattctgtacctaaagaacacatcctcccctctctggcccatctcctgcctgcccttgactgcctagagggctcaactccagggctttgaggccagtgagggaagtggctgggccctaggccatggagaaaaccttaaacaaaccctggagacagggagccccttctttctccacagctctggacctttccccctctccctgcggcctttgtcacctactgtgataataaagcagtgagtgctgagctctcacccttcccccactaaaaaaaaaaaaaaaaaaaaaaaaaaagggggggcgcgcgcccgcgcggccccggagagaaagagttttaagaaacacacactgcgcggtggggcgcgcgcgggggcccacagggggaaaggggacacacgtggggccaagggggtgtccaaggggaaaccggggccaggacaaagggcggggggatttcaccaaccaaataaaaaaagcgcgccgggggggggaacacgcggaggcggtttcggggaaaaactccgcaaaagggggaggcatcgggaaggcgcccacacaggggggcgttatacacacaggggagggcccaaacggagagcgccaggaactatcaaattatgcccccgggcccggggggggcgn

SEQ ID NO: 294339 - DNA, 1828 bp, Homo sapiens
  misc_feature (1828)..(1828): n is a, c, g, or t
gcccggcgcttgcgcacctccgcccgagctcgcgggccttgcggctgcgttttcaatctgcttccttgtgagtcaggtgggtcctgggcccaggaaccggcccggagccgtggacgccctacagctgagaaggggacccaaggggtcggccgcggccaaggcccctaggaccgccgccccagctcacgctgccgacggcagctatagacattctgcgtgaggtccgggctcctggacttcgcctttcccgagccctggaggtggggagaaaagtggaagaactggccagagagtctggaagtttgggttctggtcctggctgtgccactgactcactgtgaccttgggatcttgtgctgtgaagacatttcccaagtgcttcatgttagccagcaaatctgacccacaaggcctggaaagaggtgattgttaggttgcgcagaggtggtcttatccagctcagcttcccctgggacccaccgtgggacctgaggcagaactggggtggacttggcctcctccatggcacaccggctgcagatacgactgctgacgtgggatgtgaaggacacgctgctcaggctccgccaccccttaggggaggcctatgccaccaaggcccgggcccatgggctggaggtggagccctcagccctggaacaaggcttcaggcaggcatacagggctcagagccacagcttccccaactacggcctgagccacggcctaacctcccgccagtggtggctggatgtggtcctgcagaccttccacctggcgggtgtccaggatgctcaggctgtagcccccatcgctgaacagctttataaagacttcagccacccctgcacctggcaggtgttggatggggctgaggacaccctgagggagtgccgcacacggggtctgagactggcagtgatctccaactttgaccgacggctagagggcatcctggagggccttggcctgcgtgaacacttcgactttgtgctgacctccgaggctgctggctggcccaagccggacccccgcattttccaggaggccttgcggcttgctcatatggaaccagtagtggcagcccatgttggggataattacctctgcgattaccaggggcctcgggctgtgggcatgcacagcttcctggtggttggcccacaggcactggaccccgtggtcagggattctgtacctaaagaacacatcctcccctctctggcccatctcctgcctgcccttgactgcctagagggctcaactccagggctttgaggccagtgagggaagtggctgggccctaggccatggagaaaaccttaaacaaaccctggagacagggagccccttctttctccacagctctggacctttccccctctccctgcggcctttgtcacctactgtgataataaagcagtgagtgctgagctctcacccttcccccactaaaaaaaaaaaaaaaaaaaaaaaaaaagggggggcgcgcgcccgcgcggccccggagagaaagagttttaagaaacacacactgcgcggtggggcgcgcgcgggggcccacagggggaaaggggacacacgtggggccaagggggtgtccaaggggaaaccggggccaggacaaagggcggggggatttcaccaaccaaataaaaaaagcgcgccgggggggggaacacgcggaggcggtttcggggaaaaactccgcaaaagggggaggcatcgggaaggcgcccacacaggggggcgttatacacacaggggagggcccaaacggagagcgccaggaactatcaaattatgcccccgggcccggggggggcgn

SEQ ID NO: 294340 - DNA, 2090 bp, Homo sapiens
  misc_feature (2090)..(2090): n is a, c, g, or t
aaaaaaaaaaaaaagccgtgggtcaggagccagagccctctgctctagtcttagctgtgccaatgtgactccctgtgtgatttgggggtaaattactgcccctcactgggtctctgtctacccacctgcaaaatgagaggatctttggatgagtctccttaattcatttcctggacaaacttcctccaaggctcccccagatttaccagtgacgcccttccctaagtatcaacttagccgtactttgaactctggcccctcaggtttcaaggggacggccttgtctgggatcagctctgtctggggaaagaagctgcaccagcctctggatagcaggctgagtcacttgtttcttgtgccttgagtcagttctctcatcagctctcctcctaggccagtgttattacctccagtaaagatggaaaagttggggttcagagagggctagagacagacagcctgctgtgtcctgtcttttctcctgtgctgtacaggttcaccaatttttaaaatccaaatatatctcatggtacagtggaagaactggccagagagtctggaagtttgggttctggtcctggctgtgccactgactcactgtgaccttgggatcttgtgctgtgaagacatttcccaagtgcttcatgttagccagcaaatctgacccacaaggcctggaaagaggtgattgttaggttgcgcagaggtggtcttatccagctcagcttcccctgggacccaccgtgggacctgaggcagaactggggtggacttggcctcctccatggcacaccggctgcagatacgactgctgacgtgggatgtgaaggacacgctgctcaggctccgccaccccttaggggaggcctatgccaccaaggcccgggcccatgggctggaggtggagccctcagccctggaacaaggcttcaggcaggcatacagggctcagagccacagcttccccaactacggcctgagccacggcctaacctcccgccagtggtggctggatgtggtcctgcagaccttccacctggcgggtgtccaggatgctcaggctgtagcccccatcgctgaacagctttataaagacttcagccacccctgcacctggcaggtgttggatggggctgaggacaccctgagggagtgccgcacacggggtctgagactggcagtgatctccaactttgaccgacggctagagggcatcctggagggccttggcctgcgtgaacacttcgactttgtgctgacctccgaggctgctggctggcccaagccggacccccgcattttccaggaggccttgcggcttgctcatatggaaccagtagtggcagcccatgttggggataattacctctgcgattaccaggggcctcgggctgtgggcatgcacagcttcctggtggttggcccacaggcactggaccccgtggtcagggattctgtacctaaagaacacatcctcccctctctggcccatctcctgcctgcccttgactgcctagagggctcaactccagggctttgaggccagtgagggaagtggctgggccctaggccatggagaaaaccttaaacaaaccctggagacagggagccccttctttctccacagctctggacctttccccctctccctgcggcctttgtcacctactgtgataataaagcagtgagtgctgagctctcacccttcccccactaaaaaaaaaaaaaaaaaaaaaaaaaaagggggggcgcgcgcccgcgcggccccggagagaaagagttttaagaaacacacactgcgcggtggggcgcgcgcgggggcccacagggggaaaggggacacacgtggggccaagggggtgtccaaggggaaaccggggccaggacaaagggcggggggatttcaccaaccaaataaaaaaagcgcgccgggggggggaacacgcggaggcggtttcggggaaaaactccgcaaaagggggaggcatcgggaaggcgcccacacaggggggcgttatacacacaggggagggcccaaacggagagcgccaggaactatcaaattatgcccccgggcccggggggggcgn

SEQ ID NO: 294341 - DNA, 1854 bp, Homo sapiens
  misc_feature (1854)..(1854): n is a, c, g, or t
aaaaaaaaaaaaaagccgtgggtcaggagccagagccctctgctctagtcttagctgtgccaatgtgactccctgtgtgatttgggggtaaattactgcccctcactgggtctctgtctacccacctgcaaaatgagaggatctttggatgagtctccttaattcatttcctggacaaacttcctccaaggctcccccagatttaccagtgacgcccttccctaagtatcaacttagccgtactttgaactctggcccctcaggtttcaaggggacggccttgtctgggatcagctctgtctggggaaagaagctgcaccagcctctggatagcaggctgagtcacttgtttcttgtgccttgagtcagttctctcatcagctctcctcctaggccagtgttattacctccagtaaagatggaaaagttggggttcagagagggctagagacagacagcctgctgtgtcctgtcttttctcctgtgctgtacaggttcaccaatttttaaaatccaaatatatctcatggtacagtggaagaactggccagagagtctggaagtttgggttctggtcctggctgtgccactgactcactgtgaccttgggatcttgtgctgtgaagacatttcccaagtgcttcatgttagccagcaaatctgacccacaaggcctggaaagaggtgattgttaggttgcgcagaggtggtcttatccagctcacttccccaactacggcctgagccacggcctaacctcccgccagtggtggctggatgtggtcctgcagaccttccacctggcgggtgtccaggatgctcaggctgtagcccccatcgctgaacagctttataaagacttcagccacccctgcacctggcaggtgttggatggggctgaggacaccctgagggagtgccgcacacggggtctgagactggcagtgatctccaactttgaccgacggctagagggcatcctggagggccttggcctgcgtgaacacttcgactttgtgctgacctccgaggctgctggctggcccaagccggacccccgcattttccaggaggccttgcggcttgctcatatggaaccagtagtggcagcccatgttggggataattacctctgcgattaccaggggcctcgggctgtgggcatgcacagcttcctggtggttggcccacaggcactggaccccgtggtcagggattctgtacctaaagaacacatcctcccctctctggcccatctcctgcctgcccttgactgcctagagggctcaactccagggctttgaggccagtgagggaagtggctgggccctaggccatggagaaaaccttaaacaaaccctggagacagggagccccttctttctccacagctctggacctttccccctctccctgcggcctttgtcacctactgtgataataaagcagtgagtgctgagctctcacccttcccccactaaaaaaaaaaaaaaaaaaaaaaaaaaagggggggcgcgcgcccgcgcggccccggagagaaagagttttaagaaacacacactgcgcggtggggcgcgcgcgggggcccacagggggaaaggggacacacgtggggccaagggggtgtccaaggggaaaccggggccaggacaaagggcggggggatttcaccaaccaaataaaaaaagcgcgccgggggggggaacacgcggaggcggtttcggggaaaaactccgcaaaagggggaggcatcgggaaggcgcccacacaggggggcgttatacacacaggggagggcccaaacggagagcgccaggaactatcaaattatgcccccgggcccggggggggcgn

SEQ ID NO: 294342 - DNA, 1321 bp, Homo sapiens
gcccggcgcttgcgcacctccgcccgagctcgcgggccttgcggctgcgttttcaatctgcttccttgtgagtcaggtgggtcctgggcccaggaaccggcccggagccgtggacgccctacagctgagaaggggacccaaggggtcggccgcggccaaggcccctaggaccgccgccccagctcacgctgccgacggcagctatagacattctgcgtgaggtccgggctcctggacttcgcctttcccgagccctggaggtggggagaaaaggttcaccaatttttaaaatccaaatatatctcatggtacagtggaagaactggccagagagtctggaagtttgggttctggtcctggctgtgccactgactcactgtgaccttgggatcttgtgctgtgaagacatttcccaagtgcttcatgttagccagcaaatctgacccacaaggcctggaaagaggtgattgttaggttgcgcagaggtggtcttatccagctcagcttcccctgggacccaccgtgggacctgaggcagaactggggtggacttggcctcctccatggcacaccggctgcagatacgactgctgacgtgggatgtgaaggacacgctgctcaggctccgccaccccttaggggaggcctatgccaccaaggcccgggcccatgggctggaggtggagccctcagccctggaacaaggcttcaggcaggcatacagggctcagagccacagcttccccaactacggcctgagccacggcctaacctcccgccagtggtggctggatgtggtcctgcagaccttccacctggcgggtgtccaggatgctcaggctgtagcccccatcgctgaacagctttataaagacttcagccacccctgcacctggcaggtgttggatggggctgaggacaccctgagggagtgccgcacacggggtctgagactggcagtgatctccaactttgaccgacggctagagggcatcctggagggccttggcctgcgtgaacacttcgactttgtgctgacctccgaggctgctggctggcccaagccggacccccgcattttccaggaggccttgcggcttgctcatatggaaccagtagtggcagcccatgttggggataattacctctgcgattaccaggggcctcgggctgtgggcatgcacagcttcctggtggttggcccacaggcactggaccccgtggtcagggattctgtacctaaagaacacatcctcccctctctggcctagggcccagccacttccctcactggcctagttctagatcgcgagcggccgcc

SEQ ID NO: 294343 - DNA, 893 bp, Homo sapiens
  misc_feature (893)..(893): n is a, c, g, or t
gaggtgtggaggcacactgggggatctggtgccttgaagagaatcaagatctatcctgccacctgttagagctgctggctggcccaagccggacccccgcattttccaggaggccttgcggcttgctcatatggaaccagtagtggcagcccatgttggggataattacctctgcgattaccaggggcctcgggctgtgggcatgcacagcttcctggtggttggcccacaggcactggaccccgtggtcagggattctgtacctaaagaacacatcctcccctctctggcccatctcctgcctgcccttgactgcctagagggctcaactccagggctttgaggccagtgagggaagtggctgggccctaggccatggagaaaaccttaaacaaaccctggagacagggagccccttctttctccacagctctggacctttccccctctccctgcggcctttgtcacctactgtgataataaagcagtgagtgctgagctctcacccttcccccactaaaaaaaaaaaaaaaaaaaaaaaaaaagggggggcgcgcgcccgcgcggccccggagagaaagagttttaagaaacacacactgcgcggtggggcgcgcgcgggggcccacagggggaaaggggacacacgtggggccaagggggtgtccaaggggaaaccggggccaggacaaagggcggggggatttcaccaaccaaataaaaaaagcgcgccgggggggggaacacgcggaggcggtttcggggaaaaactccgcaaaagggggaggcatcgggaaggcgcccacacaggggggcgttatacacacaggggagggcccaaacggagagcgccaggaactatcaaattatgcccccgggcccggggggggcgn

SEQ ID NO: 294344 - DNA, 992 bp, Homo sapiens
  misc_feature (992)..(992): n is a, c, g, or t
gcccggcgcttgcgcacctccgcccgagctcgcgggccttgcggctgcgttttcaatctgcttccttgtgagtcaggtgggtcctgggcccaggaaccggcccggagccgtggacgccctacagctgagaaggggacccaaggggtcggccgcggccaaggcccctaggaccgccgccccagctcacgctgccgacggcagctatagacattctgcgtgaggtccgggctcctggacttcgcctttcccgagccctggaggtggggagaaaaggttcaccaatttttaaaatccaaatatatctcatggtacagtggaagaactggccagagagtctggaagtttgggttctggtcctggctgtgccactgactcactgtgaccttgggatcttgtgctgtgaagacatttcccaagtgcttcatgttagccagcaaatctgacccagtgagggaagtggctgggccctaggccatggagaaaaccttaaacaaaccctggagacagggagccccttctttctccacagctctggacctttccccctctccctgcggcctttgtcacctactgtgataataaagcagtgagtgctgagctctcacccttcccccactaaaaaaaaaaaaaaaaaaaaaaaaaaagggggggcgcgcgcccgcgcggccccggagagaaagagttttaagaaacacacactgcgcggtggggcgcgcgcgggggcccacagggggaaaggggacacacgtggggccaagggggtgtccaaggggaaaccggggccaggacaaagggcggggggatttcaccaaccaaataaaaaaagcgcgccgggggggggaacacgcggaggcggtttcggggaaaaactccgcaaaagggggaggcatcgggaaggcgcccacacaggggggcgttatacacacaggggagggcccaaacggagagcgccaggaactatcaaattatgcccccgggcccggggggggcgn

SEQ ID NO: 294345 - DNA, 294 bp, Homo sapiens
gagccgtggacgccctacagctgagaaggggacccaaggggtcggccgcggccaaggcccctaggaccgccgccccagctcacgctgccgacggcagctatagacattctgcgtgaggtccgggctcctggacttcgcctttcccgagccctggaggtggggagaaaagggtgagcagttcgtgcctgcagcgcagagccccaaacccgcggttttagaaatcgaaaaagccctgccgggcgcggtggctcacgcctttaccgtaatcccagcactttgggaggccgcggggcg

SEQ ID NO: 294346 - DNA, 407 bp, Homo sapiens
cacccagccctcaaaccccgtgccaagcacccgcggactctcacgtcctcttcttccagggcggcgggcgcttctcctgcaccttggcctggcgcctcttctcggcctcctccgcctcccgtttctcctccttggccaccttgtaaggccacttgggtatccgcaggtggccgctgcctttatgctgcccttccgcgccggccttttgggttggaaggtgggcgcgggcaccttgctgaggcggacctgggcaccaccacgctgggccccaagctgctctgctgcaggcactgcaggggcaggaggctggccgtccgcggggcgggggcggcggagccccaggaccccggcagccgggcaggtgggaggccggctcttggggaggcctttgtggagccagcggccgc

SEQ ID NO: 294347 - DNA, 627 bp, Homo sapiens
aggccacgcccaagatggggcggccgctccaaagatggcggcaagccttttgttctcttacctggggttcttggcttcatggattccaaggaatggaactttgggccatgcgatagtcttgctcagttgcccaggctagagtgcagtggtgtgatcatggctcactgcagccttgaactcctgggctcaagttatcctcccacctcagcttccttagttgctgggactacaagtgcaggccatgcctggcttctatggattgtggatttcttatttcatgagctggacacaatttctcatgacattatgcacctggctccaatgctgctattattataatgtactctttatgtatgatattttcacaattaaacaaaatcatttttgatatttttgcttgtgattaaaatagaacttatattgataaaaagaaaagagaaggaaaagaaagagaaagaggagaaaagaacaaggaccaggagcaagagagaaaaagagagaaaggaaagagcgggagagaaagagaaacaagcagccgcgggggcgggggcgtgggggaggggagggggggggataatgagggggggggggcggcgaaaaagaggggtagcgaacgaaggggggagg

SEQ ID NO: 294348 - DNA, 402 bp, Homo sapiens
gtcgaccgctcctgaaccagtcacaggacagggagatacggggctctgattggtcagacccaggatgggtcgctcacctgcacccaatagctgccctgtctgaactctgggctgaaagtggggaatcgcaatctccagagaaaatgagtcctaaagaatgcatgcccaaggtgggcagatcatgaggtcaagagttcaagaccatcctggccaacatcatgaaaccgcgtctactcaagatataaaaaattagctgggcgtggtggcgtgcacctgtaatcccagctactcaggaggctaaggcaggagagtcacttggacctgagaggtggaggttgcagtgagccgagatcgcaccattgtactctagcctgggtgacagggcgagactctgtctaaaaa

SEQ ID NO: 294349 - DNA, 477 bp, Homo sapiens
cagacattgcaatgcagacacataagattagaagcaaaacgcaggaggctggagttacctttcatggaagggtaagcaggaagcaactacaagatcatcatttcaaaacaatatgaaagcagaatgggaaatgccatggcatgctccctcttttcaggcaatatggacactttggggaagttatgaagcgtctcccattcccgcttgaggtactcaatagagcccacaaacacaatgtgcttgagctcatggtaatgaaagttgctggcacggagcggcatcaccaggttccggaggccgatcagggctgagctgacgtcgccaaagatgcagaccacgacatggccactcaggacggtcatggcagcttcacttcgagtctacaacagggagaagtgggtaagagtcagagagaagactgcatagggctgttgtaaggagtgaaataaatcatttgtgcaaagaatcaagcaaata

SEQ ID NO: 294350 - DNA, 665 bp, Homo sapiens
ttctgtaagcaaatccttactataaacatcataatataacaatgctctaggttttgtataggcaggagtgagagtgtttagacgctgatatggttaatatacttgatacaagctaaacttcatccctgatgagggactgaacttggctgcaaattccttttaataaggtctcccagggtttggattttccttgacagagcataggggaagtgctgagtcctcaggcccatacccagatgaagaagcacaggcatgatcaaagctacaactattatatccatccgggattttcttttgtgaatgaaaagaagaaaaggcatcaataatgtgaccttggacttacaggcaatatggacactttggggaagttatgaagcgtctcccattcccgcttgaggtactcaatagagcccacaaacacaatgtgcttgagctcatggtaatgaaagttgctggcacggagcggcatcaccaggttccggaggccgatcagggctgagctgacgtcgccaaagatgcagaccacgacatggccactcaggacggtcatggcagcttcacttcgagtctacaacagggagaagtgggtaagagtcagagagaagactgcatagggctgttgtaaggagtgaaataaatcatttgtgcaaagaatcaagcaaata

SEQ ID NO: 294351 - DNA, 265 bp, Homo sapiens
tgaattgaattggtgttttggccaaaaatcagttgaccatctatgcatgagtttatttctggactctattctattccattgatctattgtctctccttaccaagaaccgcattgttttgattactgtggctttatagtaaatactaaagtcaggaggaatacattttccaacttggctcttcttttctaaaattttctagctattctagattgtttgcatttccagataagtcttagaagcagtatgtcaatttctttaaaaata

SEQ ID NO: 294352 - DNA, 2789 bp, Homo sapiens
agactgcagctgaggtggaagatgagccccaacttctaaaaatgtatcactaccgggattgagatacaaacagcatttaggaaggtctcatctgagtagcagcttcctgccctccttcttggagataagtcgggcttttggtgagacagactttcccaaccctctgcccggccggtgcccatgcttctgtggctgctgctgctgatcctgactcctggaagagaacaatcaggggtggccccaaaagctgtacttctcctcaatcctccatggtccacagccttcaaaggagaaaaagtggctctcatatgcagcagcatatcacattccctagcccagggagacacatattggtatcacgatgagaagttgttgaaaataaaacatgacaagatccaaattacagagcctggaaattaccaatgtaagacccgaggatcctccctcagtgatgccgtgcatgtggaattttcacctgactggctgatcctgcaggctttacatcctgtctttgaaggagacaatgtcattctgagatgtcaggggaaagacaacaaaaacactcatcaaaaggtttactacaaggatggaaaacagcttcctaatagttataatttagagaagatcacagtgaattcagtctccagggataatagcaaatatcattgtactgcttataggaagttttacatacttgacattgaagtaacttcaaaacccctaaatatccaagttcaagagctgtttctacatcctgtgctgagagccagctcttccacgcccatagaggggagtcccatgaccctgacctgtgagacccagctctctccacagaggccagatgtccagctgcaattctccctcttcagagatagccagaccctcggattgggctggagcaggtcccccagactccagatccctgccatgtggactgaagactcagggtcttactggtgtgaggtggagacagtgactcacagcatcaaaaaaaggagcctgagatctcagatacgtgtacagagagtccctgtgtctaatgtgaatctagagatccggcccaccggagggcagctgattgaaggagaaaatatggtccttatttgctcagtagcccagggttcagggactgtcacattctcctggcacaaagaaggaagagtaagaagcctgggtagaaagacccagcgttccctgttggcagagctgcatgttctcaccgtgaaggagagtgatgcagggagatactactgtgcagctgataacgttcacagccccatcctcagcacgtggattcgagtcaccgtgagaattccggtatctcaccctgtcctcaccttcagggctcccagggcccacactgtggtgggggacctgctggagcttcactgtgagtccctgagaggctctcccccgatcctgtaccgattttatcatgaggatgtcaccctggggaacagctcagccccctctggaggaggagcctccttcaacctctctctgactgcagaacattctggaaactactcctgtgatgcagacaatggcctgggggcccagcacagtcatggagtgagtctcagggtcacagttccggtgtctcgccccgtcctcaccctcagggctcccggggcccaggctgtggtgggggacctgctggagcttcactgtgagtccctgagaggctccttcccgatcctgtactggttttatcacgaggatgacaccttggggaacatctcggcccactctggaggaggggcatccttcaacctctctctgactacagaacattctggaaactactcatgtgaggctgacaatggcctgggggcccagcacagtaaagtggtgacactcaatgttacaggaacttccaggaacagaacaggccttaccgctgcgggaatcacggggctggtgctcagcatcctcgtccttgctgctgctgctgctctgctgcattacgccagggcccgaaggaaaccaggaggactttctgccactggaacatctagtcacagtcctagtgagtgtcaggagccttcctcgtccaggccttccaggatagaccctcaagagcccactcactctaaaccactagccccaatggagctggagccaatgtacagcaatgtaaatcctggagatagcaacccgatttattcccagatctggagcatccagcatacaaaagaaaactcagctaattgtccaatgatgcatcaagagcatgaggaacttacagtcctctattcagaactgaagaagacacacccagacgactctgcaggggaggctagcagcagaggcagggcccatgaagaagatgatgaagaaaactatgagaatgtaccacgtgtattactggcctcagaccactagccccttacccagagtggcccacaggaaacagcctgcaccatttttttttctgttctctccaaccacacatcatccatctctccagactctgcctcctacgaggctgggctgcaggattctgaacccaagaaagaacaaagttcaagattttccatgtctttgtaacacttagccctgtgcaaatcagagtatgtgagtggaagaaggggtgagtcctaactgtacatctcggatataacaaatgtgcaaattctgattgattgccctgtaaaatgaattattctcatgcagtgctctacttgacttttatctttgaattcacaactaaaaacccatagcccagaaatctaaaaaaagtaattttagtggagcctttgaaaataaaagaccattggaaaaagtac

SEQ ID NO: 294353 - DNA, 3023 bp, Homo sapiens
agactgcagctgaggtggaagatgagccccaacttctaaaaatgtatcactaccgggattgagatacaaacagcatttaggaaggtctcatctgagtagcagcttcctgccctccttcttggagataagtcgggcttttggtgagacagactttcccaaccctctgcccggccggtgcccatgcttctgtggctgctgctgctgatcctgactcctggaagagaacaatcaggggtggccccaaaagctgtacttctcctcaatcctccatggtccacagccttcaaaggagaaaaagtggctctcatatgcagcagcatatcacattccctagcccagggagacacatattggtatcacgatgagaagttgttgaaaataaaacatgacaagatccaaattacagagcctggaaattaccaatgtaagacccgaggatcctccctcagtgatgccgtgcatgtggaattttcacctgactggctgatcctgcaggctttacatcctgtctttgaaggagacaatgtcattctgagatgtcaggggaaagacaacaaaaacactcatcaaaaggtttactacaaggatggaaaacagcttcctaatagttataatttagagaagatcacagtgaattcagtctccagggataatagcaaatatcattgtactgcttataggaagttttacatacttgacattgaagtaacttcaaaacccctaaatatccaagttcaaggtaatggctagattcctgtggattactgggtttgttagggaaactggggataaagggaagatgtttatcagtgggaatttcataaagagtctcctatggctcagccatgggagggagatggttccttctgcatgcttctctatctcctgatggctggtgctgagatgacaaatgcatctctctaggaactctgagcctcaccaccctggagactatgttgtttcttttcattagagctgtttctacatcctgtgctgagagccagctcttccacgcccatagaggggagtcccatgaccctgacctgtgagacccagctctctccacagaggccagatgtccagctgcaattctccctcttcagagatagccagaccctcggattgggctggagcaggtcccccagactccagatccctgccatgtggactgaagactcagggtcttactggtgtgaggtggagacagtgactcacagcatcaaaaaaaggagcctgagatctcagatacgtgtacagagagtccctgtgtctaatgtgaatctagagatccggcccaccggagggcagctgattgaaggagaaaatatggtccttatttgctcagtagcccagggttcagggactgtcacattctcctggcacaaagaaggaagagtaagaagcctgggtagaaagacccagcgttccctgttggcagagctgcatgttctcaccgtgaaggagagtgatgcagggagatactactgtgcagctgataacgttcacagccccatcctcagcacgtggattcgagtcaccgtgagaattccggtatctcaccctgtcctcaccttcagggctcccagggcccacactgtggtgggggacctgctggagcttcactgtgagtccctgagaggctctcccccgatcctgtaccgattttatcatgaggatgtcaccctggggaacagctcagccccctctggaggaggagcctccttcaacctctctctgactgcagaacattctggaaactactcctgtgatgcagacaatggcctgggggcccagcacagtcatggagtgagtctcagggtcacagttccggtgtctcgccccgtcctcaccctcagggctcccggggcccaggctgtggtgggggacctgctggagcttcactgtgagtccctgagaggctccttcccgatcctgtactggttttatcacgaggatgacaccttggggaacatctcggcccactctggaggaggggcatccttcaacctctctctgactacagaacattctggaaactactcatgtgaggctgacaatggcctgggggcccagcacagtaaagtggtgacactcaatgttacaggaacttccaggaacagaacaggccttaccgctgcgggaatcacggggctggtgctcagcatcctcgtccttgctgctgctgctgctctgctgcattacgccagggcccgaaggaaaccaggaggactttctgccactggaacatctagtcacagtcctagtgagtgtcaggagccttcctcgtccaggccttccaggatagaccctcaagagcccactcactctaaaccactagccccaatggagctggagccaatgtacagcaatgtaaatcctggagatagcaacccgatttattcccagatctggagcatccagcatacaaaagaaaactcagctaattgtccaatgatgcatcaagagcatgaggaacttacagtcctctattcagaactgaagaagacacacccagacgactctgcaggggaggctagcagcagaggcagggcccatgaagaagatgatgaagaaaactatgagaatgtaccacgtgtattactggcctcagaccactagccccttacccagagtggcccacaggaaacagcctgcaccatttttttttctgttctctccaaccacacatcatccatctctccagactctgcctcctacgaggctgggctgcaggattctgaacccaagaaagaacaaagttcaagattttccatgtctttgtaacacttagccctgtgcaaatcagagtatgtgagtggaagaaggggtgagtcctaactgtacatctcggatataacaaatgtgcaaattctgattgattgccctgtaaaatgaattattctcatgcagtgctctacttgacttttatctttgaattcacaactaaaaacccatagcccagaaatctaaaaaaagtaattttagtggagcctttgaaaataaaagaccattggaaaaagtac

SEQ ID NO: 294354 - DNA, 2807 bp, Homo sapiens
agactgcagctgaggtggaagatgagccccaacttctaaaaatgtatcactaccgggattgagatacaaacagcatttaggaaggtctcatctgagtagcagcttcctgccctccttcttggagataagtcgggcttttggtgagacagactttcccaaccctctgcccggccggtgcccatgcttctgtggctgctgctgctgatcctgactcctggaagagaacaatcaggggtggccccaaaagctgtacttctcctcaatcctccatggtccacagccttcaaaggagaaaaagtggctctcatatgcagcagcatatcacattccctagcccagggagacacatattggtatcacgatgagaagttgttgaaaataaaacatgacaagatccaaattacagagcctggaaattaccaatgtaagacccgaggatcctccctcagtgatgccgtgcatgtggaattttcacctgactggctgatcctgcaggctttacatcctgtctttgaaggagacaatgtcattctgagatgtcaggggaaagacaacaaaaacactcatcaaaaggtttactacaaggatggaaaacagcttcctaatagttataatttagagaagatcacagtgaattcagtctccagggataatagcaaatatcattgtactgcttataggaagttttacatacttgacattgaagtaacttcaaaacccctaaatatccaagttcaagagctgtttctacatcctgtgctgagagccagctcttccacgcccatagaggggagtcccatgaccctgacctgtgagacccagctctctccacagaggccagatgtccagctgcaattctccctcttcagagatagccagaccctcggattgggctggagcaggtcccccagactccagatccctgccatgtggactgaagactcagggtcttactggtgtgaggtggagacagtgactcacagcatcaaaaaaaggagcctgagatctcagatacgtgtacagagagtccctgtgtctaatgtgaatctagagatccggcccaccggagggcagctgattgaaggagaaaatatggtccttatttgctcagtagcccagggttcagggactgtcacattctcctggcacaaagaaggaagagtaagaagcctgggtagaaagacccagcgttccctgttggcagagctgcatgttctcaccgtgaaggagagtgatgcagggagatactactgtgcagctgataacgttcacagccccatcctcagcacgtggattcgagtcaccgtgagaacccttttgtctccttcagttccggtatctcaccctgtcctcaccttcagggctcccagggcccacactgtggtgggggacctgctggagcttcactgtgagtccctgagaggctctcccccgatcctgtaccgattttatcatgaggatgtcaccctggggaacagctcagccccctctggaggaggagcctccttcaacctctctctgactgcagaacattctggaaactactcctgtgatgcagacaatggcctgggggcccagcacagtcatggagtgagtctcagggtcacagttccggtgtctcgccccgtcctcaccctcagggctcccggggcccaggctgtggtgggggacctgctggagcttcactgtgagtccctgagaggctccttcccgatcctgtactggttttatcacgaggatgacaccttggggaacatctcggcccactctggaggaggggcatccttcaacctctctctgactacagaacattctggaaactactcatgtgaggctgacaatggcctgggggcccagcacagtaaagtggtgacactcaatgttacaggaacttccaggaacagaacaggccttaccgctgcgggaatcacggggctggtgctcagcatcctcgtccttgctgctgctgctgctctgctgcattacgccagggcccgaaggaaaccaggaggactttctgccactggaacatctagtcacagtcctagtgagtgtcaggagccttcctcgtccaggccttccaggatagaccctcaagagcccactcactctaaaccactagccccaatggagctggagccaatgtacagcaatgtaaatcctggagatagcaacccgatttattcccagatctggagcatccagcatacaaaagaaaactcagctaattgtccaatgatgcatcaagagcatgaggaacttacagtcctctattcagaactgaagaagacacacccagacgactctgcaggggaggctagcagcagaggcagggcccatgaagaagatgatgaagaaaactatgagaatgtaccacgtgtattactggcctcagaccactagccccttacccagagtggcccacaggaaacagcctgcaccatttttttttctgttctctccaaccacacatcatccatctctccagactctgcctcctacgaggctgggctgcaggattctgaacccaagaaagaacaaagttcaagattttccatgtctttgtaacacttagccctgtgcaaatcagagtatgtgagtggaagaaggggtgagtcctaactgtacatctcggatataacaaatgtgcaaattctgattgattgccctgtaaaatgaattattctcatgcagtgctctacttgacttttatctttgaattcacaactaaaaacccatagcccagaaatctaaaaaaagtaattttagtggagcctttgaaaataaaagaccattggaaaaagtac

SEQ ID NO: 294355 - DNA, 2694 bp, Homo sapiens
agactgcagctgaggtggaagatgagccccaacttctaaaaatgtatcactaccgggattgagatacaaacagcatttaggaaggtctcatctgagtagcagcttcctgccctccttcttggagataagtcgggcttttggtgagacagactttcccaaccctctgcccggccggtgcccatgcttctgtggctgctgctgctgatcctgactcctggaagagaacaatcaggggtggccccaaaagctgtacttctcctcaatcctccatggtccacagccttcaaaggagaaaaagtggctctcatatgcagcagcatatcacattccctagcccagggagacacatattggtatcacgatgagaagttgttgaaaataaaacatgacaagatccaaattacagagcctggaaattaccaatgtaagacccgaggatcctccctcagtgatgccgtgcatgtggaattttcacctgactggctgatcctgcaggctttacatcctgtctttgaaggagacaatgtcattctgagatgtcaggggaaagacaacaaaaacactcatcaaaaggtttactacaaggatggaaaacagcttcctaatagttataatttagagaagatcacagtgaattcagtctccagggataatagcaaatatcattgtactgcttataggaagttttacatacttgacattgaagtaacttcaaaacccctaaatatccaagttcaagaggccagatgtccagctgcaattctccctcttcagagatagccagaccctcggattgggctggagcaggtcccccagactccagatccctgccatgtggactgaagactcagggtcttactggtgtgaggtggagacagtgactcacagcatcaaaaaaaggagcctgagatctcagatacgtgtacagagagtccctgtgtctaatgtgaatctagagatccggcccaccggagggcagctgattgaaggagaaaatatggtccttatttgctcagtagcccagggttcagggactgtcacattctcctggcacaaagaaggaagagtaagaagcctgggtagaaagacccagcgttccctgttggcagagctgcatgttctcaccgtgaaggagagtgatgcagggagatactactgtgcagctgataacgttcacagccccatcctcagcacgtggattcgagtcaccgtgagaattccggtatctcaccctgtcctcaccttcagggctcccagggcccacactgtggtgggggacctgctggagcttcactgtgagtccctgagaggctctcccccgatcctgtaccgattttatcatgaggatgtcaccctggggaacagctcagccccctctggaggaggagcctccttcaacctctctctgactgcagaacattctggaaactactcctgtgatgcagacaatggcctgggggcccagcacagtcatggagtgagtctcagggtcacagttccggtgtctcgccccgtcctcaccctcagggctcccggggcccaggctgtggtgggggacctgctggagcttcactgtgagtccctgagaggctccttcccgatcctgtactggttttatcacgaggatgacaccttggggaacatctcggcccactctggaggaggggcatccttcaacctctctctgactacagaacattctggaaactactcatgtgaggctgacaatggcctgggggcccagcacagtaaagtggtgacactcaatgttacaggaacttccaggaacagaacaggccttaccgctgcgggaatcacggggctggtgctcagcatcctcgtccttgctgctgctgctgctctgctgcattacgccagggcccgaaggaaaccaggaggactttctgccactggaacatctagtcacagtcctagtgagtgtcaggagccttcctcgtccaggccttccaggatagaccctcaagagcccactcactctaaaccactagccccaatggagctggagccaatgtacagcaatgtaaatcctggagatagcaacccgatttattcccagatctggagcatccagcatacaaaagaaaactcagctaattgtccaatgatgcatcaagagcatgaggaacttacagtcctctattcagaactgaagaagacacacccagacgactctgcaggggaggctagcagcagaggcagggcccatgaagaagatgatgaagaaaactatgagaatgtaccacgtgtattactggcctcagaccactagccccttacccagagtggcccacaggaaacagcctgcaccatttttttttctgttctctccaaccacacatcatccatctctccagactctgcctcctacgaggctgggctgcaggattctgaacccaagaaagaacaaagttcaagattttccatgtctttgtaacacttagccctgtgcaaatcagagtatgtgagtggaagaaggggtgagtcctaactgtacatctcggatataacaaatgtgcaaattctgattgattgccctgtaaaatgaattattctcatgcagtgctctacttgacttttatctttgaattcacaactaaaaacccatagcccagaaatctaaaaaaagtaattttagtggagcctttgaaaataaaagaccattggaaaaagtac

SEQ ID NO: 294356 - DNA, 2504 bp, Homo sapiens
agactgcagctgaggtggaagatgagccccaacttctaaaaatgtatcactaccgggattgagatacaaacagcatttaggaaggtctcatctgagtagcagcttcctgccctccttcttggagataagtcgggcttttggtgagacagactttcccaaccctctgcccggccggtgcccatgcttctgtggctgctgctgctgatcctgactcctggaagagaacaatcaggggtggccccaaaagctgtacttctcctcaatcctccatggtccacagccttcaaaggagaaaaagtggctctcatatgcagcagcatatcacattccctagcccagggagacacatattggtatcacgatgagaagttgttgaaaataaaacatgacaagatccaaattacagagcctggaaattaccaatgtaagacccgaggatcctccctcagtgatgccgtgcatgtggaattttcacctgactggctgatcctgcaggctttacatcctgtctttgaaggagacaatgtcattctgagatgtcaggggaaagacaacaaaaacactcatcaaaaggtttactacaaggatggaaaacagcttcctaatagttataatttagagaagatcacagtgaattcagtctccagggataatagcaaatatcattgtactgcttataggaagttttacatacttgacattgaagtaacttcaaaacccctaaatatccaagttcaaggagtccctgtgtctaatgtgaatctagagatccggcccaccggagggcagctgattgaaggagaaaatatggtccttatttgctcagtagcccagggttcagggactgtcacattctcctggcacaaagaaggaagagtaagaagcctgggtagaaagacccagcgttccctgttggcagagctgcatgttctcaccgtgaaggagagtgatgcagggagatactactgtgcagctgataacgttcacagccccatcctcagcacgtggattcgagtcaccgtgagaattccggtatctcaccctgtcctcaccttcagggctcccagggcccacactgtggtgggggacctgctggagcttcactgtgagtccctgagaggctctcccccgatcctgtaccgattttatcatgaggatgtcaccctggggaacagctcagccccctctggaggaggagcctccttcaacctctctctgactgcagaacattctggaaactactcctgtgatgcagacaatggcctgggggcccagcacagtcatggagtgagtctcagggtcacagttccggtgtctcgccccgtcctcaccctcagggctcccggggcccaggctgtggtgggggacctgctggagcttcactgtgagtccctgagaggctccttcccgatcctgtactggttttatcacgaggatgacaccttggggaacatctcggcccactctggaggaggggcatccttcaacctctctctgactacagaacattctggaaactactcatgtgaggctgacaatggcctgggggcccagcacagtaaagtggtgacactcaatgttacaggaacttccaggaacagaacaggccttaccgctgcgggaatcacggggctggtgctcagcatcctcgtccttgctgctgctgctgctctgctgcattacgccagggcccgaaggaaaccaggaggactttctgccactggaacatctagtcacagtcctagtgagtgtcaggagccttcctcgtccaggccttccaggatagaccctcaagagcccactcactctaaaccactagccccaatggagctggagccaatgtacagcaatgtaaatcctggagatagcaacccgatttattcccagatctggagcatccagcatacaaaagaaaactcagctaattgtccaatgatgcatcaagagcatgaggaacttacagtcctctattcagaactgaagaagacacacccagacgactctgcaggggaggctagcagcagaggcagggcccatgaagaagatgatgaagaaaactatgagaatgtaccacgtgtattactggcctcagaccactagccccttacccagagtggcccacaggaaacagcctgcaccatttttttttctgttctctccaaccacacatcatccatctctccagactctgcctcctacgaggctgggctgcaggattctgaacccaagaaagaacaaagttcaagattttccatgtctttgtaacacttagccctgtgcaaatcagagtatgtgagtggaagaaggggtgagtcctaactgtacatctcggatataacaaatgtgcaaattctgattgattgccctgtaaaatgaattattctcatgcagtgctctacttgacttttatctttgaattcacaactaaaaacccatagcccagaaatctaaaaaaagtaattttagtggagcctttgaaaataaaagaccattggaaaaagtac

SEQ ID NO: 294357 - DNA, 1700 bp, Homo sapiens
tttgtacttacagggtgacattcccaaccaaattaccctagttatgatgaaaaataacttcagcatttcattaaagactctgctagtttaatatgtgacttgtatccccactgcaaagaccttatgtgtgaagaatcacattaattgtaatttttgcttcatgacatagtctcatcatttgccatacatgatagatttctagtcagtcagttttattcttataagcacccattaaccccgagacaataacctactatatctatgtggcttctcccattctcttcctctacctcactccatctgataaaaaaccattctaaatctcatgttcattattcccatgctctcctatttctatcatattaatgtatctacatgttttccttaaatatgtttttatattagttttaactataagttaaagaccatattgttgtagataaatttttttagtactttctcttcatgttgtatttctaagattcatccatattgttgcgtgttgctatagttcatttgtttttattgctgtttagtatttacttgtgtaaaatatctggcttaatgttttcctagctatcaccatcaaaaactctttccacagtgtgttgaatttttaatatgacaaaaatgaaaatgtaccaacaattttcagtgacttcacctccattctgaaatcctgatgtttccaaatatctctgaacacctcaagtcctagggacaactgagattatattaacattaatctctgaatgttgccaattctaggccttcacttggttcatgtaggaacaccaagtccctttcaaagcaccacatcttcctctaatcaatatttcttggagtccctagggaatgtcttacatgcattcaaacaatcaccatttctggagatacactacagggtcaccataaactctgctacccttaggttccatcactatggaagctgagtttcaccagaaggcacttttgtcctccattacgaccagcaaagccagctaagccacagctgctggcctcaaaaaatgtgatgatcaatccacactgctcccactggcctctgttacccttatcctggcctttgagtgcagggcatgatgtcctgcccgtactgagatgctgatctctgccagttcatgttcatattggcattaaaattttaaggtcccttgaagagggaggaggcaaatgtctctgtcttctatgtgatacattctgctgtttttttctctatggtgaaaatatgtaaaccggttttgggtaccaaccaccaggctgtatatggaggctctcctcctttctaaccctgctgctgatttggaattaccttgccaagcccctttgtgccttatagtgaactttctctaagggacctgtcatctcttatcattgtttatccattttctagattctgaacccaagaaagaacaaagttcaagattttccatgtctttgtaacacttagccctgtgcaaatcagagtatgtgagtggaagaaggggtgagtcctaactgtacatctcggatataacaaatgtgcaaattctgattgattgccctgtaaaatgaattattctcatgcagtgctctacttgacttttatctttgaattcacaactaaaaacccatagcccagaaatctaaaaaaagtaattttagtggagcctttgaaaataaaagaccattggaaaaagtac

SEQ ID NO: 294358 - DNA, 2867 bp, Homo sapiens
agactgcagctgaggtggaagatgagccccaacttctaaaaatgtatcactaccgggattgagatacaaacagcatttaggaaggtctcatctgagtagcagcttcctgccctccttcttggagataagtcgggcttttggtgagacagactttcccaaccctctgcccggccggtgcccatgcttctgtggctgctgctgctgatcctgactcctggaagagaacaatcaggggtggccccaaaagctgtacttctcctcaatcctccatggtccacagccttcaaaggagaaaaagtggctctcatatgcagcagcatatcacattccctagcccagggagacacatattggtatcacgatgagaagttgttgaaaataaaacatgacaagatccaaattacagagcctggaaattaccaatgtaagacccgaggatcctccctcagtgatgccgtgcatgtggaattttcacctgactggctgatcctgcaggctttacatcctgtctttgaaggagacaatgtcattctgagatgtcaggggaaagacaacaaaaacactcatcaaaaggtttactacaaggatggaaaacagcttcctaatagttataatttagagaagatcacagtgaattcagtctccagggataatagcaaatatcattgtactgcttataggaagttttacatacttgacattgaagtaacttcaaaacccctaaatatccaagttcaagagctgtttctacatcctgtgctgagagccagctcttccacgcccatagaggggagtcccatgaccctgacctgtgagacccagctctctccacagaggccagatgtccagctgcaattctccctcttcagagatagccagaccctcggattgggctggagcaggtcccccagactccagatccctgccatgtggactgaagactcagggtcttactggtgtgaggtggagacagtgactcacagcatcaaaaaaaggagcctgagatctcagatacgtgtacagagagtccctgtgtctaatgtgaatctagagatccggcccaccggagggcagctgattgaaggagaaaatatggtccttatttgctcagtagcccagggttcagggactgtcacattctcctggcacaaagaaggaagagtaagaagcctgggtagaaagacccagcgttccctgttggcagagctgcatgttctcaccgtgaaggagagtgatgcagggagatactactgtgcagctgataacgttcacagccccatcctcagcacgtggattcgagtcaccgtgagaattccggtatctcaccctgtcctcaccttcagggctcccagggcccacactgtggtgggggacctgctggagcttcactgtgagtccctgagaggctctcccccgatcctgtaccgattttatcatgaggatgtcaccctggggaacagctcagccccctctggaggaggagcctccttcaacctctctctgactgcagaacattctggaaactactcctgtgatgcagacaatggcctgggggcccagcacagtcatggagtgagtctcagggtcacagttccggtgtctcgccccgtcctcaccctcagggctcccggggcccaggctgtggtgggggacctgctggagcttcactgtgagtccctgagaggctccttcccgatcctgtactggttttatcacgaggatgacaccttggggaacatctcggcccactctggaggaggggcatccttcaacctctctctgactacagaacattctggaaactactcatgtgaggctgacaatggcctgggggcccagcacagtaaagtggtgacactcaatgttacaggaacttccaggaacagaacaggccttaccgctgcgggaatcacggggctggtgctcagcatcctcgtccttgctgctgctgctgctctgctgcattacgccagggcccgaaggaaaccaggaggactttctgccactggaacatctagtcacagtcctagtgagtgtcaggagccttcctcgtccaggccttccaggatagaccctcaagagcccactcactctaaaccactagccccaatggagctggagccaatgtacagcaatgtaaatcctggagatagcaacccgatttattcccagatctggagcatccagcatacaaaagaaaactcagctaattgtccaatgatgcatcaagagcatgaggaacttacagtcctctattcagaactgaagaagacacacccagacgactctgcaggggaggctagcagcagaggcagggcccatgaagaagatgatgaagaaaactatgagaatgtaccacgtgtattactggcctcagaccactagccccttacccagagtggcccacaggaaacagcctgcaccatttttttttctgttctctccaaccacacatcatccatctctccagactctgcctcctacgaggctgggctgcagggtatgtgaggctgagcaaaaggtctgcaaatctcccctgtgcctgatctgtgtgttccccaggaagagagcaggcagcctctgagcaagcactgtgttattttcacagtggagacacgtggcaaggcaggagggccctcagctcctagggctgtcgaatagaggaggagagagaaatggtctagccagggttacaagggcacaatcatgaccatttgatccaagtgtgatcgaaagctgttaatgtgctctctgtataaacaatttgctccaaatattttgtttcccttttttgtgtggctggtagtggcattgctgatgttttggtgtatatgctgtatccttgctaccatattgggaacagccaa

SEQ ID NO: 294359 - DNA, 2950 bp, Homo sapiens
agactgcagctgaggtggaagatgagccccaacttctaaaaatgtatcactaccgggattgagatacaaacagcatttaggaaggtctcatctgagtagcagcttcctgccctccttcttggagataagtcgggcttttggtgagacagactttcccaaccctctgcccggccggtgcccatgcttctgtggctgctgctgctgatcctgactcctggaagagaacaatcaggggtggccccaaaagctgtacttctcctcaatcctccatggtccacagccttcaaaggagaaaaagtggctctcatatgcagcagcatatcacattccctagcccagggagacacatattggtatcacgatgagaagttgttgaaaataaaacatgacaagatccaaattacagagcctggaaattaccaatgtaagacccgaggatcctccctcagtgatgccgtgcatgtggaattttcacctgactggctgatcctgcaggctttacatcctgtctttgaaggagacaatgtcattctgagatgtcaggggaaagacaacaaaaacactcatcaaaaggtttactacaaggatggaaaacagcttcctaatagttataatttagagaagatcacagtgaattcagtctccagggataatagcaaatatcattgtactgcttataggaagttttacatacttgacattgaagtaacttcaaaacccctaaatatccaagttcaagagctgtttctacatcctgtgctgagagccagctcttccacgcccatagaggggagtcccatgaccctgacctgtgagacccagctctctccacagaggccagatgtccagctgcaattctccctcttcagagatagccagaccctcggattgggctggagcaggtcccccagactccagatccctgccatgtggactgaagactcagggtcttactggtgtgaggtggagacagtgactcacagcatcaaaaaaaggagcctgagatctcagatacgtgtacagagagtccctgtgtctaatgtgaatctagagatccggcccaccggagggcagctgattgaaggagaaaatatggtccttatttgctcagtagcccagggttcagggactgtcacattctcctggcacaaagaaggaagagtaagaagcctgggtagaaagacccagcgttccctgttggcagagctgcatgttctcaccgtgaaggagagtgatgcagggagatactactgtgcagctgataacgttcacagccccatcctcagcacgtggattcgagtcaccgtgagaattccggtatctcaccctgtcctcaccttcagggctcccagggcccacactgtggtgggggacctgctggagcttcactgtgagtccctgagaggctctcccccgatcctgtaccgattttatcatgaggatgtcaccctggggaacagctcagccccctctggaggaggagcctccttcaacctctctctgactgcagaacattctggaaactactcctgtgatgcagacaatggcctgggggcccagcacagtcatggagtgagtctcagggtcacagttccggtgtctcgccccgtcctcaccctcagggctcccggggcccaggctgtggtgggggacctgctggagcttcactgtgagtccctgagaggctccttcccgatcctgtactggttttatcacgaggatgacaccttggggaacatctcggcccactctggaggaggggcatccttcaacctctctctgactacagaacattctggaaactactcatgtgaggctgacaatggcctgggggcccagcacagtaaagtggtgacactcaatgttacaggaacttccaggaacagaacaggccttaccgctgcgggaatcacggggctggtgctcagcatcctcgtccttgctgctgctgctgctctgctgcattacgccagggcccgaaggaaaccaggaggactttctgccactggaacatctagtcacagtcctagtgagtgtcaggagccttcctcgtccaggccttccaggatagaccctcaagagcccactcactctaaaccactagccccaatggagctggagccaatgtacagcaatgtaaatcctggagatagcaacccgatttattcccagatctggagcatccagcatacaaaagaaaactcagctaattgtccaatgatgcatcaagagcatgaggaacttacagtcctctattcagaactgaagaagacacacccagacgactctgcaggggaggctagcagcagaggcagggcccatgaagaagatgatgaagaaaactatgagaatgtaccacgtgtattactggcctcagaccactagccccttacccagagtggcccacaggaaacagcctgcaccatttttttttctgttctctccaaccacacatcatccatctctccagactctgcctcctacgaggctgggctgcaggattctgaacccaagaaagaacaaagttcaagattttccatgtctttgtaacacttagccctgtgcaaatcagagtatgtgagtggaagaagggctccacatggctgggaaggcctcaggaaacttacagtcatggaagaagatgtaagaaaagcaaagaccttcacacggcagcaggaaacagcgagttagcaagagctgggaagactgccttacaaaaccatcaaatcttgtgagaactcactcactatcacgagaacagcatgggagaaactgcccgcataatccaatcacctcccaacaggtccctcccttgacacatgggaattatggggattacaattcaagatgagacttgagtttgagagcaaaactatatcaatggctttgcatcacataatttattacaggtgtgttctggaatagtttctataaattgatccattcttgt

SEQ ID NO: 294360 - DNA, 3086 bp, Homo sapiens
agactgcagctgaggtggaagatgagccccaacttctaaaaatgtatcactaccgggattgagatacaaacagcatttaggaaggtctcatctgagtagcagcttcctgccctccttcttggagataagtcgggcttttggtgagacagactttcccaaccctctgcccggccggtgcccatgcttctgtggctgctgctgctgatcctgactcctggaagagaacaatcaggggtggccccaaaagctgtacttctcctcaatcctccatggtccacagccttcaaaggagaaaaagtggctctcatatgcagcagcatatcacattccctagcccagggagacacatattggtatcacgatgagaagttgttgaaaataaaacatgacaagatccaaattacagagcctggaaattaccaatgtaagacccgaggatcctccctcagtgatgccgtgcatgtggaattttcacctgactggctgatcctgcaggctttacatcctgtctttgaaggagacaatgtcattctgagatgtcaggggaaagacaacaaaaacactcatcaaaaggtttactacaaggatggaaaacagcttcctaatagttataatttagagaagatcacagtgaattcagtctccagggataatagcaaatatcattgtactgcttataggaagttttacatacttgacattgaagtaacttcaaaacccctaaatatccaagttcaagagctgtttctacatcctgtgctgagagccagctcttccacgcccatagaggggagtcccatgaccctgacctgtgagacccagctctctccacagaggccagatgtccagctgcaattctccctcttcagagatagccagaccctcggattgggctggagcaggtcccccagactccagatccctgccatgtggactgaagactcagggtcttactggtgtgaggtggagacagtgactcacagcatcaaaaaaaggagcctgagatctcagatacgtgtacagagagtccctgtgtctaatgtgaatctagagatccggcccaccggagggcagctgattgaaggagaaaatatggtccttatttgctcagtagcccagggttcagggactgtcacattctcctggcacaaagaaggaagagtaagaagcctgggtagaaagacccagcgttccctgttggcagagctgcatgttctcaccgtgaaggagagtgatgcagggagatactactgtgcagctgataacgttcacagccccatcctcagcacgtggattcgagtcaccgtgagaattccggtatctcaccctgtcctcaccttcagggctcccagggcccacactgtggtgggggacctgctggagcttcactgtgagtccctgagaggctctcccccgatcctgtaccgattttatcatgaggatgtcaccctggggaacagctcagccccctctggaggaggagcctccttcaacctctctctgactgcagaacattctggaaactactcctgtgatgcagacaatggcctgggggcccagcacagtcatggagtgagtctcagggtcacagttccggtgtctcgccccgtcctcaccctcagggctcccggggcccaggctgtggtgggggacctgctggagcttcactgtgagtccctgagaggctccttcccgatcctgtactggttttatcacgaggatgacaccttggggaacatctcggcccactctggaggaggggcatccttcaacctctctctgactacagaacattctggaaactactcatgtgaggctgacaatggcctgggggcccagcacagtaaagtggtgacactcaatgttacaggaacttccaggaacagaacaggccttaccgctgcgggaatcacggggctggtgctcagcatcctcgtccttgctgctgctgctgctctgctgcattacgccagggcccgaaggaaaccaggaggactttctgccactggaacatctagtcacagtcctagtgagtgtcaggagccttcctcgtccaggccttccaggatagaccctcaagagcccactcactctaaaccactagccccaatggagctggagccaatgtacagcaatgtaaatcctggagatagcaacccgatttattcccagatctggagcatccagcatacaaaagaaaactcagaatccaacagaggaaacagtcaagagatcaagcaaatcaagaagattggcttggagtactttttctatgtgggtttggaagaatccagcagaggaaacagcaagagatcaagcaaatcaagaagattggtttggaatgcagtgtgcgtacgttgtaagttggaatatattgcccacagtttaatacttttctttgctactcctacccaacagctaattgtccaatgatgcatcaagagcatgaggtgagtcacatttcttggctttctttcctctctggccttcctctcctgtatttaggtacttaccttttgtgtttttttctaccaggaacttacagtcctctattcagaactgaagaagacacacccagacgactctgcaggggaggctagcagcagaggcagggcccatgaagaagatgatgaagaaaactatgagaatgtaccacgtgtattactggcctcagaccactagccccttacccagagtggcccacaggaaacagcctgcaccatttttttttctgttctctccaaccacacatcatccatctctccagactctgcctcctacgaggctgggctgcaggattctgaacccaagaaagaacaaagttcaagattttccatgtctttgtaacacttagccctgtgcaaatcagagtatgtgagtggaagaaggggtgagtcctaactgtacatctcggatataacaaatgtgcaaattctgattgattgccctgtaaaatgaattattctcatgcagtgctctacttgacttttatctttgaattcacaactaaaaacccatagcccagaaatctaaaaaaagtaattttagtggagcctttgaaaataaaagaccattggaaaaagtac

SEQ ID NO: 294361 - DNA, 2956 bp, Homo sapiens
agactgcagctgaggtggaagatgagccccaacttctaaaaatgtatcactaccgggattgagatacaaacagcatttaggaaggtctcatctgagtagcagcttcctgccctccttcttggagataagtcgggcttttggtgagacagactttcccaaccctctgcccggccggtgcccatgcttctgtggctgctgctgctgatcctgactcctggaagagaacaatcaggggtggccccaaaagctgtacttctcctcaatcctccatggtccacagccttcaaaggagaaaaagtggctctcatatgcagcagcatatcacattccctagcccagggagacacatattggtatcacgatgagaagttgttgaaaataaaacatgacaagatccaaattacagagcctggaaattaccaatgtaagacccgaggatcctccctcagtgatgccgtgcatgtggaattttcacctgactggctgatcctgcaggctttacatcctgtctttgaaggagacaatgtcattctgagatgtcaggggaaagacaacaaaaacactcatcaaaaggtttactacaaggatggaaaacagcttcctaatagttataatttagagaagatcacagtgaattcagtctccagggataatagcaaatatcattgtactgcttataggaagttttacatacttgacattgaagtaacttcaaaacccctaaatatccaagttcaagagatagccagaccctcggattgggctggagcaggtcccccagactccagatccctgccatgtggactgaagactcagggtcttactggtgtgaggtggagacagtgactcacagcatcaaaaaaaggagcctgagatctcagatacgtgtacagagagtccctgtgtctaatgtgaatctagagatccggcccaccggagggcagctgattgaaggagaaaatatggtccttatttgctcagtagcccagggttcagggactgtcacattctcctggcacaaagaaggaagagtaagaagcctgggtagaaagacccagcgttccctgttggcagagctgcatgttctcaccgtgaaggagagtgatgcagggagatactactgtgcagctgataacgttcacagccccatcctcagcacgtggattcgagtcaccgtgagaattccggtatctcaccctgtcctcaccttcagggctcccagggcccacactgtggtgggggacctgctggagcttcactgtgagtccctgagaggctctcccccgatcctgtaccgattttatcatgaggatgtcaccctggggaacagctcagccccctctggaggaggagcctccttcaacctctctctgactgcagaacattctggaaactactcctgtgatgcagacaatggcctgggggcccagcacagtcatggagtgagtctcagggtcacagttccggtgtctcgccccgtcctcaccctcagggctcccggggcccaggctgtggtgggggacctgctggagcttcactgtgagtccctgagaggctccttcccgatcctgtactggttttatcacgaggatgacaccttggggaacatctcggcccactctggaggaggggcatccttcaacctctctctgactacagaacattctggaaactactcatgtgaggctgacaatggcctgggggcccagcacagtaaagtggtgacactcaatgttacaggaacttccaggaacagaacaggccttaccgctgcgggaatcacggggctggtgctcagcatcctcgtccttgctgctgctgctgctctgctgcattacgccagggcccgaaggaaaccaggaggactttctgccactggaacatctagtcacagtcctagtgagtgtcaggagccttcctcgtccaggccttccaggatagaccctcaagagcccactcactctaaaccactagccccaatggagctggagccaatgtacagcaatgtaaatcctggagatagcaacccgatttattcccagatctggagcatccagcatacaaaagaaaactcagaatccaacagaggaaacagtcaagagatcaagcaaatcaagaagattggcttggagtactttttctatgtgggtttggaagaatccagcagaggaaacagcaagagatcaagcaaatcaagaagattggtttggaatgcagtgtgcgtacgttgtaagttggaatatattgcccacagtttaatacttttctttgctactcctacccaacagctaattgtccaatgatgcatcaagagcatgaggtgagtcacatttcttggctttctttcctctctggccttcctctcctgtatttaggtacttaccttttgtgtttttttctaccaggaacttacagtcctctattcagaactgaagaagacacacccagacgactctgcaggggaggctagcagcagaggcagggcccatgaagaagatgatgaagaaaactatgagaatgtaccacgtgtattactggcctcagaccactagccccttacccagagtggcccacaggaaacagcctgcaccatttttttttctgttctctccaaccacacatcatccatctctccagactctgcctcctacgaggctgggctgcaggattctgaacccaagaaagaacaaagttcaagattttccatgtctttgtaacacttagccctgtgcaaatcagagtatgtgagtggaagaaggggtgagtcctaactgtacatctcggatataacaaatgtgcaaattctgattgattgccctgtaaaatgaattattctcatgcagtgctctacttgacttttatctttgaattcacaactaaaaacccatagcccagaaatctaaaaaaagtaattttagtggagcctttgaaaataaaagaccattggaaaaagtac

SEQ ID NO: 294362 - DNA, 2109 bp, Homo sapiens
cagacctgagtccggcccgcagcctcggggccccgcgagcgcagcggggcgggaggcggggcggcccggccgtgggcggagcggcggccgcggccgtgagcctgcccccaactcgccctcagccggctggccggcgcggccatggaggtctacatcccgtcctttcgctatgaagagagcgacctggagcggggatacacggtgtttaagatagaagtgctaatgaatggaagaaaacattttgttgaaaagagatacagcgaatttcatgctttgcacaaaaagcttaagaaatgtataaaaactccagaaatcccttctaaacatgttaggaactgggtccccaaagtcttggaacagcgacgacaaggcttggaaacatacttacaggctgtcattttagaaaatgaagaacttcccaaactgtttcttgatttcctaaatgtgcgacacttgccctctctaccaaaggcagaaagttgtggatcttttgatgaaacagagtctgaagagtcaagcaaactgtcccaccagcctgtgctgctgttcctcagggatccatatgtcttgcctgcagccagcgattttccaaatgtggttattgaaggagtcctccatgggatattttaccctcatctacagcccaggtagaaatcctacatggctaaaagaagcagaagcaagtttcgaagtcacagtcaaggaaatcaatacctaccaatttaacctaaacgctatgatatataacagctctagctagtggtaaagtgcacagtcccagcttaattcagggcagggacatttccattagaatggtgctcttaaaaatagaaactgaaccggggcggtggtcaggctaaggccaagtgtttaagaagtagagtgtagctgccagcgtagaaacccatgaaaaggaggccacaggagattcctgggagcactgggtgtagcaaaacaaagccactctctgcttcagtcgcaccatttgctaattgaaaatcatatcctgaatcatactgagactgatcaactttggtagcttttttgttcagatcttatgacacactactcttctcaccgtgagattttctcagccagtgatagtacattctgaaatgctggcaccaggagacggccacagacacacactgctaaatgtgaagatggaactaaactggaaattaaattatactgacaatattatggcatttttaagatcatggcattttaatttacattagagtggagttgcatcatactcaggggttagcttccaaggtcagtacataggtaaaatgggctattaggatgatccttgaaagccctttagaagggtgccatgttggaaacctgtacatccacaacaagtagcttttcctcctatgttggaaaaaaagactgtttctttgtttgaagaccaagtgaagttgttggtgtttgtttaggggccattttgttaaaaaaaaaaaaaaaaaagcacataacttttaacactagaatcagcccgcaagatgcttgccccgctagtggcagatgtgaactgacaaggagtgaagcgcccacccagcggatggacagcacccacctgggtttactcaagggtgtgcattcattttaggtgggatcgccacaggatttcatgttattttccttacggcttccttttcactgacctcatttgttgagttaatgtaagttaaatgtgtttatgatataactccactgtacatcatcctttgagtagtaaaggataaaagcatatatactacctatatgtatgtgctgtatgtgggcatttcattgagatctaattaatagctagcctatttatggttattcgttttagtaagttctgtgggagcaaggtatttaaaatcaaaactaataactacatcatggtttttgattaggatctaaatattcaggttttaagcctgctgcaaacttttaaaatattatgatagattctgtactacatgtgggaaacaagcaagaactaaataatcaaatgttgtcaaccaaaagtaatagttgggtattggagatttttttaaaatgtttttatgttattagctatttggagttaaataaaaacagaacaaggaaaca

SEQ ID NO: 294363 - DNA, 1014 bp, Homo sapiens
cagacctgagtccggcccgcagcctcggggccccgcgagcgcagcggggcgggaggcggggcggcccggccgtgggcggagcggcggccgcggccgtgagcctgcccccaactcgccctcagccggctggccggcgcggccatggaggtctacatcccgtcctttcgctatgaagagagcgacctggagcggggatacacggtgtttaagatagaagtgctaatgaatggaagaaaacattttgttgaaaagagatacagcgaatttcatgctttgcacaaaaagcttaagaaatgtataaaaactccagaaatcccttctaaacatgttaggaactgggtccccaaagtcttggaacagcgacgacaaggcttggaaacatacttacaggctgtcattttagaaaatgaagaacttcccaaactgtttcttgatttcctaaatgtgcgacacttgccctctctaccaaaggcagaaagttgtggatcttttgatgaaacagagtctgaagagtcaagcaaactgtcccaccagcctgtgctgctgttcctcagggatccatatgtcttgcctgcagccagcggtaatcaaacctgtcatctgctaacagctctttactgatctgaccctgcaccacataaaccacgtttttaatacaggtctaacagagtgacattggtcccgggcttaataatctgccaataaaccagtgctcttggtaaaaaacagaacaacgaagaccagccaaacccgaacacgacgaacaaagcagataaaactgaatgcagcacaggcatcacaacaacagacggggcgggggcagaaaaaaacaccgaggggacgcaccaataacaacacccgctgtttcgacaaggggcccccctgggggctattaaaacgagccacggcggcgaaacacgcgggaggaaaacgacagggtctgggaagacaccctggcgcggagaagggcacaccgagaagtgaggggcgccataaaacgggctggtggacgcg

SEQ ID NO: 294364 - DNA, 554 bp, Homo sapiens
cagacctgagtccggcccgcagcctcggggccccgcgagcgcagcggggcgggaggcggggcggcccggccgtgggcggagcggcggccgcggccgtgagcctgcccccaactcgccctcagccggctggccggcgcggccatggaggtctacatcccgtcctttcgctatgaagagagcgacctggagcggggatacacggtatctcacttctcccatcagcactatcaacagtcatggagggcttaccatctttgggacattcatttaggatctgaagataaaaaggctgcttgttagaggcgttggctttcaaagaaaagatgaagttgatcttaccggttcaagctaaaagttaattacctgcagaaataagcactttgaaatagaccataattaaggctcattgcccattgttgattttcttctattagacgagctgtgtttttctcccaaagctttatgtatctttttattatttgtatttatgaccaggcatgtgccacactccaggttgtgaattaaactgatgtgacgaagaagcggggtttttg

SEQ ID NO: 294365 - DNA, 913 bp, Homo sapiens
gacggatcttcagatgagactaatgtagaggggtccacatcaggtaagttcctaaaacgagaagctgccttatccctctgttgcacggctcagggtcccatcataaagtctagagtttgctaagctgaaatgtcctctgcactcaaggacaaacggagttaagtgcaattgtttacagtccaagaaagctcgctggctggttttttcctggatggctgaggtcacttctcagtgacctacaagtcacgtccacgtttctattctgctcggtgcgctaacctaaagaagaaacccaacgtttacttgactaacttgataatcaagcctcccccgccgggacacttaatcttttaggtaccttcagcctactagaccctggtccgaggcacgggttcagtcctttttttttccgtattctatttttccctcacagttaaaaagtacttcacagttaaaggcggcattttagaactgcagcgtgaagccagagcgtttgtcttagtgaccggccaactttcgggctcactttcgagctctgtggtacaccaccattctcagattcgacgtctaactcaggagacgctgaccttcgaatcgaagggaattcggagagtcttggtataagccggctggttcaccgctgttaatgccagccgagagggaaaaaaaaaattcaaccaaccaaaacaaaagttaaaagcgccactctttctattctttgctgtctggcaatctcttaatggtggcgtctagcaaactgcaaatcaagctccagccggagtccgcagggcagggagcgccgggtgcggcccagtccccgcgcccagcgcgttggcgcgcacaccccgtttctgcagactcaggttttctggccccgcctctttcgggcccagctgatctccaccgcccgtta

SEQ ID NO: 294366 - DNA, 606 bp, Homo sapiens
cagacctgagtccggcccgcagcctcggggccccgcgagcgcagcggggcgggaggcggggcggcccggccgtgggcggagcggcggccgcggccgtgagcctgcccccaactcgccctcagccggctggccggcgcggccatggaggtctacatcccgtcctttcgctatgaagagagcgacctggagcggggatacacggtgtttaagatagaagtgctaatgaatggaagaaaacattttgttgaaaagagatacagcgaatttcatgctttgcacaaaaagcttaagaaatgtataaaaactccagaaatcccttctaaacatgttaggaactgggtccccaaagtcttggaacagcgacgacaaggcttggaaacatacttacagatgacatctttatatttggcttcaaagaaagaagacccaatttaaaggaaataaaattgagacatacctctcctgttgctagagcaacaaaattttccactgtcttgggcacaacttttccaaagaggccaatcacaattctgccaacatctttgtctccaatcctcacatcaaagaagacctgtgtgcagttgaaaggcaaagtggaaggttata

SEQ ID NO: 294367 - DNA, 385 bp, Homo sapiens
agaaaacaactcttcctgccatccaaggggcaactagtacattctggaccatgggctgtcattttagaaaatgaagaacttcccaaactgtttcttgatttcctaaatgtgcgacacttgccctctctaccaaaggcagaaagttgtggatcttttgatgaaacagagtctgaagagtcaagcaaactgtcccaccagcctgtgctgctgttcctcagggatccatatgtcttgcctgcagccagcggtaatcaaacctgtcatctgctaacagctctttactgatctgaccctgcaccacataaaccacgtttttaatacaggtctaacagagtgacattggtcccgggcttaataatctgccaataaaccagtgctcttggta

SEQ ID NO: 294368 - DNA, 2129 bp, Homo sapiens
cagacctgagtccggcccgcagcctcggggccccgcgagcgcagcggggcgggaggcggggcggcccggccgtgggcggagcggcggccgcggccgtgagcctgcccccaactcgccctcagccggctggccggcgcggccatggaggtctacatcccgtcctttcgctatgaagagagcgacctggagcggggatacacggtgtttaagatagaagtgctaatgaatggaagaaaacattttgttgaaaagagatacagcgaatttcatgctttgcacaaaaagcttaagaaatgtataaaaactccagaaatcccttctaaacatgttaggaactgggtccccaaagtcttggaacagcgacgacaaggcttggaaacatacttacaggctgtcattttagaaaatgaagaacttcccaaactgtttcttgatttcctaaatgtgcgacacttgccctctctaccaaaggcagaaagttgtggatcttttgatgaaacagagtctgaagagtcaagcaaactgtcccaccagcctgtgctgctgttcctcagggatccatatgtcttgcctgcagccagcgattttccaaatgtggttattgaaggagtcctccatgggatattttaccctcatctacagcccaggtagaaatcctacatggctaaaagaagcagaagcaagtttcgaagtcacagtcaaggaaatcaatacctaccaatttaacctaaacgctatgatatataacagctctagctagtggtaaagtgcacagtcccagcttaattcagggcagggacatttccattagaatggtgctcttaaaaatagaaactgaaccggggcggtggtcaggctaaggccaagtgtttaagaagtagagtgtagctgccagcgtagaaacccatgaaaaggaggccacaggagattcctgggagcactgggtgtagcaaaacaaagccactctctgcttcagtcgcaccatttgctaattgaaaatcatatcctgaatcatactgagactgatcaactttggtagcttttttgttcagatcttatgacacactactcttctcaccgtgagattttctcagccagtgatagtacattctgaaatgctggcaccaggagacggccacagacacacactgctaaatgtgaagatggaactaaactggaaattaaattatactgacaatattatggcatttttaagatcatggcattttaatttacattagagtggagttgcatcatactcaggggttagcttccaaggtcagtacataggtaaaatgggctattaggatgatccttgaaagccctttagaagggtgccatgttggaaacctgtacatccacaacaagtagcttttcctcctatgttggaaaaaaagactgtttctttgtttgaagaccaagtgaagttgttggtgtttgtttaggggccattttgttaaaaaaaaaaaaaaaaaagcacataacttttaacactagaatcagcccgcaagatgcttgccccgctagtggcagatgtgaactgacaaggagtgaagcgcccacccagcggatggacagcacccacctgggtttactcaagggtgtgcattcattttaggtgggatcgccacaggatttcatgttattttccttacggcttccttttcactgacctcatttgttgagttaatgtaagttaaatgtgtttatgatataactccactgtacatcatcctttgagtagtaaaggataaaagcatatatactacctatatgtatgtgctgtatgtgggcatttcattgagatctaattaatagctagcctatttatggttattcgttttagtaagttctgtgggagcaaggtatttaaaatcaaaactaataactacatcatggtttttgattaggatctaaatattcaggttttaagcctgctgcaaacttttaaaatattatgatagattctgtactacatgtgggaaacaagcaagaactaaataatcaaatgttgtcaaccaaaagtaatagttgggtattggagatttttttaaaatgtttttatgttattagctatttggagttaaataaaaacagaacaaggaaacaaaaaaaacacacaaacaaag

SEQ ID NO: 294369 - DNA, 2050 bp, Homo sapiens
cagacctgagtccggcccgcagcctcggggccccgcgagcgcagcggggcgggaggcggggcggcccggccgtgggcggagcggcggccgcggccgtgagcctgcccccaactcgccctcagccggctggccggcgcggccatggaggtctacatcccgtcctttcgctatgaagagagcgacctggagcggggatacacggtgtttaagatagaagtgctaatgaatggaagaaaacattttgttgaaaagagatacagcgaatttcatgctttgcacaaaaagcttaagaaatgtataaaaactccagaaatcccttctaaacatgttaggaactgggtccccaaagtcttggaacagcgacgacaaggcttggaaacatacttacaggctgtcattttagaaaatgaagaacttcccaaactgtttcttgatttcctaaatgtgcgacacttgccctctctaccaaaggcagaaagttgtggatcttttgatgaaacagagtctgaagagtcaagcaaactgtcccaccagcctgtgctgctgttcctcagggatccatatgtcttgcctgcagccagcgattttccaaatgtggttattgaaggagtcctccatgggatattttaccctcatctacagcccaggtagaaatcctacatggctaaaagaagcagaagcaagtttcgaagtcacagtcaaggaaatcaatacctaccaatttaacctaaacgctatgatatataacagctctagctagtggtaaagtgcacagtcccagcttaattcagggcagggacatttccattagaatggtgctcttaaaaatagaaactgaaccggggcggtggtcaggctaaggccaagtgtttaagaagtagagtgtagctgccagcgtagaaacccatgaaaaggaggccacaggagattcctgggagcactgggtgtagcaaaacaaagccactctctgcttcagtcgcaccatttgctaattgaaaatcatatcctgaatcatactgagactgatcaactttggtagcttttttgttcagatcttatgacacactactcttctcaccgtgagattttctcagccagtgatagtacattctgaaatgctggcaccaggagacggccacagacacacactgctaaatgtgaagatggaactaaactggaaattaaattatactgacaatattatggcatttttaagatcatggcattttaatttacattagagtggagttgcatcatactcaggggttagcttccaaggtcagtacataggtaaaatgggctattaggatgatccttgaaagccctttagaagggtgccatgttggaaacctgtacatccacaacaagtagcttttcctcctatgttggaaaaaaagactgtttctttgtttgaagaccaagtgaagttgttggtgtttgtttaggggccattttgttaaaaaaaaaaaaaaaaaagcacataacttttaacactagaatcagcccgcaagatgcttgccccgctagtggcagatgtgaactgacaaggagtgaagcgcccacccagcggatggacagcacccacctgggtttactcaagggtgtgcattcattttaggtgggatcgccacaggatttcatgttattttccttacggcttccttttcactgacctcatttgttgagttaatgtaagttaaatgtgtttatgatataactccactgtacatcatcctttgagtagtaaaggataaaagcatatatactacctatatgtatgtgctgtatgtgggcatttcattgagatctaattaatagctagcctatttatggttattcgttttagtaagttctgtgggagcaaggtatttaaaatcaaaactaataactacatcatggtttttgattaggatctaaatattcaggttttaagcctgctgcaaacttttaaaatattatgatagattctgtactacatgtgggaaacaagcaagaactaaataatcaaatgttgtcaaccgcatcacccgttcggggttcctctagagcc

SEQ ID NO: 294370 - DNA, 1768 bp, Homo sapiens
cagacctgagtccggcccgcagcctcggggccccgcgagcgcagcggggcgggaggcggggcggcccggccgtgggcggagcggcggccgcggccgtgagcctgcccccaactcgccctcagccggctggccggcgcggccatggaggtctacatcccgtcctttcgctatgaagagagcgacctggagcggggatacacggtgtttaagatagaagtgctaatgaatggaagaaaacattttgttgaaaagagatacagcgaatttcatgctttgcacaaaaagcttaagaaatgtataaaaactccagaaatcccttctaaacatgttaggaactgggtccccaaagtcttggaacagcgacgacaaggcttggaaacatacttacaggctgtcattttagaaaatgaagaacttcccaaactgtttcttgatttcctaaatgtgcgacacttgccctctctaccaaaggcagaaagttgtggatcttttgatgaaacagagtctgaagagtcaagcaaactgtcccaccagcctgtgctgctgttcctcagggatccatatgtcttgcctgcagccagcgattttccaaatgtggttattgaaggagtcctccatgggatattttaccctcatctacagcccaggtagaaatcctacatggctaaaagaagcagaagcaagtttcgaagtcacagtcaaggaaatcaatacctaccaatttaacctaaacgctatgatatataacagctctagctagtggtaaagtgcacagtcccagcttaattcagggcagggacatttccattagaatggtgctcttaaaaatagaaactgaaccggggcggtggtcaggctaaggccaagtgtttaagaagtagagtgtagctgccagcgtagaaacccatgaaaaggaggccacaggagattcctgggagcactgggtgtagcaaaacaaagccactctctgcttcagtcgcaccatttgctaattgaaaatcatatcctgaatcatactgagactgatcaactttggtagcttttttgttcagatcttatgacacactactcttctcaccgtgagattttctcagccagtgatagtacattctgaaatgctggcaccaggagacggccacagacacacactgctaaatgtgaagatggaactaaactggaaattaaattatactgacaatattatggcatttttaagatcatggcattttaatttacattagagtggagttgcatcatactcaggggttagcttccaaggtcagtacataggtaaaatgggctattaggatgatccttgaaagccctttagaagggtgccatgttggaaacctgtacatccacaacaagtagcttttcctcctatgttggaaaaaaagactgtttctttgtttgaagaccaagtgaagttgttggtgtttgtttaggggccattttgttaaaaaaaaaaaaaaaaaagcacataacttttaacactagaatcagcccgcaagatgcttgccccgctagtggcagatgtgaactgacaaggagtgaagcgcccacccagcggatggacagcacccacctgggtttactcaagggtgtgcattcattttaggtgggatcgccacaggatttcatgttattttccttacggcttccttttcactgacctcatttgttgagttaatgtaagttaaatgtgtttatgatataactccactgtacatcatcctttgagtagtaaaggataaaagcatatatacta

SEQ ID NO: 294371 - DNA, 3412 bp, Homo sapiens
  misc_feature (1697)..(1697): n is a, c, g, or t
aaattattgttttttattgggctctaaatatacatgtgtaaggcctatcacacgctttcaaagatatatttcatgaaaaaccattacttcatgttggggaaaggcatgcactaaaaaaatcaagtgtcatcaaccagaaataactggatattcatgtattagagattttctaagatatagtttgtgtgttcattcgcttgtctccccaatttttaaaacagcctataaggtagatactattatgaaatccatttcacagttgaggaaagagagagacagagatgttcaataactcacctaaggtcacacaggtattaagtggtcgatccaggaaacagaggcctctcaataaatatatgttgaggtaaacttgtcaccacattctatcacttacttgacttcccctttggcaagtctcacgggtgcctcaaacacaagttccagacagagttgatgatcttctattttactcctcttctgggtcttctcccaccaccctctgattatgcaagccagaaacccaggaggcatccttgacttcaccccttccctcactagccacatctaacctgtcacttggtcccgtccttcatttctctagaattcctccatggttctccatcctcaacctcgtttgggctgccaccattgccctctcgaactactgcagtagtctccaaactgatcttgtgtctgctttgaacttctccagtccattctccagctggcagccagaatcatctttttcaaaacacagttcaactctgtcccactctgcttaaactccctcagtagcttcccattgagtttcagataaagcccaaactcctatccattcttcccaggtgtgatggggcaccccgtgccctccagcctcctcattcccacttttctcactatgttggctttcgtttaggtctctgaaccctccaggctccctctggccacagacttgccacctggctagctccctctgcctacccctagcctctgagagcctttctgcctcctctgatgaggcccaatcccctagtaaatgattttatttacacagtagacaatagaggctagatgcatattttttttcttaaaatattggactacttttattttcttacataataatgatatttatttaaagtgctttaggatagttcctggatatcattatgtacagattaaagtttaaaaattaaacttctgaaccatgagatagattggttcccattcaagtaatccattcacattttacctactgtaatgactggaatgtgctgtaacatactttgcacccctggcctcccttcctgtctcctataataatggagctgtgttttcaagtttggcaggatggcttctgttggaaatttgcccttttaagttaggaagactgacccccatcttactgctctctttcgaagctagtctaatggaacaagtagactcaggacaacttggactaaatgcactgtaaaccacaatggaaaaactgcagtgaggtattcccagtagaaatcttggaattccttcaagtatattgagattttgttagaaattgaattgccagtgtaatccatcttccttttgagaaaacattcagataaagagctgaggcctagcagcattaactgttagaacatcccttaaatcaataagctacaaatctggccgcacattcctgccgcgcctggtggtgngctcaagtggctttaggctgaagcagcatgactgatagcacatcctcaaccaggcacatgcctggcgatgcagattcctgtgtttaccgtaagcattgccttgttccattctacagaatgcaattatattttgtttcacataagaaaagcagtttttcttttttttttctttttttttctttttttcagattttccaaatgtggttattgaaggagtcctccatgggatattttaccctcatctacagcccaggtagaaatcctacatggctaaaagaagcagaagcaagtttcgaagtcacagtcaaggaaatcaatacctaccaatttaacctaaacgctatgatatataacagctctagctagtggtaaagtgcacagtcccagcttaattcagggcagggacatttccattagaatggtgctcttaaaaatagaaactgaaccggggcggtggtcaggctaaggccaagtgtttaagaagtagagtgtagctgccagcgtagaaacccatgaaaaggaggccacaggagattcctgggagcactgggtgtagcaaaacaaagccactctctgcttcagtcgcaccatttgctaattgaaaatcatatcctgaatcatactgagactgatcaactttggtagcttttttgttcagatcttatgacacactactcttctcaccgtgagattttctcagccagtgatagtacattctgaaatgctggcaccaggagacggccacagacacacactgctaaatgtgaagatggaactaaactggaaattaaattatactgacaatattatggcatttttaagatcatggcattttaatttacattagagtggagttgcatcatactcaggggttagcttccaaggtcagtacataggtaaaatgggctattaggatgatccttgaaagccctttagaagggtgccatgttggaaacctgtacatccacaacaagtagcttttcctcctatgttggaaaaaaagactgtttctttgtttgaagaccaagtgaagttgttggtgtttgtttaggggccattttgttaaaaaaaaaaaaaaaaaagcacataacttttaacactagaatcagcccgcaagatgcttgccccgctagtggcagatgtgaactgacaaggagtgaagcgcccacccagcggatggacagcacccacctgggtttactcaagggtgtgcattcattttaggtgggatcgccacaggatttcatgttattttccttacggcttccttttcactgacctcatttgttgagttaatgtaagttaaatgtgtttatgatataactccactgtacatcatcctttgagtagtaaaggataaaagcatatatactacctatatgtatgtgctgtatgtgggcatttcattgagatctaattaatagctagcctatttatggttattcgttttagtaagttctgtgggagcaaggtatttaaaatcaaaactaataactacatcatggtttttgattaggatctaaatattcaggttttaagcctgctgcaaacttttaaaatattatgatagattctgtactacatgtgggaaacaagcaagaactaaataatcaaatgttgtcaaccaaaagtaatagttgggtattggagatttttttaaaatgtttttatgttattagctatttggagttaaataaaaacagaacaaggaaaca

SEQ ID NO: 294372 - DNA, 1978 bp, Homo sapiens
  misc_feature (21)..(21): n is a, c, g, or t
taggcaggtacgaggccgggngatcccgtcctttcgctatgaagagagcgacctggagcggggatacacggtgtttaagatagaagtgctaatgaatggaagaaaacattttgttgaaaagagatacagcgaatttcatgctttgcacaaaaagcttaagaaatgtataaaaactccagaaatcccttctaaacatgttaggaactgggtccccaaagtcttggaacagcgacgacaaggcttggaaacatacttacaggctgtcattttagaaaatgaagaacttcccaaactgtttcttgatttcctaaatgtgcgacacttgccctctctaccaaaggcagaaagttgtggatcttttgatgaaacagagtctgaagagtcaagcaaactgtcccaccagcctgtgctgctgttcctcagggatccatatgtcttgcctgcagccagcgattttccaaatgtggttattgaaggagtcctccatgggatattttaccctcatctacagcccaggtagaaatcctacatggctaaaagaagcagaagcaagtttcgaagtcacagtcaaggaaatcaatacctaccaatttaacctaaacgctatgatatataacagctctagctagtggtaaagtgcacagtcccagcttaattcagggcagggacatttccattagaatggtgctcttaaaaatagaaactgaaccggggcggtggtcaggctaaggccaagtgtttaagaagtagagtgtagctgccagcgtagaaacccatgaaaaggaggccacaggagattcctgggagcactgggtgtagcaaaacaaagccactctctgcttcagtcgcaccatttgctaattgaaaatcatatcctgaatcatactgagactgatcaactttggtagcttttttgttcagatcttatgacacactactcttctcaccgtgagattttctcagccagtgatagtacattctgaaatgctggcaccaggagacggccacagacacacactgctaaatgtgaagatggaactaaactggaaattaaattatactgacaatattatggcatttttaagatcatggcattttaatttacattagagtggagttgcatcatactcaggggttagcttccaaggtcagtacataggtaaaatgggctattaggatgatccttgaaagccctttagaagggtgccatgttggaaacctgtacatccacaacaagtagcttttcctcctatgttggaaaaaaagactgtttctttgtttgaagaccaagtgaagttgttggtgtttgtttaggggccattttgttaaaaaaaaaaaaaaaaaagcacataacttttaacactagaatcagcccgcaagatgcttgccccgctagtggcagatgtgaactgacaaggagtgaagcgcccacccagcggatggacagcacccacctgggtttactcaagggtgtgcattcattttaggtgggatcgccacaggatttcatgttattttccttacggcttccttttcactgacctcatttgttgagttaatgtaagttaaatgtgtttatgatataactccactgtacatcatcctttgagtagtaaaggataaaagcatatatactacctatatgtatgtgctgtatgtgggcatttcattgagatctaattaatagctagcctatttatggttattcgttttagtaagttctgtgggagcaaggtatttaaaatcaaaactaataactacatcatggtttttgattaggatctaaatattcaggttttaagcctgctgcaaacttttaaaatattatgatagattctgtactacatgtgggaaacaagcaagaactaaataatcaaatgttgtcaaccaaaagtaatagttgggtattggagatttttttaaaatgtttttatgttattagctatttggagttaaataaaaacagaacaaggaaaca

SEQ ID NO: 294373 - DNA, 2072 bp, Homo sapiens
  misc_feature (21)..(21): n is a, c, g, or t
taggcaggtacgaggccgggngatcccgtcctttcgctatgaagagagcgacctggagcggggatacacggtgagggtcttgcagtgttgcccaggcaggccctgaactcctggtctcaagcgatcctaccgcttcagcctcccaagatgctggcattacagccgtgtttaagatagaagtgctaatgaatggaagaaaacattttgttgaaaagagatacagcgaatttcatgctttgcacaaaaagcttaagaaatgtataaaaactccagaaatcccttctaaacatgttaggaactgggtccccaaagtcttggaacagcgacgacaaggcttggaaacatacttacaggctgtcattttagaaaatgaagaacttcccaaactgtttcttgatttcctaaatgtgcgacacttgccctctctaccaaaggcagaaagttgtggatcttttgatgaaacagagtctgaagagtcaagcaaactgtcccaccagcctgtgctgctgttcctcagggatccatatgtcttgcctgcagccagcgattttccaaatgtggttattgaaggagtcctccatgggatattttaccctcatctacagcccaggtagaaatcctacatggctaaaagaagcagaagcaagtttcgaagtcacagtcaaggaaatcaatacctaccaatttaacctaaacgctatgatatataacagctctagctagtggtaaagtgcacagtcccagcttaattcagggcagggacatttccattagaatggtgctcttaaaaatagaaactgaaccggggcggtggtcaggctaaggccaagtgtttaagaagtagagtgtagctgccagcgtagaaacccatgaaaaggaggccacaggagattcctgggagcactgggtgtagcaaaacaaagccactctctgcttcagtcgcaccatttgctaattgaaaatcatatcctgaatcatactgagactgatcaactttggtagcttttttgttcagatcttatgacacactactcttctcaccgtgagattttctcagccagtgatagtacattctgaaatgctggcaccaggagacggccacagacacacactgctaaatgtgaagatggaactaaactggaaattaaattatactgacaatattatggcatttttaagatcatggcattttaatttacattagagtggagttgcatcatactcaggggttagcttccaaggtcagtacataggtaaaatgggctattaggatgatccttgaaagccctttagaagggtgccatgttggaaacctgtacatccacaacaagtagcttttcctcctatgttggaaaaaaagactgtttctttgtttgaagaccaagtgaagttgttggtgtttgtttaggggccattttgttaaaaaaaaaaaaaaaaaagcacataacttttaacactagaatcagcccgcaagatgcttgccccgctagtggcagatgtgaactgacaaggagtgaagcgcccacccagcggatggacagcacccacctgggtttactcaagggtgtgcattcattttaggtgggatcgccacaggatttcatgttattttccttacggcttccttttcactgacctcatttgttgagttaatgtaagttaaatgtgtttatgatataactccactgtacatcatcctttgagtagtaaaggataaaagcatatatactacctatatgtatgtgctgtatgtgggcatttcattgagatctaattaatagctagcctatttatggttattcgttttagtaagttctgtgggagcaaggtatttaaaatcaaaactaataactacatcatggtttttgattaggatctaaatattcaggttttaagcctgctgcaaacttttaaaatattatgatagattctgtactacatgtgggaaacaagcaagaactaaataatcaaatgttgtcaaccaaaagtaatagttgggtattggagatttttttaaaatgtttttatgttattagctatttggagttaaataaaaacagaacaaggaaaca

SEQ ID NO: 294374 - DNA, 2146 bp, Homo sapiens
tgattctggaaatcgctttttcaaatggaagacttacatatcaggtgttttcttccattcattagcacttctatcttaaacacctgatatgtaagtcttccatatcaggtgtttaagatagaagtgctaatgaatggaagaaaacattttgttgaaaagagatacagcgaatttcatgctttgcacaaaaagcttaagaaatgtataaaaactccagaaatcccttctaaacatgttaggaactgggtccccaaagtcttggaacagcgacgacaaggcttggaaacatacttacaggagaaagtaaacacatacacacacatggatggagagagggacagagggatggacggatgaatgcattggtagatgggaaaacgcttagagagtgatacgctatttcgattctatctcactatattctaaggctgtcattttagaaaatgaagaacttcccaaactgtttcttgatttcctaaatgtgcgacacttgccctctctaccaaaggcagaaagttgtggatcttttgatgaaacagagtctgaagagtcaagcaaactgtcccaccagcctgtgctgctgttcctcagggatccatatgtcttgcctgcagccagcgattttccaaatgtggttattgaaggagtcctccatgggatattttaccctcatctacagcccaggtagaaatcctacatggctaaaagaagcagaagcaagtttcgaagtcacagtcaaggaaatcaatacctaccaatttaacctaaacgctatgatatataacagctctagctagtggtaaagtgcacagtcccagcttaattcagggcagggacatttccattagaatggtgctcttaaaaatagaaactgaaccggggcggtggtcaggctaaggccaagtgtttaagaagtagagtgtagctgccagcgtagaaacccatgaaaaggaggccacaggagattcctgggagcactgggtgtagcaaaacaaagccactctctgcttcagtcgcaccatttgctaattgaaaatcatatcctgaatcatactgagactgatcaactttggtagcttttttgttcagatcttatgacacactactcttctcaccgtgagattttctcagccagtgatagtacattctgaaatgctggcaccaggagacggccacagacacacactgctaaatgtgaagatggaactaaactggaaattaaattatactgacaatattatggcatttttaagatcatggcattttaatttacattagagtggagttgcatcatactcaggggttagcttccaaggtcagtacataggtaaaatgggctattaggatgatccttgaaagccctttagaagggtgccatgttggaaacctgtacatccacaacaagtagcttttcctcctatgttggaaaaaaagactgtttctttgtttgaagaccaagtgaagttgttggtgtttgtttaggggccattttgttaaaaaaaaaaaaaaaaaagcacataacttttaacactagaatcagcccgcaagatgcttgccccgctagtggcagatgtgaactgacaaggagtgaagcgcccacccagcggatggacagcacccacctgggtttactcaagggtgtgcattcattttaggtgggatcgccacaggatttcatgttattttccttacggcttccttttcactgacctcatttgttgagttaatgtaagttaaatgtgtttatgatataactccactgtacatcatcctttgagtagtaaaggataaaagcatatatactacctatatgtatgtgctgtatgtgggcatttcattgagatctaattaatagctagcctatttatggttattcgttttagtaagttctgtgggagcaaggtatttaaaatcaaaactaataactacatcatggtttttgattaggatctaaatattcaggttttaagcctgctgcaaacttttaaaatattatgatagattctgtactacatgtgggaaacaagcaagaactaaataatcaaatgttgtcaaccaaaagtaatagttgggtattggagatttttttaaaatgtttttatgttattagctatttggagttaaataaaaacagaacaaggaaaca

SEQ ID NO: 294375 - DNA, 2239 bp, Homo sapiens
cagacctgagtccggcccgcagcctcggggccccgcgagcgcagcggggcgggaggcggggcggcccggccgtgggcggagcggcggccgcggccgtgagcctgcccccaactcgccctcagccggctggccggcgcggccatggaggtctacatcccgtcctttcgctatgaagagagcgacctggagcggggatacacggtgtttaagatagaagtgctaatgaatggaagaaaacattttgttgaaaagagatacagcgaatttcatgctttgcacaaaaagcttaagaaatgtataaaaactccagaaatcccttctaaacatgttaggaactgggtccccaaagtcttggaacagcgacgacaaggcttggaaacatacttacaggagaaagtaaacacatacacacacatggatggagagagggacagagggatggacggatgaatgcattggtagatgggaaaacgcttagagagtgatacgctatttcgattctatctcactatattctaaggctgtcattttagaaaatgaagaacttcccaaactgtttcttgatttcctaaatgtgcgacacttgccctctctaccaaaggcagaaagttgtggatcttttgatgaaacagagtctgaagagtcaagcaaactgtcccaccagcctgtgctgctgttcctcagggatccatatgtcttgcctgcagccagcgattttccaaatgtggttattgaaggagtcctccatgggatattttaccctcatctacagcccaggtagaaatcctacatggctaaaagaagcagaagcaagtttcgaagtcacagtcaaggaaatcaatacctaccaatttaacctaaacgctatgatatataacagctctagctagtggtaaagtgcacagtcccagcttaattcagggcagggacatttccattagaatggtgctcttaaaaatagaaactgaaccggggcggtggtcaggctaaggccaagtgtttaagaagtagagtgtagctgccagcgtagaaacccatgaaaaggaggccacaggagattcctgggagcactgggtgtagcaaaacaaagccactctctgcttcagtcgcaccatttgctaattgaaaatcatatcctgaatcatactgagactgatcaactttggtagcttttttgttcagatcttatgacacactactcttctcaccgtgagattttctcagccagtgatagtacattctgaaatgctggcaccaggagacggccacagacacacactgctaaatgtgaagatggaactaaactggaaattaaattatactgacaatattatggcatttttaagatcatggcattttaatttacattagagtggagttgcatcatactcaggggttagcttccaaggtcagtacataggtaaaatgggctattaggatgatccttgaaagccctttagaagggtgccatgttggaaacctgtacatccacaacaagtagcttttcctcctatgttggaaaaaaagactgtttctttgtttgaagaccaagtgaagttgttggtgtttgtttaggggccattttgttaaaaaaaaaaaaaaaaaagcacataacttttaacactagaatcagcccgcaagatgcttgccccgctagtggcagatgtgaactgacaaggagtgaagcgcccacccagcggatggacagcacccacctgggtttactcaagggtgtgcattcattttaggtgggatcgccacaggatttcatgttattttccttacggcttccttttcactgacctcatttgttgagttaatgtaagttaaatgtgtttatgatataactccactgtacatcatcctttgagtagtaaaggataaaagcatatatactacctatatgtatgtgctgtatgtgggcatttcattgagatctaattaatagctagcctatttatggttattcgttttagtaagttctgtgggagcaaggtatttaaaatcaaaactaataactacatcatggtttttgattaggatctaaatattcaggttttaagcctgctgcaaacttttaaaatattatgatagattctgtactacatgtgggaaacaagcaagaactaaataatcaaatgttgtcaaccaaaagtaatagttgggtattggagatttttttaaaatgtttttatgttattagctatttggagttaaataaaaacagaacaaggaaaca

SEQ ID NO: 294376 - DNA, 1184 bp, Homo sapiens
tcccctagttttagaagttcaatagcaaaacaaagccactctctgcttcagtcgcaccatttgctaattgaaaatcatatcctgaatcatactgagactgatcaactttggtagcttttttgttcagatcttatgacacactactcttctcaccgtgagattttctcagccagtgatagtacattctgaaatgctggcaccaggagacggccacagacacacactgctaaatgtgaagatggaactaaactggaaattaaattatactgacaatattatggcatttttaagatcatggcattttaatttacattagagtggagttgcatcatactcaggggttagcttccaaggtcagtacataggtaaaatgggctattaggatgatccttgaaagccctttagaagggtgccatgttggaaacctgtacatccacaacaagtagcttttcctcctatgttggaaaaaaagactgtttctttgtttgaagaccaagtgaagttgttggtgtttgtttaggggccattttgttaaaaaaaaaaaaaaaaaagcacataacttttaacactagaatcagcccgcaagatgcttgccccgctagtggcagatgtgaactgacaaggagtgaagcgcccacccagcggatggacagcacccacctgggtttactcaagggtgtgcattcattttaggtgggatcgccacaggatttcatgttattttccttacggcttccttttcactgacctcatttgttgagttaatgtaagttaaatgtgtttatgatataactccactgtacatcatcctttgagtagtaaaggataaaagcatatatactacctatatgtatgtgctgtatgtgggcatttcattgagatctaattaatagctagcctatttatggttattcgttttagtaagttctgtgggagcaaggtatttaaaatcaaaactaataactacatcatggtttttgattaggatctaaatattcaggttttaagcctgctgcaaacttttaaaatattatgatagattctgtactacatgtgggaaacaagcaagaactaaataatcaaatgttgtcaaccaaaagtaatagttgggtattggagatttttttaaaatgtttttatgttattagctatttggagttaaataaaaacagaacaaggaaaca

SEQ ID NO: 294377 - DNA, 721 bp, Homo sapiens
cagacctgagtccggcccgcagcctcggggccccgcgagcgcagcggggcgggaggcggggcggcccggccgtgggcggagcggcggccgcggccgtgagcctgcccccaactcgccctcagccggctggccggcgcggccatggaggtctacatcccgtcctttcgctatgaagagagcgacctggagcggggatacacggtgtttaagatagaagtgctaatgaatggaagaaaacattttgttgaaaagagatacagcgaatttcatgctttgcacaaaaagcttaagaaatgtataaaaactccagaaatcccttctaaacatgttaggaactgggtccccaaagtcttggaacagcgacgacaaggcttggaaacatacttacaggctgtcattttagaaaatgaagaacttcccaaactgtttcttgatttcctaaatgtgcgacacttgccctctctaccaaaggcagaaagttgtggatcttttgatgaaacagagtctgaagagtcaagcaaactgtcccaccagcctgtgctgctgttcctcagggatccatatgtcttgcctgcagccagcggtaatcaaacctgtcatctgctaacagctctttactgatctgaccctgcaccacataaaccacgtttttaatacaggtctaacagagtgacattggtcccgggcttaataatctgccaataaaccagtgctcttggta

SEQ ID NO: 294378 - DNA, 851 bp, Homo sapiens
cagacctgagtccggcccgcagcctcggggccccgcgagcgcagcggggcgggaggcggggcggcccggccgtgggcggagcggcggccgcggccgtgagcctgcccccaactcgccctcagccggctggccggcgcggccatggaggtctacatcccgtcctttcgctatgaagagagcgacctggagcggggatacacggtgtttaagatagaagtgctaatgaatggaagaaaacattttgttgaaaagagatacagcgaatttcatgctttgcacaaaaagcttaagaaatgtataaaaactccagaaatcccttctaaacatgttaggaactgggtccccaaagtcttggaacagcgacgacaaggcttggaaacatacttacaggagaaagtaaacacatacacacacatggatggagagagggacagagggatggacggatgaatgcattggtagatgggaaaacgcttagagagtgatacgctatttcgattctatctcactatattctaaggctgtcattttagaaaatgaagaacttcccaaactgtttcttgatttcctaaatgtgcgacacttgccctctctaccaaaggcagaaagttgtggatcttttgatgaaacagagtctgaagagtcaagcaaactgtcccaccagcctgtgctgctgttcctcagggatccatatgtcttgcctgcagccagcggtaatcaaacctgtcatctgctaacagctctttactgatctgaccctgcaccacataaaccacgtttttaatacaggtctaacagagtgacattggtcccgggcttaataatctgccaataaaccagtgctcttggta

SEQ ID NO: 294379 - DNA, 648 bp, Homo sapiens
ttctttgctgtctggcaatctcttaatggtggcgtctagcaaactgcaaatcaagctccagccggagtccgcagggcagggagcgccgggtgcggcccagtccccgcgcccagcgcgttggcgcgcacaccccgtttctgcagactcaggttttctggccccgcctctttcgggcccagctgatctccaccgcccgttaggcccgaaacccaggcgcctggagccctgcgccctctgcttccggcccccggcacgcccagggcgcgggagcggccgggtcagcccgcagacctgagtccggcccgcagcctcggggccccgcgagcgcagcggggcgggaggcggggcggcccggccgtgggcggagcggcggccgcggccgtgagcctgcccccaactcgccctcagccggctggccggcgcggccatggaggtctacatcccgtcctttcgctatgaagagagcgacctggagcggggatacacggtaggcgcgggccgcgggcggacagggccccgcgagccaggcctgcggctgctgcgcccaggaaacacccttggccgccgccgccttggcgcagggggtcccctcgttttctctcccctcccccggcccagaggaagggctgcgcccttggcgcggttgtc

SEQ ID NO: 294380 - DNA, 168 bp, Homo sapiens
cttaagaaatgtataaaaactccagaaatcccttctaaacatgttaggaactgggtccccaaagtcttggaacagcgacgacaaggcttggaaacatacttacaggtaagatatgtttagatcctcattttatataacataaataatcatatgtcttaccactttttc

SEQ ID NO: 294381 - DNA, 1688 bp, Homo sapiens
  misc_feature (162)..(162): n is a, c, g, or t
aatacttttgatcacttccatttgcctgcaaagccagaaacttctctcaagaagattatagctgagtatgtaaaacaaaatatatgtacaactgtaataccaacaagcacagtggtaagttataacaagatatacgaagtaatagaaattaagaagtgagantatcttcaggcgaaggcaactgggaagctggagctcaaagtttaaggctgtgttaaaacacaacctaaagttcccagtagaagcttgctatagacttttggtggctctgagaattcccctggtcacctcagtgtgaggggtgggtgattcttaacctctggtgggttttgttgcagtttagctgctgtggagggatttcctacaaggactggtctcagaacatgtatttcaactgctcagaagacaaccccagtcgagagcgctgctctgtgccttactcctgttgcttgcctactcctgaccaggcagtgatcaacactatgtgtggccaaggtatgcaggcctttgactacttggaagctagcaaagtcatctacaccaatggctgtattgacaagttggtcaactggatacacagcaacctattcttacttggtggtgtggctctaggcctggccatcccccagctggtgggaattctgctgtcccagatcctagtgaatcagatcaaagatcagatcaagctacagctctacaaccagcagcaccgggctgacccatggtactgagaatccatcctgcacctcctcaccatggaaactggcaagcctcataaacgaacagcagtgggtgctgaaagcagcaccaaatggagatttggattccagccccccagtgacagcccagtgggaagaagcaaactccagatgggcagaaggcagggtgcacaggtggctccagtctcaggaggatgcgcctcctctcccccatcccagccctcagcattgtgccagagtgatacccttaagtgtttgggtttatgttttcagttttgtttgggaaacagcagttgcacagagagttgggggtactgctgctgccttttcaccgaggcactgccaccaccagctctagcagggatgctcctgagcttggcggacatacttagatcctaacgtgccagtgagacctggctgtggagagtagcactggcagccctgcctggactccacttggcatgataccagctccagaagggaagggagtggagcaggcagtgaggagagagcctgggggtcggctggggacagccgtatgtgctaggtaggagtggagggagatatgtttaccaaatgcctgtcctgccatcctcccaggtagtcagagtgagctacatcctgccccgccttcatttccatggaaacatggcagctaggacacggggtacaacagcagccaaattcttccccacctcccttacttcgaaaaaaagtttggaaccctggtccctatactctgcagtcagaagtgggactgagccatacatgcccttgaattcctccctgtctggccctccctctccagcaagcagggttttctttaacttggcagtgtgcagaggagaagtggtaacacccccaccccattcccctgcatcggagctcagtattcctacagggtaagaggtaggaatcttgctgggacgaggggagccagaagtggcaataaaagcgtgttgacctggg

SEQ ID NO: 294382 - DNA, 2028 bp, Homo sapiens
tcgcgctgcccaccgcggctcagcagctccaggcgcggttccccggcccgcgccgctcccggccccccggctcgggcgcctcccgccgcagcgcaggctcccccgccggccgggctcctgcgcggcgcggctcggctcatgcccccgggcgcggggcacacaggccggccggcagccgctgggaaataggcccccgggggcggtggcggcggcggggccatggcgcggagaccccgggcgccggccgcctccggggaggagttctccttcgtcagcccgctggtgaaatacctgctcttcttcttcaacatgctcttctgggtgatttccatggtgatggtggctgtgggtgtctacgctcggctaatgaagcatgcagaagcagccctagcctgcctggcagtggaccctgccatcctgctgatcgtggtgggtgtcctcatgttcctgctcaccttctgtggctgcattgggtccctccgcgagaacatctgcctcctgcagacgttctccctctgcctcaccgctgtgttcctgctgcagctggccgctgggatcctgggcttcgtcttctcagacaaggctcgagggaaagtgagtgagatcatcaacaatgccattgtgcactaccgagatgacttggatctgcagaacctcattgattttggccagaaaaagtttagctgctgtggagggatttcctacaaggactggtctcagaacatgtatttcaactgctcagaagacaaccccagtcgagagcgctgctctgtgccttactcctgttgcttgcctactcctgaccaggcagtgatcaacactatgtgtggccaaggtatgcaggcctttgactacttggaagctagcaaagtcatctacaccaatggctgtattgacaagttggtcaactggatacacagcaacctattcttacttggtggtgtggctctaggcctggccatcccccagctggtgggaattctgctgtcccagatcctagtgaatcagatcaaagatcagatcaagctacagctctacaaccagcagcaccgggctgacccatggtactgagaatccatcctgcacctcctcaccatggaaactggcaagcctcataaacgaacagcagtgggtgctgaaagcagcaccaaatggagatttggattccagccccccagtgacagcccagtgggaagaagcaaactccagatgggcagaaggcagggtgcacaggtggctccagtctcaggaggatgcgcctcctctcccccatcccagccctcagcattgtgccagagtgatacccttaagtgtttgggtttatgttttcagttttgtttgggaaacagcagttgcacagagagttgggggtactgctgctgccttttcaccgaggcactgccaccaccagctctagcagggatgctcctgagcttggcggacatacttagatcctaacgtgccagtgagacctggctgtggagagtagcactggcagccctgcctggactccacttggcatgataccagctccagaagggaagggagtggagcaggcagtgaggagagagcctgggggtcggctggggacagccgtatgtgctaggtaggagtggagggagatatgtttaccaaatgcctgtcctgccatcctcccaggtagtcagagtgagctacatcctgccccgccttcatttccatggaaacatggcagctaggacacggggtacaacagcagccaaattcttccccacctcccttacttcgaaaaaaagtttggaaccctggtccctatactctgcagtcagaagtgggactgagccatacatgcccttgaattcctccctgtctggccctccctctccagcaagcagggttttctttaacttggcagtgtgcagaggagaagtggtaacacccccaccccattcccctgcatcggagctcagtattcctacagggtaagaggtaggaatcttgctgggacgaggggagccagaagtggcaataaaagcgtgttgacctggg

SEQ ID NO: 294383 - DNA, 1030 bp, Homo sapiens
ttatgaggtgagtctagaggatcccagtgctacgctctacaaccagcagcaccgggctgacccatggtactgagaatccatcctgcacctcctcaccatggaaactggcaagcctcataaacgaacagcagtgggtgctgaaagcagcaccaaatggagatttggattccagccccccagtgacagcccagtgggaagaagcaaactccagatgggcagaaggcagggtgcacaggtggctccagtctcaggaggatgcgcctcctctcccccatcccagccctcagcattgtgccagagtgatacccttaagtgtttgggtttatgttttcagttttgtttgggaaacagcagttgcacagagagttgggggtactgctgctgccttttcaccgaggcactgccaccaccagctctagcagggatgctcctgagcttggcggacatacttagatcctaacgtgccagtgagacctggctgtggagagtagcactggcagccctgcctggactccacttggcatgataccagctccagaagggaagggagtggagcaggcagtgaggagagagcctgggggtcggctggggacagccgtatgtgctaggtaggagtggagggagatatgtttaccaaatgcctgtcctgccatcctcccaggtagtcagagtgagctacatcctgccccgccttcatttccatggaaacatggcagctaggacacggggtacaacagcagccaaattcttccccacctcccttacttcgaaaaaaagtttggaaccctggtccctatactctgcagtcagaagtgggactgagccatacatgcccttgaattcctccctgtctggccctccctctccagcaagcagggttttctttaacttggcagtgtgcagaggagaagtggtaacacccccaccccattcccctgcatcggagctcagtattcctacagggtaagaggtaggaatcttgctgggacgaggggagccagaagtggcaataaaagcgtgttgacctggg

SEQ ID NO: 294384 - DNA, 2900 bp, Homo sapiens
tcgcgctgcccaccgcggctcagcagctccaggcgcggttccccggcccgcgccgctcccggccccccggctcgggcgcctcccgccgcagcgcaggctcccccgccggccgggctcctgcgcggcgcggctcggctcatgcccccgggcgcggggcacacaggccggccggcagccgctgggaaataggcccccgggggcggtggcggcggcggggccatggcgcggagaccccgggcgccggccgcctccggggaggagttctccttcgtcagcccgctggtgaaatacctgctcttcttcttcaacatgctcttctgggtgatttccatggtgatggtggctgtgggtgtctacgctcggctaatgaagcatgcagaagcagccctagcctgcctggcagtggaccctgccatcctgctgatcgtggtgggtgtcctcatgttcctgctcaccttctgtggctgcattgggtccctccgcgagaacatctgcctcctgcagacgttctccctctgcctcaccgctgtgttcctgctgcagctggccgctgggatcctgggcttcgtcttctcagacaaggctcgagggaaagtgagtgagatcatcaacaatgccattgtgcactaccgagatgacttggatctgcagaacctcattgattttggccagaaaaagtttagctgctgtggagggatttcctacaaggactggtctcagaacatgtatttcaactgctcagaagacaaccccagtcgagagcgctgctctgtgccttactcctgttgcttgcctactcctgaccaggcagtgatcaacactatgtgtggccaaggtatgcaggcctttgactacttggaagctagcaaagtcatctacaccaatggctgtattgacaagttggtcaactggatacacagcaacctattcttacttggtggtgtggctctaggcctggccatcccccagctggtgggaattctgctgtcccagatcctagtgaatcagatcaaagatcagatcaagctacagctctacaaccagcagcaccgggctgacccatggtactgagaatccatcctgcacctcctcaccatggaaactggcaagcctcataaacgaacagcagtgggtgctgaaagcagcaccaaatggagatttggattccagccccccagtgacagcccagtgggaagaagcaaactccagatgggcagaaggcagggtgcacaggtggctccagtctcaggaggatgcgcctcctctcccccatcccagccctcagcattgtgccagagtgatacccttaagtgtttgggtttatgttttcagttttgtttgggaaacagcagttgcacagagagttgggggtactgctgctgccttttcaccgaggcactgccaccaccagctctagcagggatgctcctgagcttggcggacatacttagatcctaacgtgccagtgagacctggctgtggagagtagcactggcagccctgcctggactccacttggcatgataccagctccagaagggaagggagtggagcaggcagtgaggagagagcctgggggtcggctggggacagccgtatgtgctaggtaggagtggagggagatatgtttaccaaatgcctgtcctgccatcctcccaggtagtcagagtgagctacatcctgccccgccttcatttccatggaaacatggcagctaggacacggggtacaacagcagccaaattcttccccacctcccttacttcgaaaaaaagtttggaaccctggtccctatactctgcagtcagaagtgggactgagccatacatgcccttgaattcctccctgtctggccctccctctccagcaagcagggttttctttaacttggcagtgtgcagaggagaagtggtaacacccccaccccattcccctgcatcggagctcagtattcctacagggtaagaggtaggaatcttgctgggacgaggggagccagaagtggcaataaaagcgtgttgacctgggcctgggctacgcgggactccatgaattttccattctggcaactggaaggggaggtgtagaagggccctgcagaggacggcactggagactctcctaaacgccacacacctcccccttgctgcccgccacacgcgcgtctccttcaaccgatgcattgccaccctcccacagcctcgccctctgctctaaattaggtcgaaagagtcccagttccaatctaggaacagcataattttgttccaaaacctgatctgtgtttttctaattaaaattaatttgtcacccaaaacaggagggggatggggaggagggacatgagcactccgctggggccgggacggggaatgaggaggaagaaggccctctcttcccctacccgggccctccaggaccttctccctgagtcggctgtagggaggactccgaggaagctcggcgcggtgcgctgggcctcctggcgccgggaggagcgcgcgaggcaggcggggcgggcgcgtccggggcggggcgctggacttcgtgggtggtccccgcccccgcggcgcctaggcccgcgcctgcgtcccccaacccggaggagatggggggctgtgctagctgcttgcccagcgagtgttcccggagtctcctcgccgcaccccgctatcgggcgctcagaccaggggctcggcctggcgggaaatagcctcgaccgaactgctgcggggacaaagagccgcgagttcgctccctgcccccagtgtctcctaagcgagccttctgctcctaggaaggcgcctttccagcagccgctgggaccctggccagtgtttagctcccaactagtaacagacggaaagaaaaaataaaattatccagaatctagaataaaa

SEQ ID NO: 294385 - DNA, 2816 bp, Homo sapiens
tcgcgctgcccaccgcggctcagcagctccaggcgcggttccccggcccgcgccgctcccggccccccggctcgggcgcctcccgccgcagcgcaggctcccccgccggccgggctcctgcgcggcgcggctcggctcatgcccccgggcgcggggcacacaggccggccggcagccgctgggaaataggcccccgggggcggtggcggcggcggggccatggcgcggagaccccgggcgccggccgcctccggggaggagttctccttcgtcagcccgctggtgaaatacctgctcttcttcttcaacatgctcttctgggtgatttccatggtgatggtggctgtgggtgtctacgctcggctaatgaagcatgcagaagcagccctagcctgcctggcagtggaccctgccatcctgctgatcgtggtgggtgtcctcatgttcctgctcaccttctgtggctgcattgggtccctccgcgagaacatctgcctcctgcagacgttctccctctgcctcaccgctgtgttcctgctgcagctggccgctgggatcctgggcttcgtcttctcagacaaggctcgagggaaagtgagtgagatcatcaacaatgccattgtgcactaccgagatgacttggatctgcagaacctcattgattttggccagaaaaagtttagctgctgtggagggatttcctacaaggactggtctcagaacatgtatttcaactgctcagaagacaaccccagtcgagagcgctgctctgtgccttactcctgttgcttgcctactcctgaccaggcagtgatcaacactatgtgtggccaaggtatgcaggcctttgactacttggaagctagcaaagtcatctacaccaatggctgtattgacaagttggtcaactggatacacagcaacctattcttacttggtggtgtggctctaggcctggccatcccccagctggtgggaattctgctgtcccagatcctagtgaatcagatcaaagatcagatcaagctacagctctacaaccagcagcaccgggctgacccatggtactgagaatccatcctgcacctcctcaccatggaaactggcaagcctcataaacgaacagcagtgggtgctgaaagcagcaccaaatggagatttggattccagccccccagtgacagcccagtgggaagaagcaaactccagatgggcagaaggcagggtgcacaggtggctccagtctcaggaggatgcgcctcctctcccccatcccagccctcagcattgtgccagagtgatacccttaagtgtttgggtttatgttttcagttttgtttgggaaacagcagttgcacagagagttgggggtactgctgctgccttttcaccgaggcactgccaccaccagctctagcagggatgctcctgagcttggcggacatacttagatcctaacgtgccagtgagacctggctgtggagagtagcactggcagccctgcctggactccacttggcatgataccagctccagaagggaagggagtggagcaggcagtgaggagagagcctgggggtcggctggggacagccgtatgtgctaggtaggagtggagggagatatgtttaccaaatgcctgtcctgccatcctcccaggtagtcagagtgagctacatcctgccccgccttcatttccatggaaacatggcagctaggacacggggtacaacagcagccaaattcttccccacctcccttacttcgaaaaaaagtttggaaccctggtccctatactctgcagtcagaagtgggactgagccatacatgcccttgaattcctccctgtctggccctccctctccagcaagcagggttttctttaacttggcagtgtgcagaggagaagtggtaacacccccaccccattcccctgcatcggagctcagtattcctacagggtaagaggtaggaatcttgctgggacgaggggagccagaagtggcaataaaagcgtgttgacctgggcctgggctacgcgggactccatgaattttccattctggcaactggaaggggaggtgtagaagggccctgcagaggacggcactggagactctcctaaacgccacacacctcccccttgctgcccgccacacgcgcgtctccttcaaccgatgcattgccaccctcccacagcctcgccctctgctctaaattaggtcgaaagagtcccagttccaatctaggaacagcataattttgttccaaaacctgatctgtgtttttctaattaaaattaatttgtcacccaaaacaggagggggatggggaggagggacatgagcactccgctggggccgggacggggaatgaggaggaagaaggccctctcttcccctacccgggccctccaggaccttctccctgagtcggctgtagggaggactccgaggaagctcggcgcggtgcgctgggcctcctggcgccgggaggagcgcctgcgtcccccaacccggaggagatggggggctgtgctagctgcttgcccagcgagtgttcccggagtctcctcgccgcaccccgctatcgggcgctcagaccaggggctcggcctggcgggaaatagcctcgaccgaactgctgcggggacaaagagccgcgagttcgctccctgcccccagtgtctcctaagcgagccttctgctcctaggaaggcgcctttccagcagccgctgggaccctggccagtgtttagctcccaactagtaacagacggaaagaaaaaataaaattatccagaatctagaataaaa

SEQ ID NO: 294386 - DNA, 1881 bp, Homo sapiens
tcgcgctgcccaccgcggctcagcagctccaggcgcggttccccggcccgcgccgctcccggccccccggctcgggcgcctcccgccgcagcgcaggctcccccgccggccgggctcctgcgcggcgcggctcggctcatgcccccgggcgcggggcacacaggccggccggcagccgctgggaaataggcccccgggggcggtggcggcggcggggccatggcgcggagaccccgggcgccggccgcctccggggaggagttctccttcgtcagcccgctggtgaaatacctgctcttcttcttcaacatgctcttctgggtgatttccatggtgatggtggctgtgggtgtctacgctcggctaatgaagcatgcagaagcagccctagcctgcctggcagtggaccctgccatcctgctgatcgtggtgggtgtcctcatgttcctgctcaccttctgtggctgcattgggtccctccgcgagaacatctgcctcctgcagacgttctccctctgcctcaccgctgtgttcctgctgcagctggccgctgggatcctgggcttcgtcttctcagacaaggctcgagggaaagtgagtgagatcatcaacaatgccattgtgcactaccgagatgacttggatctgcagaacctcattgattttggccagaaaaagtttagctgctgtggagggatttcctacaaggactggtctcagaacatgtatttcaactgctcagaagacaaccccagtcgagagcgctgctctgtgccttactcctgttgcttgcctactcctgaccaggcagtgatcaacactatgtgtggccaaggtatgcaggcctttgactacttggaagctagcaaagtcatctacaccaatggctgtattgacaagttggtcaactggatacacagcaacctattcttacttggtggtgtggctctaggcctggccatcccccagctggtgggaattctgctgtcccagatcctagtgaatcagatcaaagatcagatcaagctacagctctacaaccagcagcaccgggctgacccatggtactgagaatccatcctgcacctcctcaccatggaaactggcaagcctcataaacgaacagcagtgggtgctgaaagcagcaccaaatggagatttggattccagccccccagtgacagcccagtgggaagaagcaaactccagatgggcagaaggcagggtgcacaggtggctccagtctcaggaggatgcgcctcctctcccccatcccagccctcagcattgtgccagagtgatacccttaagtgtttgggtttatgttttcagttttgtttgggaaacagcagttgcacagagagttgggggtactgctgctgccttttcaccgaggcactgccaccaccagctctagcagggatgctcctgagcttggcggacatacttagatcctaacgtgccagtgagacctggctgtggagagtagcactggcagccctgcctggactccacttggcatgataccagctccagaagggaagggagtggagcaggcagtgaggagagagcctgggggtcggctggggacagccgtatgtgctagctgcttgcccagcgagtgttcccggagtctcctcgccgcaccccgctatcgggcgctcagaccaggggctcggcctggcgggaaatagcctcgaccgaactgctgcggggacaaagagccgcgagttcgctccctgcccccagtgtctcctaagcgagccttctgctcctaggaaggcgcctttccagcagccgctgggaccctggccagtgtttagctcccaactagtaacagacggaaagaaaaaataaaattatccagaatctagaataaaa

SEQ ID NO: 294387 - DNA, 1703 bp, Homo sapiens
tcgcgctgcccaccgcggctcagcagctccaggcgcggttccccggcccgcgccgctcccggccccccggctcgggcgcctcccgccgcagcgcaggctcccccgccggccgggctcctgcgcggcgcggctcggctcatgcccccgggcgcggggcacacaggccggccggcagccgctgggaaataggcccccgggggcggtggcggcggcggggccatggcgcggagaccccgggcgccggccgcctccggggaggagttctccttcgtcagcccgctggtgaaatacctgctcttcttcttcaacatgctcttctgggtgatttccatggtgatggtggctgtgggtgtctacgctcggctaatgaagcatgcagaagcagccctagcctgcctggcagtggaccctgccatcctgctgatcgtggtgggtgtcctcatgttcctgctcaccttctgtggctgcattgggtccctccgcgagaacatctgcctcctgcagacgttctccctctgcctcaccgctgtgttcctgctgcagctggccgctgggatcctgggcttcgtcttctcagacaaggctcgagggaaagtgagtgagatcatcaacaatgccattgtgcactaccgagatgacttggatctgcagaacctcattgattttggccagaaaaagtttagctgctgtggagggatttcctacaaggactggtctcagaacatgtatttcaactgctcagaagacaaccccagtcgagagcgctgctctgtgccttactcctgttgcttgcctactcctgaccaggcagtgatcaacactatgtgtggccaaggtatgcaggcctttgactacttggaagctagcaaagtcatctacaccaatggctgtattgacaagttggtcaactggatacacagcaacctattcttacttggtggtgtggctctaggcctggccatcccccagctggtgggaattctgctgtcccagatcctagtgaatcagatcaaagatcagatcaagctacagctctacaaccagcagcaccgggctgacccatggtactgagaatccatcctgcacctcctcaccatggaaactggcaagcctcataaacgaacagcagtgggtgctgaaagcagcaccaaatggagatttggattccagccccccagtgacagcccagtgggaagaagcaaactccagatgggcagaaggcagggtgcacaggtggctccagtctcaggaggatgcgcctcctctcccccatcccagccctcagcattgtgccagagtgatacccttaagtgtttgggtttatgttttcagttttgtttgggaaacagcagttgcacagagagttgggggtactgctgctgccttttcaccgaggcactgccaccaccagctctagcagggatgctcctgagcttggcggacatacttagatcctaacgtgccagtgagacctggctgtggagagtagcactggcagccctgcctggactccacttggcatgataccagctccagctccagcaagcagggttttctttaacttggcagtgtgcagaggagaagtggtaacacccccaccccattcccctgcatcggagctcagtattcctacagggtaagaggtaggaatcttgctgggacgaggggagccagaagtggcaataaaagcgtgttgacctggg

SEQ ID NO: 294388 - DNA, 2319 bp, Homo sapiens
tcgcgctgcccaccgcggctcagcagctccaggcgcggttccccggcccgcgccgctcccggccccccggctcgggcgcctcccgccgcagcgcaggctcccccgccggccgggctcctgcgcggcgcggctcggctcatgcccccgggcgcggggcacacaggccggccggcagccgctgggaaataggcccccgggggcggtggcggcggcggggccatggcgcggagaccccgggcgccggccgcctccggggaggagttctccttcgtcagcccgctggtgaaatacctgctcttcttcttcaacatgctcttctgggtgatttccatggtgatggtggctgtgggtgtctacgctcggctaatgaagcatgcagaagcagccctagcctgcctggcagtggaccctgccatcctgctgatcgtggtgggtgtcctcatgttcctgctcaccttctgtggctgcattgggtccctccgcgagaacatctgcctcctgcagacgttctccctctgcctcaccgctgtgttcctgctgcagctggccgctgggatcctgggcttcgtcttctcagacaaggctcgagggaaagtgagtgagatcatcaacaatgccattgtgcactaccgagatgacttggatctgcagaacctcattgattttggccagaaaaagtttagctgctgtggagggatttcctacaaggactggtctcagaacatgtatttcaactgctcagaagacaaccccagtcgagagcgctgctctgtgccttactcctgttgcttgcctactcctgaccaggcagtgatcaacactatgtgtggccaaggtatgcaggcctttgactacttggaagctagcaaagtcatctacaccaatggctgtattgacaagttggtcaactggatacacagcaacctattcttacttggtggtgtggctctaggcctggccatcccccagctggtgggaattctgctgtcccagatcctagtgaatcagatcaaagatcagatcaagctacagctctacaaccagcagcaccgggctgacccatggtactgagaatccatcctgcacctcctcaccatggaaactggcaagcctcataaacgaacagcagtgggtgctgaaagcagcaccaaatggagatttggattccagccccccagtgacagcccagtgggaagaagcaaactccagatgggcagaaggcagggtgcacaggtggctccagtctcaggaggatgcgcctcctctcccccatcccagccctccagcaagcagggttttctttaacttggcagtgtgcagaggagaagtggtaacacccccaccccattcccctgcatcggagctcagtattcctacagggtaagaggtaggaatcttgctgggacgaggggagccagaagtggcaataaaagcgtgttgacctgggcctgggctacgcgggactccatgaattttccattctggcaactggaaggggaggtgtagaagggccctgcagaggacggcactggagactctcctaaacgccacacacctcccccttgctgcccgccacacgcgcgtctccttcaaccgatgcattgccaccctcccacagcctcgccctctgctctaaattaggtcgaaagagtcccagttccaatctaggaacagcataattttgttccaaaacctgatctgtgtttttctaattaaaattaatttgtcacccaaaacaggagggggatggggaggagggacatgagcactccgctggggccgggacggggaatgaggaggaagaaggccctctcttcccctacccgggccctccaggaccttctccctgagtcggctgtagggaggactccgaggaagctcggcgcggtgcgctgggcctcctggcgccgggaggagcgcgcgaggcaggcggggcgggcgcgtccggggcggggcgctggacttcgtgggtggtccccgcccccgcggcgcctaggcccgcgcctgcgtcccccaacccggaggagatggggggctgtgctagctgcttgcccagcgagtgttcccggagtctcctcgccgcaccccgctatcgggcgctcagaccaggggctcggcctggcgggaaatagcctcgaccgaactgctgcggggacaaagagccgcgagttcgctccctgcccccagtgtctcctaagcgagccttctgctcctaggaaggcgcctttccagcagccgctgggaccctggccagtgtttagctcccaactagtaacagacggaaagaaaaaataaaattatccagaatctagaataaaa

SEQ ID NO: 294389 - DNA, 1117 bp, Homo sapiens
tcgcgctgcccaccgcggctcagcagctccaggcgcggttccccggcccgcgccgctcccggccccccggctcgggcgcctcccgccgcagcgcaggctcccccgccggccgggctcctgcgcggcgcggctcggctcatgcccccgggcgcggggcacacaggccggccggcagccgctgggaaataggcccccgggggcggtggcggcggcggggccatggcgcggagaccccgggcgccggccgcctccggggaggagttctccttcgtcagcccgctggtgaaatacctgctcttcttcttcaacatgctcttctgggtgatttccatggtgatggtggctgtgggtgtctacgctcggctaatgaagcatgcagaagcagccctagcctgcctggcagtggaccctgccatcctgctgatcgtggtgggtgtcctcatgttcctgctcaccttctgtggctgcattgggtccctccgcgagaacatctgcctcctgcagacgttctccctctgcctcaccgctgtgttcctgctgcagctggccgctgggatcctgggcttcgtcttctcagacaaggctcgagggaaagtgagtgagatcatcaacaatgccattgtgcactaccgagatgacttggatctgcagaacctcattgattttggccagaaaaagtttagctgctgtggagggatttcctacaaggactggtctcagaacatgtatttcaactgctcagaagacaaccccagtcgagagcgctgctctgtgccttactcctgttgcttgcctactcctgaccaggcagtgatcaacactatgtgtggccaaggtatgcaggcctttgactacttggaagctagcaaagtcatctacaccaatggctgtattgacaagttggtcaactggatacacagcaacctattcttacttggtggtgtggctctaggcctggccatcccccagctggtgggaattctgctgtcccagatcctagtgaatcagatcaaagatcagatcaagctacagctctacaaccagcagcaccaccaggacagcagcaccaccagacagcagcaccaccagacagcagcacaccatgacacagcaccac

SEQ ID NO: 294390 - DNA, 968 bp, Homo sapiens
tcgcgctgcccaccgcggctcagcagctccaggcgcggttccccggcccgcgccgctcccggccccccggctcgggcgcctcccgccgcagcgcaggctcccccgccggccgggctcctgcgcggcgcggctcggctcatgcccccgggcgcggggcacacaggccggccggcagccgctgggaaataggcccccgggggcggtggcggcggcggggccatggcgcggagaccccgggcgccggccgcctccggggaggagttctccttcgtcagcccgctggtgaaatacctgctcttcttcttcaacatgctcttctgggtgatttccatggtgatggtggctgtgggtgtctacgctcggctaatgaagcatgcagaagcagccctagcctgcctggcagtggaccctgccatcctgctgatcgtggtgggtgtcctcatgttcctgctcaccttctgtggctgcattgggtccctccgcgagaacatctgcctcctgcagacgttctccctctgcctcaccgctgtgttcctgctgcagctggccgctgggatcctgggcttcgtcttctcagacaaggctcgagggaaagtgagtgagatcatcaacaatgccattgtgcactaccgagatgacttggatctgcagaacctcattgattttggccagaaaaagccaaattcttccccacctcccttacttcgaaaaaaagtttggaaccctggtccctatactctgcagtcagaagtgggactgagccatacatgcccttgaattcctccctgtctggccctccctctccagcaagcagggttttctttaacttggcagtgtgcagaggagaagtggtaacacccccaccccattcccctgcatcggagctcagtattcctacagggtaagaggtaggaatcttgctgggacgaggggagccagaagtggcaataaaagcgtgttgacctggg

SEQ ID NO: 294391 - DNA, 1563 bp, Homo sapiens
cccagtgtctactccacaaacaggagcagaggaactctcaaggggtgagcaccaggagactgggatccctgggggctgtcttagagcttactcactaccacactcattcataataaggcctgtcaaacaagggagacttggtcatacacctgagttatataaatcctcatccagtctccctatggttgacaaggtgtcttgctcataagcgtcagtacctggtgtcaggtgctctcatataatcaatcactgtttgtggaggtagcactggtgctgctctacaaccagcagcaccgggctgacccatggtactgagaatccatcctgcacctcctcaccatggaaactggcaagcctcataaacgaacagcagtgggtgctgaaagcagcaccaaatggagatttggattccagccccccagtgacagcccagtgggaagaagcaaactccagatgggcagaaggcagggtgcacaggtggctccagtctcaggaggatgcgcctcctctcccccatcccagccctccagcaagcagggttttctttaacttggcagtgtgcagaggagaagtggtaacacccccaccccattcccctgcatcggagctcagtattcctacagggtaagaggtaggaatcttgctgggacgaggggagccagaagtggcaataaaagcgtgttgacctgggcctgggctacgcgggactccatgaattttccattctggcaactggaaggggaggtgtagaagggccctgcagaggacggcactggagactctcctaaacgccacacacctcccccttgctgcccgccacacgcgcgtctccttcaaccgatgcattgccaccctcccacagcctcgccctctgctctaaattaggtcgaaagagtcccagttccaatctaggaacagcataattttgttccaaaacctgatctgtgtttttctaattaaaattaatttgtcacccaaaacaggagggggatggggaggagggacatgagcactccgctggggccgggacggggaatgaggaggaagaaggccctctcttcccctacccgggccctccaggaccttctccctgagtcggctgtagggaggactccgaggaagctcggcgcggtgcgctgggcctcctggcgccgggaggagcgcgcgaggcaggcggggcgggcgcgtccggggcggggcgctggacttcgtgggtggtccccgcccccgcggcgcctaggcccgcgcctgcgtcccccaacccggaggagatggggggctgtgctagctgcttgcccagcgagtgttcccggagtctcctcgccgcaccccgctatcgggcgctcagaccaggggctcggcctggcgggaaatagcctcgaccgaactgctgcggggacaaagagccgcgagttcgctccctgcccccagtgtctcctaagcgagccttctgctcctaggaaggcgcctttccagcagccgctgggaccctggccagtgtttagctcccaactagtaacagacggaaagaaaaaataaaattatccagaatctagaataaaa

SEQ ID NO: 294392 - DNA, 869 bp, Homo sapiens
tcgcgctgcccaccgcggctcagcagctccaggcgcggttccccggcccgcgccgctcccggccccccggctcgggcgcctcccgccgcagcgcaggctcccccgccggccgggctcctgcgcggcgcggctcggctcatgcccccgggcgcggggcacacaggccggccggcagccgctgggaaataggcccccgggggcggtggcggcggcggggccatggcgcggagaccccgggcgccggccgcctccggggaggagttctccttcgtcagcccgctggtgaaatacctgctcttcttcttcaacatgctcttctgggtgatttccatggtgatggtggctgtgggtgtctacgctcggctaatgaagcatgcagaagcagccctagcctgcctggcagtggaccctgccatcctgctgatcgtggtgggtgtcctcatgttcctgctcaccttctgtggctgcattgggtccctccgcgagaacatctgcctcctgcagacgttctccctctgcctcaccgctgtgttcctgctgcagctggccgctgggatcctgggcttcgtcttctcagacaaggctcgagggaaagtgagtgagatcatcaacaatgccattgtgcactaccgagatgacttggatctgcagaacctcattgattttggccagaaaaagaaaaggtatgggtcagccagtggtctgggggactgtgggtaaaagtgaatgtcatcccaagagatgcctcaccctctatgcctgtggggctcttcattacctgccaggtaatggcttctgggaaggggtttggcaaaaaagcacacgtagcagagtgctttaaatgtacttttaaagacacagaacagtat

SEQ ID NO: 294393 - DNA, 1382 bp, Homo sapiens
cattatgctaacagcataaacatgcagggggtgggagcagggtcacaaaagtgagtgttgtcaattctacttggaatgaaaggttgaaataatttaaacagtacgggaaatgcagagcaattttctcctctggtgacaatatagtgtccaacacttggaagtgatttttaagaatgtttatttaaattaaaaggatggatttccaaggaaaaaaaataaggaaaaggaaagaaaaaactgaacagaaaacgcaaaagtatcagtttggtcactaacctttgcaaggatacctttttattttctttaagattcctgttgtttatacacagattttaagtttactcctactgctgacccaagtgaaattccttctccagtcacagtgtcaacctctaccccccaactgcaacgagagttttgaggggcatcaatcacaccgagaagtcacagcccctcaaccactgaggtgtgggggggtagggatctgcatttcttcatatcaaccccacactatagggcacctaaatgggtgggcggtgggggagaccgactcacttgagtttcttgaaggcttcctggcctccagccacgtaattgcccccgctctggatctggtctagcttccggattcggtggccagtccgcggggtgtagatgttcctgacggccccaaagggtgcctgaacgccgccggtcacctccttcaggaagacttcgaagctggacaccttcttctcatggatgacgacgcggcgccccgcgtagaaggggtccccgttgcggtacacaagcacgctcttcacgacgggctgagacaggtggctggacctggcgctgctgccgctcatcttccccgctggccgccgcctcagctcgctgcttcgcgtcgggaggcacctccgctgtcccagcggcctcaccgcacccagggcgcgggatcgcctcctgaaacgaacgagaaactgacgaatccacaggtgaaagagaagtaacggccgtgcgcctaggcgtccacccagaggagacactaggagcttgcaggactcggagtagacgctcaagtttttcaccgtggcgtgcacagccaatcaggacccgcagtgcgcgcaccacaccaggttcacctgctacgggcagaatcaaggtggacagcttctgagcaggagccggaaacgcgcggggccttcaaacaggcacgcctagtgagggcaggagagaggaggacgcacacacacacacacacacaaatatggtgaaacccaatttcttacatcatatctgtgctaccctttccaaacagcctaatttttcttttctctcttcttgcacctttacccctcaatctcctgcttcctcccaaattaaagcaattaagttcctgg

SEQ ID NO: 294394 - DNA, 3314 bp, Homo sapiens
tccgcgtggtccctccccctcaggccgcggtcgcgattacgctctctacggcctgcgaccgcagggccgttgcgggctggagacacggcgccgactggaaccggaggagctctaggccaaatggttgggccagccaggatcccaggacccttcgccgctcgagaccggagagaggaaacgaaacaggcgggaacccgtgggggagggagggaactagcggaaggtgtcatggcggccgcgctcttgagtcacgtgcccagggcccgccttgctacttccggtcacgtgccctcagactcctcgcagccagcgatggaggcgagaccccctagtaacagaggcggtggctactgctgcggccactgggtttcggcctcttcccagcagcggctctaagaagcgcagcggaactcgaccggatccaacccagttagttacttcctgtctagagttgtagcttccacctgcaccttctagccaccatggcaacctcatctgaagaagttttgctgattgtaaagaaagtgcgtcaaaagaagcaggatggagctctgtacctcatggcagaaagaattgcttgggcacctgaaggcaaagatagatttacaatcagccatatgtatgcagatattaaatgccagaaaattagtccagaaggaaaagctaaaattcagcttcagctggtcctacatgcaggggacacaactaacttccatttttccaatgaaagcacagcagtgaaagagcgagatgcagtaaaagaccttcttcagcagctgctgcccaaattcaagaggaaagcaaataaagaactggaagagaagaacagaatgctgcaagaagatcctgttttgtttcagctttataaagaccttgttgtgagtcaagtgatcagtgctgaggaattctgggccaatcgtttaaatgtgaatgcaacagatagttcttccacatccaatcataagcaggatgttggcatttctgctgcatttctggctgatgtccggccccaaactgatggctgtaacggtctaagatataatttaacttctgatatcattgagtccatatttaggacctatccagcagtaaaaatgaaatatgcagaaaatgttccccacaacatgacagagaaggaattctggacacgttttttccagtcccattattttcacagggatcggctgaatacagggtcaaaggatctctttgcagaatgtgccaaaatagatgaaaaaggcctaaaaacaatggtttcattaggagtgaaaaacccactactagatttaacagctttggaagataaaccattagatgagggctatggcatttcctctgtgccatctgcttccaattctaaatccataaaagagaatagtaatgctgccatcatcaagagatttaaccatcacagtgccatggtcctggcagctggactcagaaaacaagaagcacaaaatgaacaaactagtgagcccagcaacatggatggaaattccggagatgcagactgctttcagccagcagtcaaaagggcgaaattacaagagtccattgaatatgaagacttggggaaaaataattctgtaaaaacgattgcactaaacctcaagaagtcagataggtattatcatggtccaactccaatccagtcactacagtatgcaacaagtcaggacattattaattcttttcaaagtattagacaagaaatggaagcttatacacccaagttaactcaggttctctcaagtagtgctgccagtagtaccatcacagcactgtcacctggaggggcacttatgcagggaggaacacagcaagccataaaccagatggtgccaaatgatattcaatctgaattgaaacacttatatgtagctgttggagaacttctacgacatttctggtcctgctttcctgttaatacgccattcctagaagaaaaggtagtgaaaatgaaaagtaatttggaacgattccaagttacgaagctctgtccattccaagaaaagattcggagacagtatttaagcacaaatttggtaagtcacatagaagagatgctccagacagcctacaacaagctccacacatggcagtcacggcgtctgatgaagaaaacgtgaggtggccatgatgcttacaggttttgtgagattgagagaactatgacctgcagcaactctggaaacctggcctgacagacaagcagatgacctcacaggagtgataagaaacatctgctccacgccaactcccagagctgatgctattgtacttgcacattggagactgaaaggaaagaagggactaaatgctggggaggtaaattaagacagaaccaaatgagctaagttgcaaatatatatatatacacacacacacatatatgtacatgtgtatgtacatatatattttaaaagactgtttactgcagttgctcaggaactgcttttgattcacattaagctgctttcagaaattaaaaaaacactttttaaagggtgcattgataaaatctgaggttttttggttgtcgtttttttctgtgtacatttttttcctaagtttatggcacagggtagaccttaagtattcctcctccatccttcattcttcaccctccattggatcctcaagttttaatgaattccaattataccttacatcagcaagttaaaaaaagtactttaaaataaagcaaagggagactgttgctcaaccatcaggaaacagttgtcagaagacatcattggttctgtgtttcctacggaaataagaaacgataaatattgcactgaatgtttgtggtttggagtccctgaataataaagaggcaatatatttgcagaaagtcgcatagggttttttaatgcagaattttgtcagaagacaatggcgctgcatgtttttctttgagtgcaaatgtacattgctaagatttttttaagatggcatgtgctttgaaaagaagatattgcatttttaagagtttaaaaatcttatgagtgagaaatattaaaaaaatcttattttcacctctttagaagaaataaaagatgtttctcctatctccttttctctagtatttgactgttactgtccttggcgaatcgataatcattgcatagtgactgaaaagcctaagtgcaaaaaaaaaaaaaaaaagatgttcttgtttctgaacttcgtgccatattttgttcctgatgggatcaacttaatgtttaagactttagatgtcttgtattaaaaattacacaaaaaaagtaaaactttttatacttacccttttaactctaaaaaaaaac

SEQ ID NO: 294395 - DNA, 2724 bp, Homo sapiens
tccgcgtggtccctccccctcaggccgcggtcgcgattacgctctctacggcctgcgaccgcagggccgttgcgggctggagacacggcgccgactggaaccggaggagctctaggccaaatggttgggccagccaggatcccaggacccttcgccgctcgagaccggagagaggaaacgaaacaggcgggaacccgtgggggagggagggaactagcggaaggtgtcatggcggccgcgctcttgagtcacgtgcccagggcccgccttgctacttccggtcacgtgccctcagactcctcgcagccagcgatggaggcgagaccccctagtaacagaggcggtggctactgctgcggccactgggtttcggcctcttcccagcagcggctctaagaagcgcagcggaactcgaccggatccaacccagttagttacttcctgtctagagttgtagcttccacctgagttctcctgggaagaagtgtttgccactcaaggaatacactcaagaaaaacctggaaatcacagaaggcattgtaagatagctacagtgattctgttaaacctcctgaaattggtccttgaacaattaagaggtgctacagatgaccaggaaaatttaccaggcaaattagctgtgagacaattgaccatttgtgcccaatgttcgcaccttctagccaccatggcaacctcatctgaagaagttttgctgattgtaaagaaagtgcgtcaaaagaagcaggatggagctctgtacctcatggcagaaagaattgcttgggcacctgaaggcaaagatagatttacaatcagccatatgtatgcagatattaaatgccagaaaattagtccagaaggaaaagctaaaattcagcttcagctggtcctacatgcaggggacacaactaacttccatttttccaatgaaagcacagcagtgaaagagcgagatgcagtaaaagaccttcttcagcagctgctgcccaaattcaagaggaaagcaaataaagaactggaagagaagaacagaatgctgcaagaagatcctgttttgtttcagctttataaagaccttgttgtgagtcaagtgatcagtgctgaggaattctgggccaatcgtttaaatgtgaatgcaacagatagttcttccacatccaatcataagcaggatgttggcatttctgctgcatttctggctgatgtccggccccaaactgatggctgtaacggtctaagatataatttaacttctgatatcattgagtccatatttaggacctatccagcagtaaaaatgaaatatgcagaaaatgttccccacaacatgacagagaaggaattctggacacgttttttccagtcccattattttcacagggatcggctgaatacagggtcaaaggatctctttgcagaatgtgccaaaatagatgaaaaaggcctaaaaacaatggtttcattaggagtgaaaaacccactactagatttaacagctttggaagataaaccattagatgagggctatggcatttcctctgtgccatctgcttccaattctaaatccataaaagagaatagtaatgctgccatcatcaagagatttaaccatcacagtgccatggtcctggcagctggactcagaaaacaagaagcacaaaatgaacaaactagtgagcccagcaacatggatggaaattccggagatgcagactgctttcagccagcagtcaaaagggcgaaattacaagagtccattgaatatgaagacttggggaaaaataattctgtaaaaacgattgcactaaacctcaagaagtcagataggtattatcatggtccaactccaatccagtcactacagtatgcaacaagtcaggacattattaattcttttcaaagtattagacaagaaatggaagcttatacacccaagttaactcaggttctctcaagtagtgctgccagtagtaccatcacagcactgtcacctggaggggcacttatgcagggaggaacacagcaagccataaaccagatggtgccaaatgatattcaatctgaattgaaacacttatatgtagctgttggagaacttctacgacatttctggtcctgctttcctgttaatacgccattcctagaagaaaaggtagtgaaaatgaaaagtaatttggaacgattccaagttacgaagctctgtccattccaagaaaagattcggagacagtatttaagcacaaatttggtaagtcacatagaagagatgctccagacagcctacaacaagctccacacatggcagtcacggcgtctgatgaagaaaacgtgaggtggccatgatgcttacaggttttgtgagattgagagaactatgacctgcagcaactctggaaacctggcctgacagacaagcagatgacctcacaggagtgataagaaacatctgctccacgccaactcccagagctgatgctattgtacttgcacattggagactgaaaggaaagaagggactaaatgctggggaggtaaattaagacagaaccaaatgagctaagttgcaaatatatatatatacacacacacacatatatgtacatgtgtatgtacatatatattttaaaagactgtttactgcagttgctcaggaactgcttttgattcacattaagctgctttcagaaattaaaaaaacactttttaaagggtgcattgat

SEQ ID NO: 294396 - DNA, 1019 bp, Homo sapiens
tccgcgtggtccctccccctcaggccgcggtcgcgattacgctctctacggcctgcgaccgcagggccgttgcgggctggagacacggcgccgactggaaccggaggagctctaggccaaatggttgggccagccaggatcccaggacccttcgccgctcgagaccggagagaggaaacgaaacaggcgggaacccgtgggggagggagggaactagcggaaggtgtcatggcggccgcgctcttgagtcacgtgcccagggcccgccttgctacttccggtcacgtgccctcagactcctcgcagccagcgatggaggcgagaccccctagtaacagaggcggtggctactgctgcggccactgggtttcggcctcttcccagcagcggctctaagaagcgcagcggaactcgaccggatccaacccagttagttacttcctgtctagagttgtagcttccacctgcaccttctagccaccatggcaacctcatctgaagaagttttgctgattgtaaagaaagtgcgtcaaaagaagcaggatggagctctgtacctcatggcagaaagaattgcttgggcacctgaaggcaaagatagatttacaatcagccatatgtatgcagatattaaatgtaagtcagctatactaagttctgatgtatttgtatgtcatagttgctagtaattttgtaaagagattatataaatctttattttatatcaaaaaatcaactatgtagaaataattacaaaatggggtcactgaatatatactgttttataacctgaccttttcacttaataacagaacaggtacaggtttacatataatatgtaaatctacctgacatatagatctccacacactttaagagttgcataatactccactaaatgaatatacaatcatgtatttaaccagccctctgtggttggacacttaggaagtttccagaatttttttattgcagtgtttgcactaatatcatttcaaggttgtatgtgtaggatacat

SEQ ID NO: 294397 - DNA, 1080 bp, Homo sapiens
tccgcgtggtccctccccctcaggccgcggtcgcgattacgctctctacggcctgcgaccgcagggccgttgcgggctggagacacggcgccgactggaaccggaggagctctaggccaaatggttgggccagccaggatcccaggacccttcgccgctcgagaccggagagaggaaacgaaacaggcgggaacccgtgggggagggagggaactagcggaaggtgtcatggcggccgcgctcttgagtcacgtgcccagggcccgccttgctacttccggtcacgtgccctcagactcctcgcagccagcgatggaggcgagaccccctagtaacagaggcggtggctactgctgcggccactgggtttcggcctcttcccagcagcggctctaagaagcgcagcggaactcgaccggatccaacccagttagttacttcctgtctagagttgtagcttccacctgagacggggtttcaccatgttgaccaggccattcagccgacttgtagcagtgcaacagattgcaccttctagccaccatggcaacctcatctgaagaagttttgctgattgtaaagaaagtgcgtcaaaagaagcaggatggagctctgtacctcatggcagaaagaattgcttgggcacctgaaggcaaagatagatttacaatcagccatatgtatgcagatattaaatgtaagtcagctatactaagttctgatgtatttgtatgtcatagttgctagtaattttgtaaagagattatataaatctttattttatatcaaaaaatcaactatgtagaaataattacaaaatggggtcactgaatatatactgttttataacctgaccttttcacttaataacagaacaggtacaggtttacatataatatgtaaatctacctgacatatagatctccacacactttaagagttgcataatactccactaaatgaatatacaatcatgtatttaaccagccctctgtggttggacacttaggaagtttccagaatttttttattgcagtgtttgcactaatatcatttcaaggttgtatgtgtaggatacat

SEQ ID NO: 294398 - DNA, 525 bp, Homo sapiens
agaagtgctgcatgacaagagtaccaaagaaggaagcagagtgttagtgagtttgatgagcatgctctggttgtatgggatcatttaagaagagtgcattctacaaaagcatcagtgttggaatagggcagttaaagcccaaaggaatcctgaatcatcttgggagaagtaacttactgtatggttattcccacagtgtgagtgtcgtcatctaactgccctcatgcttctttttaggccagaaaattagtccagaaggaaaagctaaaattcagcttcagctggtcctacatgcaggggacacaactaacttccatttttccaatgaaagcacagcagtgaaagagcgagatgcagtaaaagaccttcttcagcagctgctgcccaaattcaagaggaaagcaaataaagaactggaagagaagaacaggtgggaggaaaagaatagccttttgaaagagatactgggttctctatagtctcctagtatgctaatagcttgttagctatccccacgttttttcg

SEQ ID NO: 294399 - DNA, 563 bp, Homo sapiens
gacttgagcattttcagataccaacagacagtacactgcagacatggtgatctttgaatcactgggatacggagatgaataagatcaaacccatgtcctcaaagggtttaatctttcctttacacctacctccatttatcaccacttcaccgcttcctccaaaaatgtggggtattttgctcttaattactgaaaagtgaactgaaggacctctgctgctcaaacatcacaaaataaaagttgtgtgtttcaatgttttgtgttgccaaaatctttttaaaatgtacctacatggtgttttattctagaagttcagttatattcagtatattctgctttacagaatgctgcaagaagatcctgttttgtttcagctttataaagaccttgttgtgagtcaagtgatcagtgctgaggaattctgggccaatcgtttaaatgtgaatgcaacagatagttcttccacatccaatcataagcaggatgttggcatttctgctgcatttctggtatgtgagccttctagatttctgaagaaaataaaaattcaaaccccaaaatgt

SEQ ID NO: 294400 - DNA, 184 bp, Homo sapiens
gcggccgcctactactactactactactactgctcgaattcaagcttctaacgatgtacggggacatgtgtatgtacatatatattttaaaagactgtttactgcagttgctcaggaactgcttttgattcacattaagctgctttcagaaattaaaaaaacactttttaaagggtgcattgat

SEQ ID NO: 294401 - DNA, 3074 bp, Homo sapiens
tccgcgtggtccctccccctcaggccgcggtcgcgattacgctctctacggcctgcgaccgcagggccgttgcgggctggagacacggcgccgactggaaccggaggagctctaggccaaatggttgggccagccaggatcccaggacccttcgccgctcgagaccggagagaggaaacgaaacaggcgggaacccgtgggggagggagggaactagcggaaggtgtcatggcggccgcgctcttgagtcacgtgcccagggcccgccttgctacttccggtcacgtgccctcagactcctcgcagccagcgatggaggcgagaccccctagtaacagaggcggtggctactgctgcggccactgggtttcggcctcttcccagcagcggctctaagaagcgcagcggaactcgaccggatccaacccagttagttacttcctgtctagagttgtagcttccacctgcaccttctagccaccatggcaacctcatctgaagaagttttgctgattgtaaagaaagtgcgtcaaaagaagcaggatggagctctgtacctcatggcagaaagaattgcttgggcacctgaaggcaaagatagatttacaatcagccatatgtatgcagatattaaatgccagaaaattagtccagaaggaaaagctaaaattcagcttcagctggtcctacatgcaggggacacaactaacttccatttttccaatgaaagcacagcagtgaaagagcgagatgcagtaaaagaccttcttcagcagctgctgcccaaattcaagaggaaagcaaataaagaactggaagagaagaacagaatgctgcaagaagatcctgttttgtttcagctttataaagaccttgttgtgagtcaagtgatcagtgctgaggaattctgggccaatcgtttaaatgtgaatgcaacagatagttcttccacatccaatcataagcaggatgttggcatttctgctgcatttctggctgatgtccggccccaaactgatggctgtaacggtctaagatataatttaacttctgatatcattgagtccatatttaggacctatccagcagtaaaaatgaaatatgcagaaaatgttccccacaacatgacagagaaggaattctggacacgttttttccagtcccattattttcacagggatcggctgaatacagggtcaaaggatctctttgcagaatgtgccaaaatagatgaaaaaggcctaaaaacaatggtttcattaggagtgaaaaacccactactagatttaacagctttggaagataaaccattagatgagggctatggcatttcctctgtgccatctgcttccaattctaaatccataaaagagaatagtaatgctgccatcatcaagagatttaaccatcacagtgccatggtcctggcagctggactcagaaaacaagaagcacaaaatgaacaaactagtgagcccagcaacatggatggaaattccggagatgcagactgctttcagccagcagtcaaaagggcgaaattacaagagtccattgaatatgaagacttggggaaaaataattctgtaaaaacgattgcactaaacctcaagaagtcagataggtattatcatggtccaactccaatccagtcactacagtatgcaacaagtcaggacattattaattcttttcaaagtattagacaagaaatggaagcttatacacccaagttaactcaggttctctcaagtagtgctgccagtagtaccatcacagcactgtcacctggaggggcacttatgcagggaggaacacagcaagccataaaccagatggtgccaaatgatattcaatctgaattgaaacacttatatgtagctgttggagaacttctacgacatttctggtcctgctttcctgttaatacgccattcctagaagaaaaggtagtgaaaatgaaaagtaatttggaacgattccaagttacgaagctctgtccattccaagaaaagattcggagacagtatttaagcacaaatttggtaagtcacatagaagagatgctccagacagcctacaacaagctccacacatggcagtcacggcgtctgatgaagaaaacgtgaggtggccatgatgcttacaggttttgtgagattgagagaactatgacctgcagcaactctggaaacctggcctgacagacaagcagatgacctcacaggagtgataagaaacatctgctccacgccaactcccagagctgatgctattgtacttgcacattggagactgaaaggaaagaagggactaaatgctggggaggtaaattaagacagaaccaaatgagctaagttgcaaatatatatatatacacacacacacatatatgtacatgtgtatgtacatatatattttaaaagactgtttactgcagttgctcaggaactgcttttgattcacattaagctgctttcagaaattaaaaaaacactttttaaagggtgcattgataaaatctgaggttttttggttgtcgtttttttctgtgtacatttttttcctaagtttatggcacagggtagaccttaagtattcctcctccatccttcattcttcaccctccattggatcctcaagttttaatgaattccaattataccttacatcagcaagttaaaaaaagtactttaaaataaagcaaagggagactgttgctcaaccatcaggaaacagttgtcagaagacatcattggttctgtgtttcctacggaaataagaaacgataaatattgcactgaatgtttgtggtttggagtccctgaataataaagaggcaatatatttgcagaaagtcgcatagggttttttaatgcagaattttgtcagaagacaatggcgctgcatgtttttctttgagtgcaaatgtacattgctaagatttttttaagatggcatgtgctttgaaaagaagatattgcatttttaagagtttaaaaatcttatgagtgagaaatattaaaaaaatcttattttcacctctttagaagaaataaaagatgtttctccta

SEQ ID NO: 294402 - DNA, 2517 bp, Homo sapiens
tccgcgtggtccctccccctcaggccgcggtcgcgattacgctctctacggcctgcgaccgcagggccgttgcgggctggagacacggcgccgactggaaccggaggagctctaggccaaatggttgggccagccaggatcccaggacccttcgccgctcgagaccggagagaggaaacgaaacaggcgggaacccgtgggggagggagggaactagcggaaggtgtcatggcggccgcgctcttgagtcacgtgcccagggcccgccttgctacttccggtcacgtgccctcagactcctcgcagccagcgatggaggcgagaccccctagtaacagaggcggtggctactgctgcggccactgggtttcggcctcttcccagcagcggctctaagaagcgcagcggaactcgaccggatccaacccagttagttacttcctgtctagagttgtagcttccacctgcaccttctagccaccatggcaacctcatctgaagaagttttgctgattgtaaagaaagtgcgtcaaaagaagcaggatggagctctgtacctcatggcagaaagaattgcttgggcacctgaaggcaaagatagatttacaatcagccatatgtatgcagatattaaatgccagaaaattagtccagaaggaaaagctaaaattcagcttcagctggtcctacatgcaggggacacaactaacttccatttttccaatgaaagcacagcagtgaaagagcgagatgcagtaaaagaccttcttcagcagctgctgcccaaattcaagaggaaagcaaataaagaactggaagagaagaacagaatgctgcaagaagatcctgttttgtttcagctttataaagaccttgttgtgagtcaagtgatcagtgctgaggaattctgggccaatcgtttaaatgtgaatgcaacagatagttcttccacatccaatcataagcaggatgttggcatttctgctgcatttctggctgatgtccggccccaaactgatggctgtaacggtctaagatataatttaacttctgatatcattgagtccatatttaggacctatccagcagtaaaaatgaaatatgcagaaaatgttccccacaacatgacagagaaggaattctggacacgttttttccagtcccattattttcacagggatcggctgaatacagggtcaaaggatctctttgcagaatgtgccaaaatagatgaaaaaggcctaaaaacaatggtttcattaggagtgaaaaacccactactagatttaacagctttggaagataaaccattagatgagggctatggcatttcctctgtgccatctgcttccaattctaaatccataaaagagaatagtaatgctgccatcatcaagagatttaaccatcacagtgccatggtcctggcagctggactcagaaaacaagaagcacaaaatgaacaaactagtgagcccagcaacatggatggaaattccggagatgcagactgctttcagccagcagtcaaaagggcgaaattacaagagtccattgaatatgaagacttggggaaaaataattctgtaaaaacgattgcactaaacctcaagaagtcagataggtattatcatggtccaactccaatccagtcactacagtatgcaacaagtcaggacattattaattcttttcaaagtattagacaagaaatggaagcttatacacccaagttaactcaggttctctcaagtagtgctgccagtagtaccatcacagcactgtcacctggaggggcacttatgcagggaggaacacagcaagccataaaccagatggtgccaaatgatattcaatctgaattgaaacacttatatgtagctgttggagaacttctacgacatttctggtcctgctttcctgttaatacgccattcctagaagaaaaggtagtgaaaatgaaaagtaatttggaacgattccaagttacgaagctctgtccattccaagaaaagattcggagacagtatttaagcacaaatttggtaagtcacatagaagagatgctccagacagcctacaacaagctccacacatggcagtcacggcgtctgatgaagaaaacgtgaggtggccatgatgcttacaggttttgtgagattgagagaactatgacctgcagcaactctggaaacctggcctgacagacaagcagatgacctcacaggagtgataagaaacatctgctccacgccaactcccagagctgatgctattgtacttgcacattggagactgaaaggaaagaagggactaaatgctggggaggtaaattaagacagaaccaaatgagctaagttgcaaatatatatatatacacacacacacatatatgtacatgtgtatgtacatatatattttaaaagactgtttactgcagttgctcaggaactgcttttgattcacattaagctgctttcagaaattaaaaaaacactttttaaagggtgcattgat

SEQ ID NO: 294403 - DNA, 3281 bp, Homo sapiens
tccgcgtggtccctccccctcaggccgcggtcgcgattacgctctctacggcctgcgaccgcagggccgttgcgggctggagacacggcgccgactggaaccggaggagctctaggccaaatggttgggccagccaggatcccaggacccttcgccgctcgagaccggagagaggaaacgaaacaggcgggaacccgtgggggagggagggaactagcggaaggtgtcatggcggccgcgctcttgagtcacgtgcccagggcccgccttgctacttccggtcacgtgccctcagactcctcgcagccagcgatggaggcgagaccccctagtaacagaggcggtggctactgctgcggccactgggtttcggcctcttcccagcagcggctctaagaagcgcagcggaactcgaccggatccaacccagttagttacttcctgtctagagttgtagcttccacctgagttctcctgggaagaagtgtttgccactcaaggaatacactcaagaaaaacctggaaatcacagaaggcattgtaagatagctacagtgattctgttaaacctcctgaaattggtccttgaacaattaagaggtgctacagatgaccaggaaaatttaccaggcaaattagctgtgagacaattgaccatttgtgcccaatgttcgcaccttctagccaccatggcaacctcatctgaagaagttttgctgattgtaaagaaagtgcgtcaaaagaagcaggatggagctctgtacctcatggcagaaagaattgcttgggcacctgaaggcaaagatagatttacaatcagccatatgtatgcagatattaaatgccagaaaattagtccagaaggaaaagctaaaattcagcttcagctggtcctacatgcaggggacacaactaacttccatttttccaatgaaagcacagcagtgaaagagcgagatgcagtaaaagaccttcttcagcagctgctgcccaaattcaagaggaaagcaaataaagaactggaagagaagaacagaatgctgcaagaagatcctgttttgtttcagctttataaagaccttgttgtgagtcaagtgatcagtgctgaggaattctgggccaatcgtttaaatgtgaatgcaacagatagttcttccacatccaatcataagcaggatgttggcatttctgctgcatttctggctgatgtccggccccaaactgatggctgtaacggtctaagatataatttaacttctgatatcattgagtccatatttaggacctatccagcagtaaaaatgaaatatgcagaaaatgttccccacaacatgacagagaaggaattctggacacgttttttccagtcccattattttcacagggatcggctgaatacagggtcaaaggatctctttgcagaatgtgccaaaatagatgaaaaaggcctaaaaacaatggtttcattaggagtgaaaaacccactactagatttaacagctttggaagataaaccattagatgagggctatggcatttcctctgtgccatctgcttccaattctaaatccataaaagagaatagtaatgctgccatcatcaagagatttaaccatcacagtgccatggtcctggcagctggactcagaaaacaagaagcacaaaatgaacaaactagtgagcccagcaacatggatggaaattccggagatgcagactgctttcagccagcagtcaaaagggcgaaattacaagagtccattgaatatgaagacttggggaaaaataattctgtaaaaacgattgcactaaacctcaagaagtcagataggtattatcatggtccaactccaatccagtcactacagtatgcaacaagtcaggacattattaattcttttcaaagtattagacaagaaatggaagcttatacacccaagttaactcaggttctctcaagtagtgctgccagtagtaccatcacagcactgtcacctggaggggcacttatgcagggaggaacacagcaagccataaaccagatggtgccaaatgatattcaatctgaattgaaacacttatatgtagctgttggagaacttctacgacatttctggtcctgctttcctgttaatacgccattcctagaagaaaaggtagtgaaaatgaaaagtaatttggaacgattccaagttacgaagctctgtccattccaagaaaagattcggagacagtatttaagcacaaatttggtaagtcacatagaagagatgctccagacagcctacaacaagctccacacatggcagtcacggcgtctgatgaagaaaacgtgaggtggccatgatgcttacaggttttgtgagattgagagaactatgacctgcagcaactctggaaacctggcctgacagacaagcagatgacctcacaggagtgataagaaacatctgctccacgccaactcccagagctgatgctattgtacttgcacattggagactgaaaggaaagaagggactaaatgctggggaggtaaattaagacagaaccaaatgagctaagttgcaaatatatatatatacacacacacacatatatgtacatgtgtatgtacatatatattttaaaagactgtttactgcagttgctcaggaactgcttttgattcacattaagctgctttcagaaattaaaaaaacactttttaaagggtgcattgataaaatctgaggttttttggttgtcgtttttttctgtgtacatttttttcctaagtttatggcacagggtagaccttaagtattcctcctccatccttcattcttcaccctccattggatcctcaagttttaatgaattccaattataccttacatcagcaagttaaaaaaagtactttaaaataaagcaaagggagactgttgctcaaccatcaggaaacagttgtcagaagacatcattggttctgtgtttcctacggaaataagaaacgataaatattgcactgaatgtttgtggtttggagtccctgaataataaagaggcaatatatttgcagaaagtcgcatagggttttttaatgcagaattttgtcagaagacaatggcgctgcatgtttttctttgagtgcaaatgtacattgctaagatttttttaagatggcatgtgctttgaaaagaagatattgcatttttaagagtttaaaaatcttatgagtgagaaatattaaaaaaatcttattttcacctctttagaagaaataaaagatgtttctccta

SEQ ID NO: 294404 - DNA, 2675 bp, Homo sapiens
agaagtgctgcatgacaagagtaccaaagaaggaagcagagtgttagtgagtttgatgagcatgctctggttgtatgggatcatttaagaagagtgcattctacaaaagcatcagtgttggaatagggcagttaaagcccaaaggaatcctgaatcatcttgggagaagtaacttactgtatggttattcccacagtgtgagtgtcgtcatctaactgccctcatgcttctttttaggccagaaaattagtccagaaggaaaagctaaaattcagcttcagctggtcctacatgcaggggacacaactaacttccatttttccaatgaaagcacagcagtgaaagagcgagatgcagtaaaagaccttcttcagcagctgctgcccaaattcaagaggaaagcaaataaagaactggaagagaagaacagaatgctgcaagaagatcctgttttgtttcagctttataaagaccttgttgtgagtcaagtgatcagtgctgaggaattctgggccaatcgtttaaatgtgaatgcaacagatagttcttccacatccaatcataagcaggatgttggcatttctgctgcatttctggctgatgtccggccccaaactgatggctgtaacggtctaagatataatttaacttctgatatcattgagtccatatttaggacctatccagcagtaaaaatgaaatatgcagaaaatgttccccacaacatgacagagaaggaattctggacacgttttttccagtcccattattttcacagggatcggctgaatacagggtcaaaggatctctttgcagaatgtgccaaaatagatgaaaaaggcctaaaaacaatggtttcattaggagtgaaaaacccactactagatttaacagctttggaagataaaccattagatgagggctatggcatttcctctgtgccatctgcttccaattctaaatccataaaagagaatagtaatgctgccatcatcaagagatttaaccatcacagtgccatggtcctggcagctggactcagaaaacaagaagcacaaaatgaacaaactagtgagcccagcaacatggatggaaattccggagatgcagactgctttcagccagcagtcaaaagggcgaaattacaagagtccattgaatatgaagacttggggaaaaataattctgtaaaaacgattgcactaaacctcaagaagtcagataggtattatcatggtccaactccaatccagtcactacagtatgcaacaagtcaggacattattaattcttttcaaagtattagacaagaaatggaagcttatacacccaagttaactcaggttctctcaagtagtgctgccagtagtaccatcacagcactgtcacctggaggggcacttatgcagggaggaacacagcaagccataaaccagatggtgccaaatgatattcaatctgaattgaaacacttatatgtagctgttggagaacttctacgacatttctggtcctgctttcctgttaatacgccattcctagaagaaaaggtagtgaaaatgaaaagtaatttggaacgattccaagttacgaagctctgtccattccaagaaaagattcggagacagtatttaagcacaaatttggtaagtcacatagaagagatgctccagacagcctacaacaagctccacacatggcagtcacggcgtctgatgaagaaaacgtgaggtggccatgatgcttacaggttttgtgagattgagagaactatgacctgcagcaactctggaaacctggcctgacagacaagcagatgacctcacaggagtgataagaaacatctgctccacgccaactcccagagctgatgctattgtacttgcacattggagactgaaaggaaagaagggactaaatgctggggaggtaaattaagacagaaccaaatgagctaagttgcaaatatatatatatacacacacacacatatatgtacatgtgtatgtacatatatattttaaaagactgtttactgcagttgctcaggaactgcttttgattcacattaagctgctttcagaaattaaaaaaacactttttaaagggtgcattgataaaatctgaggttttttggttgtcgtttttttctgtgtacatttttttcctaagtttatggcacagggtagaccttaagtattcctcctccatccttcattcttcaccctccattggatcctcaagttttaatgaattccaattataccttacatcagcaagttaaaaaaagtactttaaaataaagcaaagggagactgttgctcaaccatcaggaaacagttgtcagaagacatcattggttctgtgtttcctacggaaataagaaacgataaatattgcactgaatgtttgtggtttggagtccctgaataataaagaggcaatatatttgcagaaagtcgcatagggttttttaatgcagaattttgtcagaagacaatggcgctgcatgtttttctttgagtgcaaatgtacattgctaagatttttttaagatggcatgtgctttgaaaagaagatattgcatttttaagagtttaaaaatcttatgagtgagaaatattaaaaaaatcttattttcacctctttagaagaaataaaagatgtttctccta

SEQ ID NO: 294405 - DNA, 1638 bp, Homo sapiens
aagctcactagcagcattcgtaatggtgcgcggacactagcccagataatgtgaacttgttcatagcatgtatcctaggagatcctgttcatgacttagctgctaggtatctcaccaagtaaaaaacgtccccggctgtaaaacgaatgtcctgaacccttccaaatgcagttcggtgttcttaaggggcatcttctcaatcagagagtcctaagcgaagtgtcgactatgctcaagtgacgtccccgcacttgttttcaaagtattagacaagaaatggaagcttatacacccaagttaactcaggttctctcaagtagtgctgccagtagtaccatcacagcactgtcacctggaggggcacttatgcagggaggaacacagcaagccataaaccagatggtgccaaatgatattcaatctgaattgaaacacttatatgtagctgttggagaacttctacgacatttctggtcctgctttcctgttaatacgccattcctagaagaaaaggtagtgaaaatgaaaagtaatttggaacgattccaagttacgaagctctgtccattccaagaaaagattcggagacagtatttaagcacaaatttggtaagtcacatagaagagatgctccagacagcctacaacaagctccacacatggcagtcacggcgtctgatgaagaaaacgtgaggtggccatgatgcttacaggttttgtgagattgagagaactatgacctgcagcaactctggaaacctggcctgacagacaagcagatgacctcacaggagtgataagaaacatctgctccacgccaactcccagagctgatgctattgtacttgcacattggagactgaaaggaaagaagggactaaatgctggggaggtaaattaagacagaaccaaatgagctaagttgcaaatatatatatatacacacacacacatatatgtacatgtgtatgtacatatatattttaaaagactgtttactgcagttgctcaggaactgcttttgattcacattaagctgctttcagaaattaaaaaaacactttttaaagggtgcattgataaaatctgaggttttttggttgtcgtttttttctgtgtacatttttttcctaagtttatggcacagggtagaccttaagtattcctcctccatccttcattcttcaccctccattggatcctcaagttttaatgaattccaattataccttacatcagcaagttaaaaaaagtactttaaaataaagcaaagggagactgttgctcaaccatcaggaaacagttgtcagaagacatcattggttctgtgtttcctacggaaataagaaacgataaatattgcactgaatgtttgtggtttggagtccctgaataataaagaggcaatatatttgcagaaagtcgcatagggttttttaatgcagaattttgtcagaagacaatggcgctgcatgtttttctttgagtgcaaatgtacattgctaagatttttttaagatggcatgtgctttgaaaagaagatattgcatttttaagagtttaaaaatcttatgagtgagaaatattaaaaaaatcttattttcacctctttagaagaaataaaagatgtttctccta

SEQ ID NO: 294406 - DNA, 2450 bp, Homo sapiens
tccgcgtggtccctccccctcaggccgcggtcgcgattacgctctctacggcctgcgaccgcagggccgttgcgggctggagacacggcgccgactggaaccggaggagctctaggccaaatggttgggccagccaggatcccaggacccttcgccgctcgagaccggagagaggaaacgaaacaggcgggaacccgtgggggagggagggaactagcggaaggtgtcatggcggccgcgctcttgagtcacgtgcccagggcccgccttgctacttccggtcacgtgccctcagactcctcgcagccagcgatggaggcgagaccccctagtaacagaggcggtggctactgctgcggccactgggtttcggcctcttcccagcagcggctctaagaagcgcagcggaactcgaccggatccaacccagttagttacttcctgtctagagttgtagcttccacctgcaccttctagccaccatggcaacctcatctgaagaagttttgctgattgtaaagaaagtgcgtcaaaagaagcaggatggagctctgtacctcatggcagaaagaattgcttgggcacctgaaggcaaagatagatttacaatcagccatatgtatgcagatattaaatgccagaaaattagtccagaaggaaaagctaaaattcagcttcagctggtcctacatgcaggggacacaactaacttccatttttccaatgaaagcacagcagtgaaagagcgagatgcagtaaaagaccttcttcagcagctgctgcccaaattcaagaggaaagcaaataaagaactggaagagaagaacagaatgctgcaagaagatcctgttttgtttcagctttataaagaccttgttgtgagtcaagtgatcagtgctgaggaattctgggccaatcgtttaaatgtgaatgcaacagatagttcttccacatccaatcataagcaggatgttggcatttctgctgcatttctggctgatgtccggccccaaactgatggctgtaacggtctaagatataatttaacttctgatatcattgagtccatatttaggacctatccagcagtaaaaatgaaatatgcagaaaatgttccccacaacatgacagagaaggaattctggacacgttttttccagtcccattattttcacagggatcggctgaatacagggtcaaaggatctctttgcagaatgtgccaaaatagatgaaaaaggcctaaaaacaatggtttcattaggagtgaaaaacccactactagatttaacagctttggaagataaaccattagatgagggctatggcatttcctctgtgccatctgcttccaattctaaatccataaaagagaatagtaatgctgccatcatcaagagatttaaccatcacagtgccatggtcctggcagctggactcagaaaacaagaagcacaaaatgaacaaactagtgagcccagcaacatggatggaaattccggagatgcagactgctttcagccagcagtcaaaagggtatgggcaaaaaaatatgaaccatttggggctcaagtttctccaaatactttatgtgactgcaagtactgtatacgcttatttcctgtgactcagttcttctaactaagatgttaagcatttggcttaaagtgtatagcattacaaagagtatttccccagctttggcttgccagccaactttccattgactctagcctgttagccatttttattgttttttgtttgtttgtttgtttgttttcctcacatgtacacatacatacagattgttcttatatgtgattttgttctctgggaataaaatcttcattcaacagaggcaatatgacagaaaaaccgaagtttcatgtatatgatttttcaaagaaagtgaattggccctcatgttaaacctagcatttcagagctgaaagtgtcttctcattaaatattgaagaaatcatttgagggtgtggagaaggatggacagaattagctgcttgtgtatttattcttctcctgcaactttgccacgctattttgtacctcccttcctaattatgataaagctttcttagagagcagtcaggcaatgtgtattaaatgtttaaagctttacacccttagttctacttgtggacatttatttcttaagaaagatgtatactaagatttagatagaaatattcattacagtatcataataaagacagtagcaaggattctgttatctgtgttgcattaatacaatagagattgatgcaactgttcattattttgaaagcattaatgataatattgcatcaaagagttcactgaacagattgtacagtacagttttacacacaaaaaaaatagtttgtgagctttaaaagggccttcaaatgaatatgctaaacggttatctttcaataaagagagtatgggtaagtc

SEQ ID NO: 294407 - DNA, 1458 bp, Homo sapiens
tccgcgtggtccctccccctcaggccgcggtcgcgattacgctctctacggcctgcgaccgcagggccgttgcgggctggagacacggcgccgactggaaccggaggagctctaggccaaatggttgggccagccaggatcccaggacccttcgccgctcgagaccggagagaggaaacgaaacaggcgggaacccgtgggggagggagggaactagcggaaggtgtcatggcggccgcgctcttgagtcacgtgcccagggcccgccttgctacttccggtcacgtgccctcagactcctcgcagccagcgatggaggcgagaccccctagtaacagaggcggtggctactgctgcggccactgggtttcggcctcttcccagcagcggctctaagaagcgcagcggaactcgaccggatccaacccagttagttacttcctgtctagagttgtagcttccacctgcaccttctagccaccatggcaacctcatctgatgaagaaaacgtgaggtggccatgatgcttacaggttttgtgagattgagagaactatgacctgcagcaactctggaaacctggcctgacagacaagcagatgacctcacaggagtgataagaaacatctgctccacgccaactcccagagctgatgctattgtacttgcacattggagactgaaaggaaagaagggactaaatgctggggaggtaaattaagacagaaccaaatgagctaagttgcaaatatatatatatacacacacacacatatatgtacatgtgtatgtacatatatattttaaaagactgtttactgcagttgctcaggaactgcttttgattcacattaagctgctttcagaaattaaaaaaacactttttaaagggtgcattgataaaatctgaggttttttggttgtcgtttttttctgtgtacatttttttcctaagtttatggcacagggtagaccttaagtattcctcctccatccttcattcttcaccctccattggatcctcaagttttaatgaattccaattataccttacatcagcaagttaaaaaaagtactttaaaataaagcaaagggagactgttgctcaaccatcaggaaacagttgtcagaagacatcattggttctgtgtttcctacggaaataagaaacgataaatattgcactgaatgtttgtggtttggagtccctgaataataaagaggcaatatatttgcagaaagtcgcatagggttttttaatgcagaattttgtcagaagacaatggcgctgcatgtttttctttgagtgcaaatgtacattgctaagatttttttaagatggcatgtgctttgaaaagaagatattgcatttttaagagtttaaaaatcttatgagtgagaaatattaaaaaaatcttattttcacctctttagaagaaataaaagatgtttctccta

SEQ ID NO: 294408 - DNA, 1049 bp, Homo sapiens
tccgcgtggtccctccccctcaggccgcggtcgcgattacgctctctacggcctgcgaccgcagggccgttgcgggctggagacacggcgccgactggaaccggaggagctctaggccaaatggttgggccagccaggatcccaggacccttcgccgctcgagaccggagagaggaaacgaaacaggcgggaacccgtgggggagggagggaactagcggaaggtgtcatggcggccgcgctcttgagtcacgtgcccagggcccgccttgctacttccggtcacgtgccctcagactcctcgcagccagcgatggaggcgagaccccctagtaacagaggcggtggctactgctgcggccactgggtttcggcctcttcccagcagcggctctaagaagcgcagcggaactcgaccggatccaacccagttagttacttcctgtctagagttgtagcttccacctgcaccttctagccaccatggcaacctcatctgaagaagttttgctgattgtaaagaaagtgcgtcaaaagaagcaggatggagctctgtacctcatggcagaaagaattgcttgggcacctgaaggcaaagatagatttacaatcagccatatgtatgcagatattaaatgccagaaaattagtccagaaggaaaagctaaaattcagcttcagctggtcctacatgcaggggacacaactaacttccatttttccaatgaaagcacagcagtgaaagagcgagatgcagtaaaagaccttcttcagcagctgctgcccaaattcaagaggaaagcaaataaagaactggaagagaagaacagaatgctgcaagaagatcctgttttgtttcagctttataaagaccttgttgtgagtcaagtgatcagtgctgaggaattctgggccaatcgtttaaatgtgaatgcaacagatagttcttccacatccaatcataagcaggatgttggcatttctgctgcatttctggtatgtgagccttctagatttctgaagaaaataaaaattcaaaccccaaaatgt

SEQ ID NO: 294409 - DNA, 420 bp, Homo sapiens
gcggccgcctactactactactactactactgctcgaattcaagcttctaacgatgtacggggacatgtgctttgaaaagaagatattgcatttttaagagtttaaaaatcttatgagtgagaaatattaaaaaaatcttattttcacctctttagaagaaataaaagatgtttctcctatctccttttctctagtatttgactgttactgtccttggcgaatcgataatcattgcatagtgactgaaaagcctaagtgcaaaaaaaaaaaaaaaaagatgttcttgtttctgaacttcgtgccatattttgttcctgatgggatcaacttaatgtttaagactttagatgtcttgtattaaaaattacacaaaaaaagtaaaactttttatacttacccttttaactctaaaaaaaaac

SEQ ID NO: 294410 - DNA, 309 bp, Homo sapiens
atccttttctgtttaaaatttaggcttctcaggaagcaaaaatgatcaaacccatgacaataaatgtggatctttctgctgttgctttcttattgcccttatgggaattaaattattttattgaaatctctttacttatcgtttcttgccttgaggggaacttagtactgactgctaaaatgttgcaaagacaaatgttgagcatctttactgtgtgtgattagtaatttcttctgtgctaacctgcaggtattatcatggtccaactccaatccagtcactacagtatgcaacaagtcaggacattat

SEQ ID NO: 294411 - DNA, 548 bp, Homo sapiens
gtaactgtttatctctgatagacactggtatttaacttgccaccctctagacattataagtgttaatttctgagacagataagacatgctgaactttttattttgttgattttctaggcctaaaaacaatggtttcattaggagtgaaaaacccactactagatttaacagctttggaagataaaccattagatgaggtaagaagcaataaaagaagttttgagagaaaagagtcttttcctagtcttcaacattgtcttaagcgtagtagacctattccacttgtgagaatgtcaaataagcaaaatactgttacttgaagtgatttatcggaagtgctttgaaatagcgttgtttgccattaaaattgcctagaagaaatgaaattcctgtgtgagttgctaaaaccttttaaaaataaatttctagctccctcatccgcagttctctagtaataataaaggcttaatgtgatgagttcagctttatgctctagctaacatttaatctaaagaaatatggataaattaataaataaggaagataac

SEQ ID NO: 294412 - DNA, 333 bp, Homo sapiens
ttttgcatttcaacatgcctggttcaaactagctaaaaaacgtataatttactaacaccaaacaacaaaaacaaaggctaaagcaaaacaaaacctagagtttcccaataaggtttgaataataagttattttgcaatgaatattaaagcaatctgtaccttttaaaattcaaagttacttctttcattgaagaatgtagcccaagagatggctggcaggttcagtcactttctaatgcaaaaactacttgataaggaatctttttcacagcgattccctgatgcatctaatgtgtcaaaaataattaggttttggcagatttatcattgcag

SEQ ID NO: 294413 - DNA, 760 bp, Homo sapiens
tcaaagacaacttctaaacagaacaaagcattcctccataagttaaaaaaaaaaaaaagtgatcagtactggttagagagataatttatgaattattttaacaaagacacaagtgttcttactatttttccacccagggaacgggtttggctttcttgttctctccgctacttcccgcactggcagctactcctcgatccttggtcagcgggggtttagtactgatggatgtacctttaagaaatgcttgcatggtacttcaccctgtctctactaaaaatacaaaaaattagccaggtgtggtggtgggcacctgtaatccctactatttgggaggctgaggcaggataatcacctgaacccaggaggtggaggttgcagtgagtcgagaccatgccactgcacgccagcctgggcaacagagtgagactccgtctcaaaaatagtaataataataataatactttccacctattgtaatgagaagaaggaggaacagattacatatttggatttaagtagaactcctgacctagtatttatagccagtttacagaaacttttgttttcttcacttctgtatcccagcccctaaaatggaagcctctgcttgtagagatctcagtttatctacaaaataagggagttaaactagattattctcaggtaactttagttccagggttctatgacttatataagtgggtgattttttttcaaagacaacttctaaacagaacaaagcattcctccataagtt

SEQ ID NO: 294414 - DNA, 638 bp, Homo sapiens
cgcgggccggggcgccgagcagagcgacgccgacttttggagcagtttgcgcctgcgcggaacgcgtggccggcttccggaatcctaccgggacttttccggtagcgaagcccgcgcctgtgccaaggcttgcgagcagaatgccttcgcgatggacgcccgcattccacccccttgaccgctgggacccctagtggcgggtgggtggagcgcgctccatttacctgctggttacctcgtgaggcgcctcagattcttctggagctggagatgaactcggacctcaaggcccagctcagggaactgattattacagcagcgagggaaactgaagttggtggtggtgagaaagttatcatgggcaggtgcagcagctcacgcctggaatcccagcactgtggggagctgaggcgggaagatcacgaggtcaggagctcaagaccagcgtggccaacatggtgaaaccccgtctctactaaaaatacaaaaattagctgggtgtggtggcacgtgcctgtaatcccagctactcagggggccgaagcaggagaatcgcttgaacccgggaggcagaggctgcagtgagccaagattgcgccactgcactccagcctgggcaacaaagcgagactccatct

SEQ ID NO: 294415 - DNA, 923 bp, Homo sapiens
gaggttgcagtcagctgagatggcaccactgtaccccagcctgggcgacaagacagagacttctctgggctgccagaggctccggaagccgggtgcctcaggccgtggcagttccgtcactctccaacgcctcccccacagacttctttttgctaaatggtatcaagattttctcgttgttgtcagcaagagagttggttttctaacatctcatcgaccatggctggaggtcaaatcgatgttttaaacttgctggaaataaacggttcctttcttgcatggctcgatgagcaataaggttcctctgtgtcattttgtttacgatttttaggattgctttttaaagccggacacggcggctgatggctgtaatcccagcactttaggaggccgaggcaggaggatcacttgagataaggagttcaggaccagcatgggcaacacagcgagaccccatctctatagaaaacacaaaaatgaggctgggggtgctcatacacgcactgagggttgaccctggtgttcttgccttctcagattcttctggagctggagatgaactcggacctcaaggcccagctcagggaactgattattacagcagcgagggaaactgaagttggtggtggtgagaaagttatcatgggcaggtgcagcagctcacgcctggaatcccagcactgtggggagctgaggcgggaagatcacgaggtcaggagctcaagaccagcgtggccaacatggtgaaaccccgtctctactaaaaatacaaaaattagctgggtgtggtggcacgtgcctgtaatcccagctactcagggggccgaagcaggagaatcgcttgaacccgggaggcagaggctgcagtgagccaagattgcgccactgcactccagcctgggcaacaaagcgagactccatct

SEQ ID NO: 294416 - DNA, 701 bp, Homo sapiens
ttttttgaaccactgctaacaatcactaatgttcactaaaacactaggcttcaggagcatttggaaataattcctgaccgcacaaagaaacatgctggtgagagacagtgaccaagcccaggagaccaccatgagttccagaaaaagtgagagagagcggccacttttcctgtctcggagatacctcctactcaggacgcaggaagcatggggcagggcagcgccatggacaaggcgactcggtgcagggcctgcgggacctgcaggtgagaggaagcacaagctccagctcctcagctgtggaacgctgcgtgcgcggtgcacagctaccagctcggatgggtatttgagaatttaccgcactgacttggaccagacggaaagcagagaagagggagagctacacctgactgtccaccatccccgccagccccaacgtcggcttttcacttcatgtttggggacaattacacctcctcatgacagatcagaagtttcagaaaaaaggtccgctgatttccgcaacagggtatgaggtggccagctgctgatgccagctgcatggactcctatacttgctggtaacataacctcattcctttgtatttgccaccaaaaagtctccagtctttttttttttttttttttttgggggatcccttaaaattcccccggggggtttaaaatttggaaagggcccg

SEQ ID NO: 294417 - DNA, 1001 bp, Homo sapiens
ttttttgaaccactgctaacaatcactaatgttcactaaaacactaggcttcaggagcatttggaaataattcctgaccgcacaaagaaacatgctggtgagagacagtgaccaagcccaggagaccaccatgagttccagaaaaagtgagagagagcggccacttttcctgtctcggagatacctcctactcaggacgcaggaagcatggggcagggcagcgccatggacaaggcgactcggtgcagggcctgcgggacctgcaggtgagaggaagcacaagctccagctcctcagctgtggaacgctgcgtgcgcggtgcacagctaccagctcggatgggtatttgagaatttaccgcactgacttggaccagacggaaagcagagaagagggagagctacacctgactgtccaccatccccgccagccccaacgtcggcttttcacttcatgtttggggacaattacacctcctcatgacagatcagaagtttcagaaaaaaggtccgctgatttccgcaacagggtatgaggtggccagctgctgatgccagctgcatggactcctatacttgctggtaacataacctcattcctttgtatttgccaccaaaaagtctccagtctttttttttttttttttttttttgagacggagtctcactctgtagcccaagctggagtgcagtggcacaatctcgggaaaaataaaatacataggcagggcgcggtggctcacgcctggaatcccagcactgtggggagctgaggcgggaagatcacgaggtcaggagctcaagaccagcgtggccaacatggtgaaaccccgtctctactaaaaatacaaaaattagctgggtgtggtggcacgtgcctgtaatcccagctactcagggggccgaagcaggagaatcgcttgaacccgggaggcagaggctgcagtgagccaagattgcgccactgcactccagcctgggcaacaaagcgagactccatct

SEQ ID NO: 294418 - DNA, 967 bp, Homo sapiens
ttttttgaaccactgctaacaatcactaatgttcactaaaacactaggcttcaggagcatttggaaataattcctgaccgcacaaagaaacatgctggtgagagacagtgaccaagcccaggagaccaccatgagttccagaaaaagtgagagagagcggccacttttcctgtctcggagatacctcctactcaggacgcaggaagcatggggcagggcagcgccatggacaaggcgactcggtgcagggcctgcgggacctgcaggtgagaggaagcacaagctccagctcctcagctgtggaacgctgcgtgcgcggtgcacagctaccagctcggatgggtatttgagaatttaccgcactgacttggaccagacggaaagcagagaagagggagagctacacctgactgtccaccatccccgccagccccaacgtcggcttttcacttcatgtttggggacaattacacctcctcatgacagatcagaagtttcagaaaaaaggtccgctgatttccgcaacagggtatgaggtggccagctgctgatgccagctgcatggactcctatacttgctgattcttctggagctggagatgaactcggacctcaaggcccagctcagggaactgattattacagcagcgagggaaactgaagttggtggtggtgagaaagttatcatgggcaggtgcagcagctcacgcctggaatcccagcactgtggggagctgaggcgggaagatcacgaggtcaggagctcaagaccagcgtggccaacatggtgaaaccccgtctctactaaaaatacaaaaattagctgggtgtggtggcacgtgcctgtaatcccagctactcagggggccgaagcaggagaatcgcttgaacccgggaggcagaggctgcagtgagccaagattgcgccactgcactccagcctgggcaacaaagcgagactccatct

SEQ ID NO: 294419 - DNA, 1700 bp, Homo sapiens
cccatgaggccaaggcctccagtgctcaccgatgccctctgcgaagttggggtagaactcgtcagtgaagaggggctcgggcagctcacggaagtacagcttcagcatgcctgcgatggcgttcacgtccatctcgctcatcatcactgacacgtccttgttatctggaaagagcacggaaatgcagcggcctccttgaagatcctgataaatgaagaaaagacacagagaaggatgtgacatgcctgggccatggagcactctgagatctcatcgtggacaccactgcccacacctccatcccgtcctgcgcaggccgacactcactgacgttgaagcctgccttcagtgcctggatgtctgcggccaccccagacatgcggtagatgcccacctcctccatgcctcggcgctcgatctcctccacgcactgacgcacgatgtagggcaccttggacctctctctcctgcgggaggagggaatgttctcagtgtcctaacagccctgcttgggccataacacaggagacctgctccctatctgcacacccggaggtggggtgaggacggtgacgaaggtacccaggtctggggctgcacacagagccttctgcatgcctgtcctccctctgcaagctctgtcctcattgcatgtactttctcaggaacctttcaagcggccagaaccctgcgaatcacacatgacctttgcgggaaggtcaggaggcctgtctaagtcaagtcagcacgggaagggcatctgacagattccaggcctggggttagcagcctgtgaccccggctgggaggtcagagccggtgttggtcctgccacccacgtgctgtgtgagaggagaatccctgacccctgccctgggccttaacacacatccgacgaatgaatgaagggttgcctcagcaccggtgctccaagtcctgcgatgctaagtgcttttctcctctgagtcttagcaatggacaattccaatacctccacacaggacactagagtaagaatccttcacagttagaacgcagtgctgtgcggaggccttaacttgagttctgttttgcacctggatttaccagcacatcaaagctgcttcgcaagccccctcatcagcagggcttatgtgggggagctgctgatggagtcctcgctgctcatgcccacagccctcccagagtgctatgcgagtggctgccgtgcagttgggggtggggcgtggtgtttagacacagataggagtccagggtatgactgatggaggccccggcccacgtgaccagcaaggtcagaggcccagccagattccatcctggggaagcaaatgaattctcagaggaagtggtctgtgtctgtatgaactgctctcaaaccaacaaataggcttctcttggcaactgactcgtgacaaagggttcaagattgtttgaaaaaaaaaaaaaagggggggaacagggaggcagtaggtcctggaaaagtaaattctttattttacaataagaaagtgattacatattttattttttttacaatggtggaaaattagaagtgattgtgaaaatgatgtctacccgccttgctgatgagtaggatgtgatttggctctttaggaaactgaatttgcagaacttaagaatattgatttataaagggcatggccattgacccagtccatcttatgcaaatctggatg

SEQ ID NO: 294420 - DNA, 815 bp, Homo sapiens
  misc_feature (4)..(4): n is a, c, g, or t
  misc_feature (8)..(8): n is a, c, g, or t
  misc_feature (11)..(11): n is a, c, g, or t
  misc_feature (35)..(35): n is a, c, g, or t
ttantctnttntaggaccgccgccggttcggaatncccgggtgcgacccacgcgtccggctaagtgcttttctcctctgagtcttagcaatggacaattccaatacctccacacaggacactagagtaagaatccttcacagttagaacgcagtgctgtgcggaggccttaacttgagttctgttttgcacctggatttaccagcacatcaaagctgcttcgcaagccccctcatcagcagggcttatgtgggggagctgctgatggagtcctcgctgctcatgcccacagccctcccagagtgctatgcgagtggctgccgtgcagttgggggtggggcgtggtgtttagacacagataggagtccagggtatgactgatggaggccccggcccacgtgaccagcaaggtcagaggcccagccagattccatcctggggaagcaaatgaattctcagaggaagtggtctgtgtctgtatgaactgctctcaaaccaacaaataggcttctcttggcaactgactcgtgacaaagggttcaagattgtttgaaaaaaaaaaaaaagggggggaacagggaggcagtaggtcctggaaaagtaaattctttattttacaataagaaagtgattacatattttattttttttacaatggtggaaaattagaagtgattgtgaaaatgatgtctacccgccttgctgatgagtaggatgtgatttggctctttaggaaactgaatttgcagaacttaagaatattgatttataaagggcatggccattgacccagtccatcttatgcaaatctggatg

SEQ ID NO: 294421 - DNA, 468 bp, Homo sapiens
cactcataggtgggaactgaacaatgagaacacttggacacaggaaggggaacatcacacaccagggcctgttgtggggtgggaagagtggggaagcaaatgaattctcagaggaagtggtctgtgtctgtatgaactgctctcaaaccaacaaataggcttctcttggcaactgactcgtgacaaagggttcaagattgtttgaaaaaaaaaaaaaagggggggaacagggaggcagtaggtcctggaaaagtaaattctttattttacaataagaaagtgattacatattttattttttttacaatggtggaaaattagaagtgattgtgaaaatgatgtctacccgccttgctgatgagtaggatgtgatttggctctttaggaaactgaatttgcagaacttaagaatattgatttataaagggcatggccattgacccagtccatcttatgcaaatctggatg

SEQ ID NO: 294422 - DNA, 2427 bp, Homo sapiens
cgccgagctgggccaatcctcttggtggaggaagctcggctgattctcggctcacgcgggaggggagtaaagggtggcggtccgggcctggagttcagtgggtgcagcctgcttgcgagctgaggccagacaggggggcgcctacggacggaaaagaaaagttgattacaaacgggaccatattttgcttcgaaatggaaccagcagttagcgagccaatgagagaccaagtcgcacggactcatttgacagaggacactcccaaagtgaatgctgacatagaaaaggttaaccagaatcaggccaagagatgcacagtgatcgggggctctggattcctggggcagcacatggtggagcagttgctggcaagaggatatgctgtcaatgtatttgatatccagcaagggtttgataatccccaggtgcggttctttctgggtgacctctgcagccgacaggatctgtacccagctctgaaaggtgtaaacacagttttccactgtgcgtcacccccaccatccagtaacaacaaggagctcttttatagagtgaattacattggcaccaagaatgtcattgaaacttgcaaagaggctggggttcagaaactcattttaaccagcagtgccagtgtcatctttgagggcgtcgatatcaagaatggaactgaagaccttccctatgccatgaaacccattgactactacacagagactaagatcttacaggagagggcagttctgggcgccaacgatcctgagaagaatttcttaaccacagccatccgccctcatggcattttcggcccaagggacccgcagttggtacccatcctcatcgaggcagccaggaacggcaagatgaagttcgtgattggaaatgggaagaacttggtggacttcacctttgtggagaacgtggtccatggacacatcctggcggcagagcagctctcccgagactcgacactgggtgggaaggcatttcacatcaccaatgatgagcccatccctttctggacattcctgtctcgcatcctgacaggcctcaattatgaggcccccaagtaccacatcccctactgggtggcctactacctggccctcctgctatccctgctggtgatggtgatcagtcctgtcatccagctgcagcccaccttcacacccatgcgggtcgcactggctggcacattccactactacagctgcgagagagccaaaaaggccatgggctaccagccactagtgaccatggatgatgctatggagaggaccgtgcagagctttcgccacctgcggagggtcaagtgagggacactggaggctgggctctctcgacacgttgctcagccagtcactccttcccctgtggattgatgaaataacatcctttgaatgagtttgctctgagcctgtgactccttctgctaggcagagagcgcaccctactctttccgtgacgatgagggcggcaaaaacagacatttcttccttcatggaactggatttggatttcttgaagcaggcagcttcatattataccgatttgttctctgaaaaaaaaaaaaaaaaaaaaaaaaaaaaaaaaaaaaaaaaaaaaaaaacaaagacaaaaaaagaaaaaaaaaaaacaaaaagacaaagacagagatgaacactagaaacagaaaagaaaaaaaaacaaaacacgggcggaggataagagaagaatcaataacaagggaggaacacaccacagacaaaccccacgcacacaatacaaacgaagtaagggacgtgtctctatgcagcacatacataatacgcgcctccgtggcgacaagacacaaacagcaaccataacgacaaacaactaaaacaccaccacccaccacattaaccaaacaaccaactactatttatactcctactaaacactcacacctcaccccacccatcaaccacacaaaaacaaaacaacacaaaacacgaacatcacctatcaccactaatcatatgagcagccacacagatggagcagacgccctccgtgtggcggagaagagagcagagagagtaggccgggcgccgcgcgcgcgccgagcaaacaaaaactgggcgggcaggggacgaagagagaccgagacaagggagcagcaagagacggcgacgacgacccaaagagcgggcagcacgcgagggccgcagcgctcggtccgagggggaaggcgcgaggagcgaatcagcgagggagccccgaagcgggacagagagaggaggacggagcggcgagacaggcgcggagagggccggaagggcagcaagtgcgcggcggcgcacacagcgagcaccgcaaagacagggcgagggggcggacatcaggcgagccgcagatgccgaggagacacgccgaagagaagccggcggggctgccagtatacga

SEQ ID NO: 294423 - DNA, 1857 bp, Homo sapiens
cgccgagctgggccaatcctcttggtggaggaagctcggctgattctcggctcacgcgggaggggagtaaagggtggcggtccgggcctggagttcagtgggtgcagcctgcttgcgagctgaggccagacaggggggcgcctacggacggaaaagaaaagttgattacaaacgggaccatattttgcttcgaaatggaaccagcagttagcgagccaatgagagaccaagtcgcacggactcatttgacagaggacactcccaaagtgaatgctgacatagaaaaggttaaccagaatcaggccaagagatgcacagtgatcgggggctctggattcctggggcagcacatggtggagcagttgctggcaagaggatatgctgtcaatgtatttgatatccagcaagggtttgataatccccaggtgcggttctttctgggtgacctctgcagccgacaggatctgtacccagctctgaaaggtgtaaacacagttttccactgtgcgtcacccccaccatccagtaacaacaaggagctcttttatagagtgaattacattggcaccaagaatgtcattgaaacttgcaaagaggctggggttcagaaactcattttaaccagcagtgccagtgtcatctttgagggcgtcgatatcaagaatggaactgaagaccttccctatgccatgaaacccattgactactacacagagactaagatcttacaggagagggcagttctgggcgccaacgatcctgagaagaatttcttaaccacagccatccgccctcatggcattttcggcccaagggacccgcagttggtacccatcctcatcgaggcagccaggaacggcaagatgaagttcgtgattggaaatgggaagaacttggtggacttcacctttgtggagaacgtggtccatggacacatcctggcggcagagcagctctcccgagactcgacactgggtgggaaggcatttcacatcaccaatgatgagcccatccctttctggacattcctgtctcgcatcctgacaggcctcaattatgaggcccccaagtaccacatcccctactgggtggcctactacctggccctcctgctatccctgctggtgatggtgatcagtcctgtcatccagctgcagcccaccttcacacccatgcgggtcgcactggctggcacattccactactacagctgcgagagagccaaaaaggccatgggctaccagccactagtgaccatggatgatgctatggagaggaccgtgcagagctttcgccacctgcggagggtcaagtgagggacactggaggctgggctctctcgacacgttgctcagccagtcactccttcccctgtggattgatgaaataacatcctttgaatgagtttgctctgagcctgtgactccttctgctaggcagagagcgcaccctactctttccgtgacgatgagggcggcaaaaacagacatttcttccttcatggaactggatttggatttcttgaagcaggcagcttcatattataccgatttgttctctgaaaaaaaaaaaaaaatcctattctcttctatccctctcctatctctccacttcctacctttcttctctgtcctatctcttcttttcctgctgtcttcaatcccattatcttccctgctatcattctcttctccttctttattcttctcaactcctctctctcaatctctgtcctctccccttgccttttctttcttcaaatactcatcctcttaccttcttcttccgcctctttacaccctctatgtttatgactttctcatcgtcatcgtccttctctctctatctccctcttca

SEQ ID NO: 294424 - DNA, 1672 bp, Homo sapiens
cgccgagctgggccaatcctcttggtggaggaagctcggctgattctcggctcacgcgggaggggagtaaagggtggcggtccgggcctggagttcagtgggtgcagcctgcttgcgagctgaggccagacaggggggcgcctacggacggaaaagaaaagttgattacaaacgggaccatattttgcttcgaaatggaaccagcagttagcgagccaatgagagaccaagtcgcacggactcatttgacagaggacactcccaaagtgaatgctgacatagaaaaggttaaccagaatcaggccaagagatgcacagtgatcgggggctctggattcctggggcagcacatggtggagcagttgctggcaagaggatatgctgtcaatgtatttgatatccagcaagggtttgataatccccaggtgcggttctttctgggtgacctctgcagccgacaggatctgtacccagctctgaaaggtgtaaacacagttttccactgtgcgtcacccccaccatccagtaacaacaaggagctcttttatagagtgaattacattggcaccaagaatgtcattgaaacttgcaaagaggctggggttcagaaactcattttaaccagcagtgccagtgtcatctttgagggcgtcgatatcaagaatggaactgaagaccttccctatgccatgaaacccattgactactacacagagactaagatcttacaggagagggcagttctgggcgccaacgatcctgagaagaatttcttaaccacagccatccgccctcatggcattttcggcccaagggacccgcagttggtacccatcctcatcgaggcagccaggaacggcaagatgaagttcgtgattggaaatgggaagaacttggtggacttcacctttgtggagaacgtggtccatggacacatcctggcggcagagcagctctcccgagactcgacactgggtgggaaggcatttcacatcaccaatgatgagcccatccctttctggacattcctgtctcgcatcctgacaggcctcaattatgaggcccccaagtaccacatcccctactgggtggcctactacctggccctcctgctatccctgctggtgatggtgatcagtcctgtcatccagctgcagcccaccttcacacccatgcgggtcgcactggctggcacattccactactacagctgcgagagagccaaaaaggccatgggctaccagccactagtgaccatggatgatgctatggagaggaccgtgcagagctttcgccacctgcggagggtcaagtgagggacactggaggctgggctctctcgacacgttgctcagccagtcactccttcccctgtggattgatgaaataacatcctttgaatgagtttgctctgagcctgtgactccttctgctaggcagagagcgcaccctactctttccgtgacgatgagggcggcaaaaacagacatttcttccttcatggaactggatttggatttcttgaagcaggcagcttcatattataccgatttgttctctggaaaaaaataaatacaaaaaactcgaggggggtccccggaccccaaattcgccctataagtgaggtcgtattccaaattaactggccggcgcttttacaaaccgtcgggaa

SEQ ID NO: 294425 - DNA, 1928 bp, Homo sapiens
cgccgagctgggccaatcctcttggtggaggaagctcggctgattctcggctcacgcgggaggggagtaaagggtggcggtccgggcctggagttcagtgggtgcagcctgcttgcgagctgaggccagacaggggggcgcctacggacggaaaagaaaagttgattacaaacgggaccatattttgcttcgaaatggaaccagcagttagcgagccaatgagagaccaagtcgcacggactcatttgacagaggacactcccaaagtgaatgctgacatagaaaaggttaaccagaatcaggccaagagatgcacagtgatcgggggctctggattcctggggcagcacatggtggagcagttgctggcaagaggatatgctgtcaatgtatttgatatccagcaagggtttgataatccccaggtgcggttctttctgggtgacctctgcagccgacaggatctgtacccagctctgaaaggtgtaaacacagttttccactgtgcgtcacccccaccatccagtaacaacaaggagctcttttatagagtgaattacattggcaccaagaatgtcattgaaacttgcaaagaggctggggttcagaaactcattttaaccagcagtgccagtgtcatctttgagggcgtcgatatcaagaatggaactgaagaccttccctatgccatgaaacccattgactactacacagagactaagatcttacaggagagggcagttctgggcgccaacgatcctgagaagaatttcttaaccacagccatccgccctcatggcattttcggcccaagggacccgcagttggtacccatcctcatcgaggcagccaggaacggcaagatgaagttcgtgattggaaatgggaagaacttggtggacttcacctttgtggagaacgtggtccatggacacatcctggcggcagagcagctctcccgagactcgacactgggtgggaaggcatttcacatcaccaatgatgagcccatccctttctggacattcctgtctcgcatcctgacaggcctcaattatgaggcccccaagtaccacatcccctactgggtggcctactacctggccctcctgctatccctgctggtgatggtgatcagtcctgtcatccagctgcagcccaccttcacacccatgcgggtcgcactggctggcacattccactactacagctgcgagagagccaaaaaggccatgggctaccagccactagtgaccatggatgatgctatggagaggaccgtgcagagctttcgccacctgcggagggtcaagtgagggacactggaggctgggctctctcgacacgttgctcagccagtcactccttcccctgtggattgatgaaataacatcctttgaatgagtttgctctgagcctgtgactccttctgctaggcagagagcgcaccctactctttccgtgacgatgagggcggcaaaaacagacatttcttccttcatggaactggatttggatttcttgaagcaggcagcttcatattataccgatttgttctctgtctttttgtgtctctctgtttaccccctcccttgccccctcttctggtttatacatttcattccagtgtccttgtacataatcaaggaagctgtaggaagctacaacccatttgttagttctgatggagaaccatttccatgcagaccaatactagagtgaagcctctagactttgttcaagatactctatcttcaaaatatcccagaagaaaaacagaagctgttaacacacaggtgagactttacatatacatttcatactgacagtgagcttagagcaaaagctgaaagctgaaatgactgtaattcctccccagtctctgttgcttgttcaactccttacatgttccacattctctttcaggt

SEQ ID NO: 294426 - DNA, 1995 bp, Homo sapiens
cgccgagctgggccaatcctcttggtggaggaagctcggctgattctcggctcacgcgggaggggagtaaagggtggcggtccgggcctggagttcagtgggtgcagcctgcttgcgagctgaggccagacaggggggcgcctacggacggataaggaggagcattccaggccgagacgccctcatcagcagagtcacaggagttttggaagtgagagaaaagaaaagttgattacaaacgggaccatattttgcttcgaaatggaaccagcagttagcgagccaatgagagaccaagtcgcacggactcatttgacagaggacactcccaaagtgaatgctgacatagaaaaggttaaccagaatcaggccaagagatgcacagtgatcgggggctctggattcctggggcagcacatggtggagcagttgctggcaagaggatatgctgtcaatgtatttgatatccagcaagggtttgataatccccaggtgcggttctttctgggtgacctctgcagccgacaggatctgtacccagctctgaaaggtgtaaacacagttttccactgtgcgtcacccccaccatccagtaacaacaaggagctcttttatagagtgaattacattggcaccaagaatgtcattgaaacttgcaaagaggctggggttcagaaactcattttaaccagcagtgccagtgtcatctttgagggcgtcgatatcaagaatggaactgaagaccttccctatgccatgaaacccattgactactacacagagactaagatcttacaggagagggcagttctgggcgccaacgatcctgagaagaatttcttaaccacagccatccgccctcatggcattttcggcccaagggacccgcagttggtacccatcctcatcgaggcagccaggaacggcaagatgaagttcgtgattggaaatgggaagaacttggtggacttcacctttgtggagaacgtggtccatggacacatcctggcggcagagcagctctcccgagactcgacactgggtgggaaggcatttcacatcaccaatgatgagcccatccctttctggacattcctgtctcgcatcctgacaggcctcaattatgaggcccccaagtaccacatcccctactgggtggcctactacctggccctcctgctatccctgctggtgatggtgatcagtcctgtcatccagctgcagcccaccttcacacccatgcgggtcgcactggctggcacattccactactacagctgcgagagagccaaaaaggccatgggctaccagccactagtgaccatggatgatgctatggagaggaccgtgcagagctttcgccacctgcggagggtcaagtgagggacactggaggctgggctctctcgacacgttgctcagccagtcactccttcccctgtggattgatgaaataacatcctttgaatgagtttgctctgagcctgtgactccttctgctaggcagagagcgcaccctactctttccgtgacgatgagggcggcaaaaacagacatttcttccttcatggaactggatttggatttcttgaagcaggcagcttcatattataccgatttgttctctgtctttttgtgtctctctgtttaccccctcccttgccccctcttctggtttatacatttcattccagtgtccttgtacataatcaaggaagctgtaggaagctacaacccatttgttagttctgatggagaaccatttccatgcagaccaatactagagtgaagcctctagactttgttcaagatactctatcttcaaaatatcccagaagaaaaacagaagctgttaacacacaggtgagactttacatatacatttcatactgacagtgagcttagagcaaaagctgaaagctgaaatgactgtaattcctccccagtctctgttgcttgttcaactccttacatgttccacattctctttcaggt

SEQ ID NO: 294427 - DNA, 1892 bp, Homo sapiens
cgccgagctgggccaatcctcttggtggaggaagctcggctgattctcggctcacgcgggaggggagtaaagggtggcggtccgggcctggagttcagtgggtgcagcctgcttgcgagctgaggccagacaggggggcgcctacggacggaaaagaaaagttgattacaaacgggaccatattttgcttcgaaatggaaccagcagttagcgagccaatgagagaccaagtcgcacggactcatttgacagaggacactcccaaagtgaatgctgacatagaaaaggttaaccagaatcaggccaagagatgcacagtgatcgggggctctggattcctggggcagcacatggtggagcagttgctggcaagaggatatgctgtcaatgtatttgatatccagcaagggtttgataatccccaggatctgtacccagctctgaaaggtgtaaacacagttttccactgtgcgtcacccccaccatccagtaacaacaaggagctcttttatagagtgaattacattggcaccaagaatgtcattgaaacttgcaaagaggctggggttcagaaactcattttaaccagcagtgccagtgtcatctttgagggcgtcgatatcaagaatggaactgaagaccttccctatgccatgaaacccattgactactacacagagactaagatcttacaggagagggcagttctgggcgccaacgatcctgagaagaatttcttaaccacagccatccgccctcatggcattttcggcccaagggacccgcagttggtacccatcctcatcgaggcagccaggaacggcaagatgaagttcgtgattggaaatgggaagaacttggtggacttcacctttgtggagaacgtggtccatggacacatcctggcggcagagcagctctcccgagactcgacactgggtgggaaggcatttcacatcaccaatgatgagcccatccctttctggacattcctgtctcgcatcctgacaggcctcaattatgaggcccccaagtaccacatcccctactgggtggcctactacctggccctcctgctatccctgctggtgatggtgatcagtcctgtcatccagctgcagcccaccttcacacccatgcgggtcgcactggctggcacattccactactacagctgcgagagagccaaaaaggccatgggctaccagccactagtgaccatggatgatgctatggagaggaccgtgcagagctttcgccacctgcggagggtcaagtgagggacactggaggctgggctctctcgacacgttgctcagccagtcactccttcccctgtggattgatgaaataacatcctttgaatgagtttgctctgagcctgtgactccttctgctaggcagagagcgcaccctactctttccgtgacgatgagggcggcaaaaacagacatttcttccttcatggaactggatttggatttcttgaagcaggcagcttcatattataccgatttgttctctgtctttttgtgtctctctgtttaccccctcccttgccccctcttctggtttatacatttcattccagtgtccttgtacataatcaaggaagctgtaggaagctacaacccatttgttagttctgatggagaaccatttccatgcagaccaatactagagtgaagcctctagactttgttcaagatactctatcttcaaaatatcccagaagaaaaacagaagctgttaacacacaggtgagactttacatatacatttcatactgacagtgagcttagagcaaaagctgaaagctgaaatgactgtaattcctccccagtctctgttgcttgttcaactccttacatgttccacattctctttcaggt

SEQ ID NO: 294428 - DNA, 1733 bp, Homo sapiens
cgccgagctgggccaatcctcttggtggaggaagctcggctgattctcggctcacgcgggaggggagtaaagggtggcggtccgggcctggagttcagtgggtgcagcctgcttgcgagctgaggccagacaggggggcgcctacggacggaaaagaaaagttgattacaaacgggaccatattttgcttcgaaatggaaccagcagttagcgagccaatgagagaccaagtcgcacggactcatttgacagaggacactcccaaagtgaatgctgacatagaaaaggttaaccagaatcaggccaagagatgcacagtgatcgggggctctggattcctggggcagcacatggtggagcagttgctggcaagaggatatgctgtcaatgtatttgatatccagcaagggtttgataatccccaggtgcggttctttctgggtgacctctgcagccgacaggatctgtacccagctctgaaaggtgtaaacacagttttccactgtgcgtcacccccaccatccagtaacaacaaggagctcttttatagagtgaattacattggcaccaagaatgtcattgaaacttccatccgccctcatggcattttcggcccaagggacccgcagttggtacccatcctcatcgaggcagccaggaacggcaagatgaagttcgtgattggaaatgggaagaacttggtggacttcacctttgtggagaacgtggtccatggacacatcctggcggcagagcagctctcccgagactcgacactgggtgggaaggcatttcacatcaccaatgatgagcccatccctttctggacattcctgtctcgcatcctgacaggcctcaattatgaggcccccaagtaccacatcccctactgggtggcctactacctggccctcctgctatccctgctggtgatggtgatcagtcctgtcatccagctgcagcccaccttcacacccatgcgggtcgcactggctggcacattccactactacagctgcgagagagccaaaaaggccatgggctaccagccactagtgaccatggatgatgctatggagaggaccgtgcagagctttcgccacctgcggagggtcaagtgagggacactggaggctgggctctctcgacacgttgctcagccagtcactccttcccctgtggattgatgaaataacatcctttgaatgagtttgctctgagcctgtgactccttctgctaggcagagagcgcaccctactctttccgtgacgatgagggcggcaaaaacagacatttcttccttcatggaactggatttggatttcttgaagcaggcagcttcatattataccgatttgttctctgtctttttgtgtctctctgtttaccccctcccttgccccctcttctggtttatacatttcattccagtgtccttgtacataatcaaggaagctgtaggaagctacaacccatttgttagttctgatggagaaccatttccatgcagaccaatactagagtgaagcctctagactttgttcaagatactctatcttcaaaatatcccagaagaaaaacagaagctgttaacacacaggtgagactttacatatacatttcatactgacagtgagcttagagcaaaagctgaaagctgaaatgactgtaattcctccccagtctctgttgcttgttcaactccttacatgttccacattctctttcaggt

SEQ ID NO: 294429 - DNA, 1149 bp, Homo sapiens
  misc_feature (854)..(854): n is a, c, g, or t
  misc_feature (859)..(859): n is a, c, g, or t
  misc_feature (879)..(879): n is a, c, g, or t
  misc_feature (885)..(887): n is a, c, g, or t
  misc_feature (890)..(890): n is a, c, g, or t
  misc_feature (896)..(897): n is a, c, g, or t
  misc_feature (899)..(900): n is a, c, g, or t
  misc_feature (912)..(915): n is a, c, g, or t
  misc_feature (917)..(917): n is a, c, g, or t
  misc_feature (921)..(925): n is a, c, g, or t
  misc_feature (929)..(931): n is a, c, g, or t
  misc_feature (1115)..(1115): n is a, c, g, or t
cgccgagctgggccaatcctcttggtggaggaagctcggctgattctcggctcacgcgggaggggagtaaagggtggcggtccgggcctggagttcagtgggtgcagcctgcttgcgagctgaggccagacaggggggcgcctacggacggaaaagaaaagttgattacaaacgggaccatattttgcttcgaaatggaaccagcagttagcgagccaatgagagaccaagtcgcacggactcatttgacagaggacactcccaaagtgaatgctgacatagaaaaggttaaccagaatcaggccaagagatgcacagtgatcgggggctctggattcctggggcagcacatggtggagcagttgctggcaagaggatatgctgtcaatgtatttgatatccagcaagggtttgataatccccaggtgcggttctttctgggtgacctctgcagccgacaggatctgtacccagctctgaaaggtgtaaacacagttttccactgtgcgtcacccccaccatccagtaacaacaaggagctcttttatagagtgaattacattggcaccaagaatgtcattgaaacttgcaaagaggctggggttcagaaactcattttaaccagcagtgccagtgtcatctttgagggcgtcgatatcaagaatggaactgaagaccttccctatgccatgaaacccattgactactacacagagactaagatcttacaggagagggcagttctgggcgccaacgatcctgagaagaatttcttaaccacagccatccgccctcatggcattttcggcccaagggacccgcagttggtacccatcctcatcgaggcagccacnaaacnaaacagcaactcactcattncaaatnnnaanaaattnntnnaattaaaatttnnnnanaaannnnnaaannnaaaaataagccaccaacccaccagagaaacccaagacaaaagcccgcccccccaagggacaagaaaaaagccgcccaaaagaaagggagcccaaggaagcgagacaagaagccacccaagaagggagcaccaaaaagacgcaacaagaaaagaagcccgccaagtagtaagccaaagaagcagngaaagcagccgctgccgctgatcgaagcgaagaa

SEQ ID NO: 294430 - DNA, 334 bp, Homo sapiens
ctgacccagatgtataggccccagaccaggttccaagagaggatcactttagatcttacctggctaaaagcagcccaggacggtgaactggggcctttgggaacggactttgaaaggagtgagggggatgtgagcgagcatgaggggcggggagaggtcatcaaaatatactctttttgacacccacacaatgcagataaggaggagcattccaggccgagacgccctcatcagcagagtcacaggagttttggaagtgagaggtatgcttggagaattaaaagggagcgtgtgcaagggctgtggactgacatagacctgcagaagtggagct

SEQ ID NO: 294431 - DNA, 219 bp, Homo sapiens
gggacccgcagttggtacccatcctcatcgaggcagccaggaacggcaagatgaagttcgtgattgggtgagtcagcccacagcggctcttccctagtccttcctggtccatgctcgcattcagagagcacttggcaggagccacatggcattgtagctcttttcttatgtgactgtcttggtccatgcaggctgctgtaacaaaatacctaagactgg

SEQ ID NO: 294432 - DNA, 858 bp, Homo sapiens
gggacgcacatggtcctgttcgtactccaggatggcggcgtaaagggcccgctgctcccgttcctccggggtcagggcgacttggctgcaaaacctcctggggagaaaggcacgcggtgggtgccggggccaggccctccccgcagcggccccaggggcgggcaggagtcccacctgttggcggcctcctggagccgcagccggcgctcctccatctttctctggagctgggtgcagagtcaaggggccgagcgtgggatctgagcgggccctcggttcccaaccccgtcccacacccggagaggccgggacgtcccagggacctcctctcggtgaggggctgtccccagggaggcctcctccagtggcgtcagctctctggaaatgtgacaagctgctgtctagaccccaggaagcccagtggtgtctggacaccagaggagtctctctcatcctcccggattgctctgaggccaggagctttgtgactctgccccctgaagcttctggaagatctcgggtggcagaaaaggagagagctttcctccttcatcggagtatacacggcggtgtcggccggcaggctggggaatgggagcagctgcaggcatggttggcttcaggcgtgttttccctgcaagccatgggtaaccaggggtcaagcggtgggccacatcccacagaggagatgcgggcttgggggatgccccaggagagccgcctactgcaggagacccaccaagcttggcggccgtcgactgggccctctccagacactgctgtgctagcttcagcatcttggaggtgtcggggggcacagtttccccagcttctgggggagggacaagaaggctggtc

SEQ ID NO: 294433 - DNA, 1804 bp, Homo sapiens
  misc_feature (1536)..(1536): n is a, c, g, or t
  misc_feature (1541)..(1541): n is a, c, g, or t
  misc_feature (1557)..(1557): n is a, c, g, or t
  misc_feature (1560)..(1560): n is a, c, g, or t
  misc_feature (1604)..(1604): n is a, c, g, or t
  misc_feature (1607)..(1607): n is a, c, g, or t
  misc_feature (1620)..(1620): n is a, c, g, or t
  misc_feature (1695)..(1695): n is a, c, g, or t
  misc_feature (1745)..(1745): n is a, c, g, or t
  misc_feature (1752)..(1752): n is a, c, g, or t
  misc_feature (1758)..(1758): n is a, c, g, or t
  misc_feature (1770)..(1770): n is a, c, g, or t
cacccaggagccacacagacgcccgggaccagcacaggctcccctctgcaggtcaaggcactcaacactggggtgctgaggacacgggggtgcgccctccaacaagggctgtgctgggacaggcccagctgtgaggccgcagttgacctcccagagggacacgggtctgctgctccagagacgcggccctgccaggagggctccgtgagtgcacactctcctctgggcttcccgggtgcggggcctcccctggcacagcacagcccctcacagcacaggcctcgctgggctctagctctgtatctgtgctcctggcaggccagcaccccatcgcaatgtcctgtgcctctcagggcccagggtgacccctccccagcacagctgccctgcaggactcctgccagtcccattcacgctggcctgcccccagcctgtccccgcaggactcctgccagtccctttcacgctggcctgcccccagcctgtccccgcaggactcctgccagtccctttcacgctggcctgcccccagcctgccatttcagaggcagccttggtaaccaatgctcaaatgaccactgcccaggccagaatctcagaggaggccacaggtccccggtatgttctgatggggcagcctccgtgggggatccctgggccctgaacaccctcctttctcactgtccctccctcccctgcgaagggcatcctcagctgcttctgaaacctggggcgctgtggtgggaaacagcccagacaggctgttctcaacactctctactgcaaactacacacagttttacgtcgccagaaagaccccaaatttctattcaaaaagaccgtaccagtttcagttcccgccaacctcaaaggcagagacaaaaggacggtgtgcccctcctgtaacttcatttcttcggtgactgtgaagctgagggcagagtccacgcctggggacagggctgccaccgcagcggccactgagtccaaccctcgctcctcctcccagagacgacctgcgttccgctcagggacagggctgccaacgcagcggccaccgcacccaacgctcgctcctcctcccagagacaacctgagctctgctcagaagcggcacctcctcatgctggactcactcgggcccacatgtgccaagggggcctggttttggggccggcgggttctgcctgatgctcagagggtaactggatgctgaaaactgtgagtctttcttcaactcaggggaatgtttccagggcacgccaggcctcactcacgcaggcctccgcgacaactgttcagcactgactgagggtgaagtgaaatcctgaaagctgagagccagcgccctcacacgagggctgggacgtaacaaaagcccatcaagagtttatgcccagggctttcttgggccttgaagcatgacgagaccaggacccgtttaggattaaacaagttttactgggggtctgaaaaaactccccaggcctccacaaacaagtggagaaggaactccccaaacctccatgatttagnagaanacaagataagggtaancanctgggcccatttagatcaagtaaatttactgagtcttcagaggnagntcttcaggaccanacctcagttagagatgagaagaattgaatcacgtacgtctttagacgaatgcacactgacacggagacacagagnttagaaggtgtgtaagctctggaaaaactgtaatctggagttggtctggngatcatnccaggncttctccctgtnaccagttacagaaataaaatccctcttcttcccc

SEQ ID NO: 294434 - DNA, 1671 bp, Homo sapiens
  misc_feature (1403)..(1403): n is a, c, g, or t
  misc_feature (1408)..(1408): n is a, c, g, or t
  misc_feature (1424)..(1424): n is a, c, g, or t
  misc_feature (1427)..(1427): n is a, c, g, or t
  misc_feature (1471)..(1471): n is a, c, g, or t
  misc_feature (1474)..(1474): n is a, c, g, or t
  misc_feature (1487)..(1487): n is a, c, g, or t
  misc_feature (1562)..(1562): n is a, c, g, or t
  misc_feature (1612)..(1612): n is a, c, g, or t
  misc_feature (1619)..(1619): n is a, c, g, or t
  misc_feature (1625)..(1625): n is a, c, g, or t
  misc_feature (1637)..(1637): n is a, c, g, or t
cacccaggagccacacagacgcccgggaccagcacaggctcccctctgcaggtcaaggcactcaacactggggtgctgaggacacgggggtgcgccctccaacaagggctgtgctgggacaggcccagctgtgaggccgcagttgacctcccagagggacacgggtctgctgctccagagacgcggccctgccaggagggctccgtgagtgcacactctcctctgggcttcccgggtgcggggcctcccctggcacagcacagcccctcacagcacaggcctcgctgggctctagctctgtatctgtgctcctggcaggccagcaccccatcgcaatgtcctgtgcctctcagggcccagggtgacccctccccagcacagctgccctgcaggactcctgccagtcccattcacgctggcctgcccccagcctgtccccgcaggactcctgccagtccctttcacgctggcctgcccccagcctgtccccgcaggactcctgccagtccctttcacgctggcctgcccccagcctgccatttcagaggcagccttggtaaccaatgctcaaatgaccactgcccaggccagaatctcagaggaggccacaggtccccgcccagacaggctgttctcaacactctctactgcaaactacacacagttttacgtcgccagaaagaccccaaatttctattcaaaaagaccgtaccagtttcagttcccgccaacctcaaaggcagagacaaaaggacggtgtgcccctcctgtaacttcatttcttcggtgactgtgaagctgagggcagagtccacgcctggggacagggctgccaccgcagcggccactgagtccaaccctcgctcctcctcccagagacgacctgcgttccgctcagggacagggctgccaacgcagcggccaccgcacccaacgctcgctcctcctcccagagacaacctgagctctgctcagaagcggcacctcctcatgctggactcactcgggcccacatgtgccaagggggcctggttttggggccggcgggttctgcctgatgctcagagggtaactggatgctgaaaactgtgagtctttcttcaactcaggggaatgtttccagggcacgccaggcctcactcacgcaggcctccgcgacaactgttcagcactgactgagggtgaagtgaaatcctgaaagctgagagccagcgccctcacacgagggctgggacgtaacaaaagcccatcaagagtttatgcccagggctttcttgggccttgaagcatgacgagaccaggacccgtttaggattaaacaagttttactgggggtctgaaaaaactccccaggcctccacaaacaagtggagaaggaactccccaaacctccatgatttagnagaanacaagataagggtaancanctgggcccatttagatcaagtaaatttactgagtcttcagaggnagntcttcaggaccanacctcagttagagatgagaagaattgaatcacgtacgtctttagacgaatgcacactgacacggagacacagagnttagaaggtgtgtaagctctggaaaaactgtaatctggagttggtctggngatcatnccaggncttctccctgtnaccagttacagaaataaaatccctcttcttcccc

SEQ ID NO: 294435 - DNA, 2319 bp, Homo sapiens
cacgcacctggtgttgggtcccatctgcgctcattaggcgcgacgtcaatgccgcactgaggtgtgcctggcttcgatctaccctaggaagggtctgccctggggcgccccattccgcgactgtccccagtgggaaccacgccctccatctaccagagccatttctgcaacgtctagcaccccgcgggtcctcttccggccgcggttgccctgggcaacgcgtggagccgcgcttcctgtattgatttgaatcgcgggagacgtcacgtcctcccgagatgcccaacgcgcgcaggcgcagccactcggagtgggcagggcctggctgggtgttgggcagggcctggcggtgtgtggggtaggcggggggcgtggccgcgattagccgcgcgcggcgtgggggcgtggtcgggttgcgggggtgcgcgcggccggccgggcgcgcgcggcggagggagggagccgggaggcagcggaggagcgaccgccgccatattagggaccgcggagcccgggatcccgtcagcggcggccgcggccgggcctgcgggagctgcggaggccggaggcgggcgctgtgcggtgccaggagaggcggggtcggcgggagccagcgagccacgggagcgagccaggctaaccttgccgcgggccgagccctgcctcgccatggaccaggactatgagcggcgcctgcttcgccagatcgtcatccagaatgagaacacgatgccacgcgtcacagagatgcggcggaccctgacgcctgccagctccccagtgtcctcgcccagcaagcacggagaccgcttcatcccctccagagccggagccaactggagcgtgaacttccacaggattaacgagaatgagaagtctcccagtcagaaccggaaagccaaggacgccacctcagacaacggcaaagacggcctggcctactctgccctgctcaagaatgagctgctgggtgccggcatcgagaaggtgcaggacccgcagactgaggaccgcaggctgcagccctccacgcctgagaagaagggtctgttcacgtattcccttagcaccaagcgctccagccccgatgacggcaacgatgtgtctccctactccctgtctcccgtcagcaacaagagccagaagctgctccggtccccccggaaacccacccgcaagatctccaagatccccttcaaggtgctggacgcgcccgagctgcaggacgacttctacctcaatctggtggactggtcgtccctcaatgtgctcagcgtggggctaggcacctgcgtgtacctgtggagtgcctgtaccagccaggtgacgcggctctgtgacctctcagtggaaggggactcagtgacctccgtgggctggtctgagcgggggaacctggtggcggtgggcacacacaagggcttcgtgcagatctgggacgcagccgcagggaagaagctgtccatgttggagggccacacggcacgcgtcggggcgctggcctggaatgctgagcagctgtcgtccgggagccgcgaccgcatgatcctgcagagggacatccgcaccccgccactgcagtcggagcggcggctgcagggccaccggcaggaggtgtgcgggctcaagtggtccacagaccaccagctcctcgcctcggggggcaacgacaacaagctgctggtctggaatcactcgagcctgagccccgtgcagcagtacacggagcacctggcggccgtgaaggccatcgcctggtccccacatcagcacgggctgctggcctcggggggcggcacagctgaccgctgtatccgcttctggaacacgctgacaggacaaccactgcagtgtatcgacacgggctcccaagtgtgcaatctggcctggtccaagcacgccaacgagctggtgagcacgcacggctactcacagaaccagatccttgtctggaagtacccctccctgacccaggtggccaagctgaccgggcactcctaccgcgtgctgtacctggcaatgtcccctgatggggaggccatcgtcactggtgctggagacgagaccctgaggttctggaacgtctttagcaaaacccgttcgacaaaggagtctgtgtctgtgctcaacctcttcaccaggatccggtaaacctgccgggcaggaccgtgccacaccagctgtccagagtcggaggaccccagctcctcagcttgcatggactctgccttcccagcgcttgtcccccgaggaaggcggctgggcgggcggggagctgggcctggaggatcctggagtctcattaaatgcctgattgtg

SEQ ID NO: 294436 - DNA, 1800 bp, Homo sapiens
cacgcacctggtgttgggtcccatctgcgctcattaggcgcgacgtcaatgccgcactgaggtgtgcctggcttcgatctaccctaggaagggtctgccctggggcgccccattccgcgactgtccccagtgggaaccacgccctccatctaccagagccatttctgcaacgtctagcaccccgcgggtcctcttccggccgcggttgccctgggcaacgcgtggagccgcgcttcctgtattgatttgaatcgcgggagacgtcacgtcctcccgagatgcccaacgcgcgcaggcgcagccactcggagtgggcagggcctggctgggtgttgggcagggcctggcggtgtgtggggtaggcggggggcgtggccgcgattagccgcgcgcggcgtgggggcgtggtcgggttgcgggggtgcgcgcggccggccgggcgcgcgcggcggagggagggagccgggaggcagcggaggagcgaccgccgccatattagggaccgcggagcccgggatcccgtcagcggcggccgcggccgggcctgcgggagctgcggaggccggaggcgggcgctgtgcggtgccaggagaggcggggtcggcgggagccagcgagccacgggagcgagccaggctaaccttgccgcgggccgagccctgcctcgccatggaccaggactatgagcggcgcctgcttcgccagatcgtcatccagaatgagaacacgatgccacgcgtcacagagatgcggcggaccctgacgcctgccagctccccagtgtcctcgcccagcaagcacggagaccgcttcatcccctccagagccggagccaactggagcgtgaacttccacaggattaacgagaatgagaagtctcccagtcagaaccggaaagccaaggacgccacctcagacaacggcaaagacggcctggcctactctgccctgctcaagaatgagctgctgggtgccggcatcgagaaggtgcaggacccgcagactgaggaccgcaggctgcagccctccacgcctgagaagaagggtctgttcacgtattcccttagcaccaagcgctccagccccgatgacggcaacgatgtgtctccctactccctgtctcccgtcagcaacaagagccagaagctgctccggtccccccggaaacccacccgcaagatctccaagatccccttcaaggtgctggacgcgcccgagctgcaggacgacttctacctcaatctggtggactggtcgtccctcaatgtgctcagcgtggggctaggcacctgcgtgtacctgtggagtgcctgtaccagccaggtgacgcggctctgtgacctctcagtggaaggggactcagtgacctccgtgggctggtctgagcgggggaacctggtggcggtgggcacacacaagggcttcgtgcagatctgggacgcagccgcagggaagaagctgtccatgttggagggccacacggcacgcgtcggggcgctggcctggaatgctgagcagctgtcgtccgggagccgcgaccgcatgatcctgcagagggacatccgcaccccgccactgcagtcggagcggcggctgcagggccaccggcaggaggtgtgcgggctcaagtggtccacagaccaccagctcctcgcctcggggggcaacgacaacaagctgctggtctggaatcactcgagcctgagccccgtgcagcagtacacggagcacctggcggccgtgaaggccatcgcctggtgctccgtgtcgatacactgcagtggtcctcgtgccgaattc

SEQ ID NO: 294437 - DNA, 6027 bp, Homo sapiens
  misc_feature (4134)..(4134): n is a, c, g, or t
cacgcacctggtgttgggtcccatctgcgctcattaggcgcgacgtcaatgccgcactgaggtgtgcctggcttcgatctaccctaggaagggtctgccctggggcgccccattccgcgactgtccccagtgggaaccacgccctccatctaccagagccatttctgcaacgtctagcaccccgcgggtcctcttccggccgcggttgccctgggcaacgcgtggagccgcgcttcctgtattgatttgaatcgcgggagacgtcacgtcctcccgagatgcccaacgcgcgcaggcgcagccactcggagtgggcagggcctggctgggtgttgggcagggcctggcggtgtgtggggtaggcggggggcgtggccgcgattagccgcgcgcggcgtgggggcgtggtcgggttgcgggggtgcgcgcggccggccgggcgcgcgcggcggagggagggagccgggaggcagcggaggagcgaccgccgccatattagggaccgcggagcccgggatcccgtcagcggcggccgcggccgggcctgcgggagctgcggaggccggaggcgggcgctgtgcggtgccaggagaggcggggtcggcgggagccagcgagccacgggagcgagccaggctaaccttgccgcgggccgagccctgcctcgccatggaccaggactatgagcggcgcctgcttcgccagatcgtcatccagaatgagaacacgatgccacgcgtcacagagatgcggcggaccctgacgcctgccagctccccagtgtcctcgcccagcaagcacggagaccgcttcatcccctccagagccggagccaactggagcgtgaacttccacaggattaacgagaatgagaagtctcccagtcagaaccggaaagccaaggacgccacctcagacaacggcaaagacggcctggcctactctgccctgctcaagaatgagctgctgggtgccggcatcgagaaggtgcaggacccgcagactgaggaccgcaggctgcagccctccacgcctgagaagaagggtctgttcacgtattcccttagcaccaagcgctccagccccgatgacggcaacgatgtgtctccctactccctgtctcccgtcagcaacaagagccagaagctgctccggtccccccggaaacccacccgcaagatctccaagatccccttcaaggtgctggacgcgcccgagctgcaggacgacttctacctcaatctggtggactggtcgtccctcaatgtgctcagcgtggggctaggcacctgcgtgtacctgtggagtgcctgtaccagccaggtgacgcggctctgtgacctctcagtggaaggggactcagtgacctccgtgggctggtctgagcgggggaacctggtggcggtgggcacacacaagggcttcgtgcagatctgggacgcagccgcagggaagaagctgtccatgttggagggccacacggcacgcgtcggggcgctggcctggaatgctgagcagctgtcgtccgggagccgcgaccgcatgatcctgcagagggacatccgcaccccgccactgcagtcggagcggcggctgcagggccaccggcaggaggtgtgcgggctcaagtggtccacagaccaccagctcctcgcctcggggggcaacgacaacaagctgctggtctggaatcactcgagcctgagccccgtgcagcagtacacggagcacctggcggccgtgaaggccatcgcctggtccccacatcagcacgggctgctggcctcggggggcggcacagctgaccgctgtatccgcttctggaacacgctgacaggacaaccactgcagtgtatcgacacgggctcccaagtgtgcaatctggcctggtccaagcacgccaacgagctggtgagcacgcacggctactcacagaaccagatccttgtctggaagtacccctccctgacccaggtggccaagctgaccgggcactcctaccgcgtgctgtacctggcaatgtcccctgatggggaggccatcgtcactggtgctggagacgagaccctgaggttctggaacgtctttagcaaaacccgttcgacaaaggagtctgtgtctgtgctcaacctcttcaccaggatccggtaaacctgccgggcaggaccgtgccacaccagctgtccagagtcggaggaccccagctcctcagcttgcatggactctgccttcccagcgcttgtcccccgaggaaggcggctgggcgggcggggagctgggcctggaggatcctggagtctcattaaatgcctgattgtgaaccatgtccaccagtatctggggtgggcacgtggtcggggaccctcagcagcaggggctctgtctcccttcccaaagggcgagaaccacattggacggtcccggctcagaccgtctgtactcagagcgacggatgccccctgggaccctcactgcctccgtctgttcatcacctgcccaccggagccgcatgctcttcctggaactgcccacgtctgcacagaacagaccaccagacgccagggctgattggtgggggcctgagacccccggttgcccattcatggctgcaccccaccatgtcaaacccaagaccagccccaaggccagaccaaggcatgtaggcctgggcaggtggctcggggccactggcggagccagcctgtggatccaagagacagtccccacctgggcttcacggcatccttgcagccacctctgctgtcactgctcgaagcagcagtctctctggaagcatctgtgtcatggccatcgcccggcggtcagtgggcttcagatgggcctgtgcatcctggccaagcgtcaccctcacactggaggaggatgtctgctctggacttatcaccccaggagaactgaacccggacctgctcactgccctggctggagaggagcacaacagatgccacgtcttcgtgcattcgccaacacgtgccctcacagggccagcgtcctccttccctgcgcaagacttgcgtcccccatgcctgctgggtggctgggtcctgtggaggccagcagcggtgtggcccccgcccccaggctgcctgtgtcttcacctgtcctgtccaccagcgccaacagccgtggggaagccaaggagacccaaggggtccaggaggtgggcgccctccatccttcgagaagcttcccaggctcctctgcttctctgtctcatgctcccaggctgcacagcaggcagggagggaggcaaggcaggggagtggggcctgagctgagcactgccccctcacccccccaccaccccttcccatttcatcggtggggacgtggagagggtggggcgggctggggttggagggtcccacccaccaccctgctgtgcttgggaacccccactccccactccccacatcccaacatcctggtgtctgtccccagtggggttggcgtgcatgtgtacatatgtatttgtgacttttctttggatttgttttgtgtttttgttgactagtcctggaaatgtttgaggctagacggggaggggccaggacccacccactgctcctgggggatgaggtcctggttttaaagccccgtcatttcaagcgggtcgatcttccacattcactggagagactctccccacctctgtctgggtggggcgcggacccctcactgtgcgcctgtgcagggggtgctggtgcacgtggcagtgtggatttccagtggtcacggtcttactgtttcaaggtttttaaataagaaaaccaaccctgccttcgcccatgcccgcccctgcccgcagttgccaaagagccgccttgtcgctgtgggcgtcagggcttggctggctcagtgcacaacccacagtggccttcagaggctcctcctgggactgggaaccgccgcagggccaggcggacggcgtgaggtttgtgttggggctggttctgcccatgctagggggtgggggagctcccaggacagaccagccttgtttctcatgtaatgcagtgacgctgtcattaaacacgtggattcatgtgtggccgggactggctggctctaggtccccggctcgggtggggtcacacggtcctgccctagagnccccatctggccctggagctgcagaagcagcttctgaggggcttcccaggcctgcatttcacagatggggagctcagccctcgaaggccgcagagacgcctcccaggcccgtctgccagggcgccggccacaatcctgcagggccaaggactggactccaggcaagtccctgcgctccagctggacggccctgttccagggaggaggtgctcggttgacaccatcagggagggagggtgggcactgctgggctgagttcacccccagggctggccagatggggccaggagggacagagcaaggggggtgaaggccgtggtgggagggtcccatgatgatgggccagggctcgtgtagaaatgggggaattggttccccatggcccaggacagctgagaggaggtggaggggccccaggggagtgtacgtcaggctttgcggggcacgggggccactcagcagcgctggggcaggtgcctctgctgtcagctccacccgacaggcagacgaaggccagtggggccatcgcttcctggggcgaccctggcagtggttgggagacgcccagatggagggggaggctgaccaagggccccgcagggcgggctgcaacttttctgttgatcctggaatgtagctggtgcagtgagagggaaagagaattgaaaaactcaggctgccataggttctgcgatgagaggtgcaggaggcaggagcctggcccagggggtgctggtgcctccccggggtctgggcggagagaacaggaggaatggctgggaagtggctgagggagccaggaggccggggggccgggggctgcaggggaggctgtgggggtcctggcagccaggaggccccaggtggttttgaggctcgctcttgcgcggtgcctgagaagagggtgaaggagctggggcaggccccatcctgggcattggagatgatgaaaccgagcagacctggcccatgtggagctggcatgggggacacagcccagagacagagaagcttatgaggaagtgaggaggtggcgtcacaagggtggggagggggccttggggaagggcggccttggatcagaggctcaccacaagcctggcatttcagccagggctggagaaggcagggacgcctgggtgagaggcaaagggcacagccatgcaaaggccctggggcaggacggcacctggtatgcgggaggaacagagtgaggagaggagggcagggcgtgcagggccttgtgggcctcagggaggacttgggcacctaccccgagggagtggagctcctgggtgcgtgtccagatgggaaaggcagggtcgtatctgtggggacctgacaagggcaggggaagcggagaccagggtgcaggctccgcccccacccaaggccgggcccagccagaggaggggcagggcagggcaggaggtttctggatgtttgttgggtttggtttggttttgttttgttttgtttattgtggtaaaatacaaaatctaccgtcttacagtgaggtggcgttcagtaccttcaccacgccgtgcagccatcccatctgattccagaacattctcatcacccagaaggcagccctgtccccattatgtcacctagtcacccccaggtccccctccccagtcccggcacccacgaatcctctccctgattctgtggattggtctgtcctggacatttcatagaagtgggatcacagcgtacccttctgtgtctggtgtctctcactgagcgtgacatcctcaaggtgcatccgcactgtggcctgggtcagagcttcgcacctccttgtggctgagtctcgttccagcgcgtgggtgcgtgggtggccgcgcgtgctgatcccctcaccttcactgggtgttcggtgttctc

SEQ ID NO: 294438 - DNA, 4558 bp, Homo sapiens
cacgcacctggtgttgggtcccatctgcgctcattaggcgcgacgtcaatgccgcactgaggtgtgcctggcttcgatctaccctaggaagggtctgccctggggcgccccattccgcgactgtccccagtgggaaccacgccctccatctaccagagccatttctgcaacgtctagcaccccgcgggtcctcttccggccgcggttgccctgggcaacgcgtggagccgcgcttcctgtattgatttgaatcgcgggagacgtcacgtcctcccgagatgcccaacgcgcgcaggcgcagccactcggagtgggcagggcctggctgggtgttgggcagggcctggcggtgtgtggggtaggcggggggcgtggccgcgattagccgcgcgcggcgtgggggcgtggtcgggttgcgggggtgcgcgcggccggccgggcgcgcgcggcggagggagggagccgggaggcagcggaggagcgaccgccgccatattagggaccgcggagcccgggatcccgtcagcggcggccgcggccgggcctgcgggagctgcggaggccggaggcgggcgctgtgcggtgccaggagaggcggggtcggcgggagccagcgagccacgggagcgagccaggctaaccttgccgcgggccgagccctgcctcgccatggaccaggactatgagcggcgcctgcttcgccagatcgtcatccagaatgagaacacgatgccacgcgtcacagagatgcggcggaccctgacgcctgccagctccccagtgtcctcgcccagcaagcacggagaccgcttcatcccctccagagccggagccaactggagcgtgaacttccacaggattaacgagaatgagaagtctcccagtcagaaccggaaagccaaggacgccacctcagacaacggcaaagacggcctggcctactctgccctgctcaagaatgagctgctgggtgccggcatcgagaaggtgcaggacccgcagactgaggaccgcaggctgcagccctccacgcctgagaagaagggtctgttcacgtattcccttagcaccaagcgctccagccccgatgacggcaacgatgtgtctccctactccctgtctcccgtcagcaacaagagccagaagctgctccggtccccccggaaacccacccgcaagatctccaagatccccttcaaggtgctggacgcgcccgagctgcaggacgacttctacctcaatctggtggactggtcgtccctcaatgtgctcagcgtggggctaggcacctgcgtgtacctgtggagtgcctgtaccagccaggtgacgcggctctgtgacctctcagtggaaggggactcagtgacctccgtgggctggtctgagcgggggaacctggtggcggtgggcacacacaagggcttcgtgcagatctgggacgcagccgcagggaagaagctgtccatgttggagggccacacggcacgcgtcggggcgctggcctggaatgctgagcagctgtcgtccgggagccgcgaccgcatgatcctgcagagggacatccgcaccccgccactgcagtcggagcggcggctgcagggccaccggcaggaggtgtgcgggctcaagtggtccacagaccaccagctcctcgcctcggggggcaacgacaacaagctgctggtctggaatcactcgagcctgagccccgtgcagcagtacacggagcacctggcggccgtgaaggccatcgcctggtccccacatcagcacgggctgctggcctcggggggcggcacagctgaccgctgtatccgcttctggaacacgctgacaggacaaccactgcagtgtatcgacacgggctcccaagtgtgcaatctggcctggtccaagcacgccaacgagctggtgagcacgcacggctactcacagaaccagatccttgtctggaagtacccctccctgacccaggtggccaagctgaccgggcactcctaccgcgtgctgtacctggcaatgtcccctgatggggaggccatcgtcactggtgctggagacgagaccctgaggttctggaacgtctttagcaaaacccgttcgacaaaggagtctgtgtctgtgctcaacctcttcaccaggatccggtaaacctgccgggcaggaccgtgccacaccagctgtccagagtcggaggaccccagctcctcagcttgcatggactctgccttcccagcgcttgtcccccgaggaaggcggctgggcgggcggggagctgggcctggaggatcctggagtctcattaaatgcctgattgtgaaccatgtccaccagtatctggggtgggcacgtggtcggggaccctcagcagcaggggctctgtctcccttcccaaagggcgagaaccacattggacggtcccggctcagaccgtctgtactcagagcgacggatgccccctgggaccctcactgcctccgtctgttcatcacctgcccaccggagccgcatgctcttcctggaactgcccacgtctgcacagaacagaccaccagacgccagggctgattggtgggggcctgagacccccggttgcccattcatggctgcaccccaccatgtcaaacccaagaccagccccaaggccagaccaaggcatgtaggcctgggcaggtggctcggggccactggcggagccagcctgtggatccaagagacagtccccacctgggcttcacggcatccttgcagccacctctgctgtcactgctcgaagcagcagtctctctggaagcatctgtgtcatggccatcgcccggcggtcagtgggcttcagatgggcctgtgcatcctggccaagcgtcaccctcacactggaggaggatgtctgctctggacttatcaccccaggagaactgaacccggacctgctcactgccctggctggagaggagcacaacagatgccacgtcttcgtgcattcgccaacacgtgccctcacagggccagcgtcctccttccctgcgcaagacttgcgtcccccatgcctgctgggtggctgggtcctgtggaggccagcagcggtgtggcccccgcccccaggctgcctgtgtcttcacctgtcctgtccaccagcgccaacagccgtggggaagccaaggagacccaaggggtccaggaggtgggcgccctccatccttcgagaagcttcccaggctcctctgcttctctgtctcatgctcccaggctgcacagcaggcagggagggaggcaaggcaggggagtggggcctgagctgagcactgccccctcacccccccaccaccccttcccatttcatcggtggggacgtggagagggtggggcgggctggggttggagggtcccacccaccaccctgctgtgcttgggaacccccactccccactccccacatcccaacatcctggtgtctgtccccagtggggttggcgtgcatgtgtacatatgtatttgtgacttttctttggatttgttttgtgtttttgttgactagtcctggaaatgtttgaggctagacggggaggggccaggacccacccactgctcctgggggatgaggtcctggttttaaagccccgtcatttcaagcgggtcgatcttccacattcactggagagactctccccacctctgtctgggtggggcgcggacccctcactgtgcgcctgtgcagggggtgctggtgcacgtggcagtgtggatttccagtggtcacggtcttactgtttcaaggtttttaaataagaaaaccaaccctgccttcgcccatgcccgcccctgcccgcagttgccaaagagccgccttgtcgctgtgggcgtcagggcttggctggctcagtgcacaacccacagtggccttcagaggctcctcctgggactgggaaccgccgcagggccaggcggacggcgtgaggtttgtgttggggctggttctgcccatgctagggggtgggggagctcccaggacagaccagccttgtttctcatgtaatgcagtgacgctgtcattaaacacgtggattcaaaaaaaaaaaaaaaaaaaaaaaaaaaaaaaaaaggggggggggcaaaatttcccccgggggggccccacgctttttgcgcggtccccccggcttttctttgtcaccaaagggcgggcgcccctatatatgggggcggcgaattataattagcactaagggcacgtggcccgctgttttaccacaaccgctgcggcgcgacgcgtggggaaaaacatctgtcctcacgtggcggagaacatcctgtggggagaaagagagcgacccccttaacattccgcgggcgcggggcgcacccaatatgtgcgcgaccaacacctcccccctagcagacagtattttaacggcccccgcgagggggcaatattaagaattttcaggcgtgtctttacggtcggtgtacaaccacacaggcgcaattattctctgggccgccgtgaaacagatttggccacacggaacttatcaacttatgggacaatcttttttcccga

SEQ ID NO: 294439 - DNA, 5760 bp, Homo sapiens
  misc_feature (3867)..(3867): n is a, c, g, or t
cacgcacctggtgttgggtcccatctgcgctcattaggcgcgacgtcaatgccgcactgaggtgtgcctggcttcgatctaccctaggaagggtctgccctggggcgccccattccgcgactgtccccagtgggaaccacgccctccatctaccagagccatttctgcaacgtctagcaccccgcgggtcctcttccggccgcggttgccctgggcaacgcgtggagccgcgcttcctgtattgatttgaatcgcgggagacgtcacgtcctcccgagatgcccaacgcgcgcaggcgcagccactcggagtgggcagggcctggctgggtgttgggcagggcctggcggtgtgtggggtaggcggggggcgtggccgcgattagccgcgcgcggcgtgggggcgtggtcgggttgcgggggtgcgcgcggccggccgggcgcgcgcggcggagggagggagccgggaggcagcggaggagcgaccgccgccatattagggaccgcggagcccgggatcccgtcagcggcggccgcggccgggcctgcgggagctgcggaggccggaggcgggcgctgtgcggtgccaggagaggcggggtcggcgggagccagcgagccacgggagcgagccaggctaaccttgccgcgggccgagccctgcctcgccatggaccaggactatgagcggcgcctgcttcgccagatcgtcatccagaatgagaacacgatgccacgcgtcacagagatgcggcggaccctgacgcctgccagctccccagtgtcctcgcccagcaagcacggagaccgcttcatcccctccagagccggagccaactggagcgtgaacttccacaggattaacgagaatgagaagtctcccagtcagaaccggaaagccaaggacgccacctcagacaacggcaaagacggcctggcctactctgccctgctcaagaatgagctgctgggtgccggcatcgagaaggtgcaggacccgcagactgaggaccgcaggctgcagccctccacgcctgagaagaagggtctgttcacggtgacgcggctctgtgacctctcagtggaaggggactcagtgacctccgtgggctggtctgagcgggggaacctggtggcggtgggcacacacaagggcttcgtgcagatctgggacgcagccgcagggaagaagctgtccatgttggagggccacacggcacgcgtcggggcgctggcctggaatgctgagcagctgtcgtccgggagccgcgaccgcatgatcctgcagagggacatccgcaccccgccactgcagtcggagcggcggctgcagggccaccggcaggaggtgtgcgggctcaagtggtccacagaccaccagctcctcgcctcggggggcaacgacaacaagctgctggtctggaatcactcgagcctgagccccgtgcagcagtacacggagcacctggcggccgtgaaggccatcgcctggtccccacatcagcacgggctgctggcctcggggggcggcacagctgaccgctgtatccgcttctggaacacgctgacaggacaaccactgcagtgtatcgacacgggctcccaagtgtgcaatctggcctggtccaagcacgccaacgagctggtgagcacgcacggctactcacagaaccagatccttgtctggaagtacccctccctgacccaggtggccaagctgaccgggcactcctaccgcgtgctgtacctggcaatgtcccctgatggggaggccatcgtcactggtgctggagacgagaccctgaggttctggaacgtctttagcaaaacccgttcgacaaaggagtctgtgtctgtgctcaacctcttcaccaggatccggtaaacctgccgggcaggaccgtgccacaccagctgtccagagtcggaggaccccagctcctcagcttgcatggactctgccttcccagcgcttgtcccccgaggaaggcggctgggcgggcggggagctgggcctggaggatcctggagtctcattaaatgcctgattgtgaaccatgtccaccagtatctggggtgggcacgtggtcggggaccctcagcagcaggggctctgtctcccttcccaaagggcgagaaccacattggacggtcccggctcagaccgtctgtactcagagcgacggatgccccctgggaccctcactgcctccgtctgttcatcacctgcccaccggagccgcatgctcttcctggaactgcccacgtctgcacagaacagaccaccagacgccagggctgattggtgggggcctgagacccccggttgcccattcatggctgcaccccaccatgtcaaacccaagaccagccccaaggccagaccaaggcatgtaggcctgggcaggtggctcggggccactggcggagccagcctgtggatccaagagacagtccccacctgggcttcacggcatccttgcagccacctctgctgtcactgctcgaagcagcagtctctctggaagcatctgtgtcatggccatcgcccggcggtcagtgggcttcagatgggcctgtgcatcctggccaagcgtcaccctcacactggaggaggatgtctgctctggacttatcaccccaggagaactgaacccggacctgctcactgccctggctggagaggagcacaacagatgccacgtcttcgtgcattcgccaacacgtgccctcacagggccagcgtcctccttccctgcgcaagacttgcgtcccccatgcctgctgggtggctgggtcctgtggaggccagcagcggtgtggcccccgcccccaggctgcctgtgtcttcacctgtcctgtccaccagcgccaacagccgtggggaagccaaggagacccaaggggtccaggaggtgggcgccctccatccttcgagaagcttcccaggctcctctgcttctctgtctcatgctcccaggctgcacagcaggcagggagggaggcaaggcaggggagtggggcctgagctgagcactgccccctcacccccccaccaccccttcccatttcatcggtggggacgtggagagggtggggcgggctggggttggagggtcccacccaccaccctgctgtgcttgggaacccccactccccactccccacatcccaacatcctggtgtctgtccccagtggggttggcgtgcatgtgtacatatgtatttgtgacttttctttggatttgttttgtgtttttgttgactagtcctggaaatgtttgaggctagacggggaggggccaggacccacccactgctcctgggggatgaggtcctggttttaaagccccgtcatttcaagcgggtcgatcttccacattcactggagagactctccccacctctgtctgggtggggcgcggacccctcactgtgcgcctgtgcagggggtgctggtgcacgtggcagtgtggatttccagtggtcacggtcttactgtttcaaggtttttaaataagaaaaccaaccctgccttcgcccatgcccgcccctgcccgcagttgccaaagagccgccttgtcgctgtgggcgtcagggcttggctggctcagtgcacaacccacagtggccttcagaggctcctcctgggactgggaaccgccgcagggccaggcggacggcgtgaggtttgtgttggggctggttctgcccatgctagggggtgggggagctcccaggacagaccagccttgtttctcatgtaatgcagtgacgctgtcattaaacacgtggattcatgtgtggccgggactggctggctctaggtccccggctcgggtggggtcacacggtcctgccctagagnccccatctggccctggagctgcagaagcagcttctgaggggcttcccaggcctgcatttcacagatggggagctcagccctcgaaggccgcagagacgcctcccaggcccgtctgccagggcgccggccacaatcctgcagggccaaggactggactccaggcaagtccctgcgctccagctggacggccctgttccagggaggaggtgctcggttgacaccatcagggagggagggtgggcactgctgggctgagttcacccccagggctggccagatggggccaggagggacagagcaaggggggtgaaggccgtggtgggagggtcccatgatgatgggccagggctcgtgtagaaatgggggaattggttccccatggcccaggacagctgagaggaggtggaggggccccaggggagtgtacgtcaggctttgcggggcacgggggccactcagcagcgctggggcaggtgcctctgctgtcagctccacccgacaggcagacgaaggccagtggggccatcgcttcctggggcgaccctggcagtggttgggagacgcccagatggagggggaggctgaccaagggccccgcagggcgggctgcaacttttctgttgatcctggaatgtagctggtgcagtgagagggaaagagaattgaaaaactcaggctgccataggttctgcgatgagaggtgcaggaggcaggagcctggcccagggggtgctggtgcctccccggggtctgggcggagagaacaggaggaatggctgggaagtggctgagggagccaggaggccggggggccgggggctgcaggggaggctgtgggggtcctggcagccaggaggccccaggtggttttgaggctcgctcttgcgcggtgcctgagaagagggtgaaggagctggggcaggccccatcctgggcattggagatgatgaaaccgagcagacctggcccatgtggagctggcatgggggacacagcccagagacagagaagcttatgaggaagtgaggaggtggcgtcacaagggtggggagggggccttggggaagggcggccttggatcagaggctcaccacaagcctggcatttcagccagggctggagaaggcagggacgcctgggtgagaggcaaagggcacagccatgcaaaggccctggggcaggacggcacctggtatgcgggaggaacagagtgaggagaggagggcagggcgtgcagggccttgtgggcctcagggaggacttgggcacctaccccgagggagtggagctcctgggtgcgtgtccagatgggaaaggcagggtcgtatctgtggggacctgacaagggcaggggaagcggagaccagggtgcaggctccgcccccacccaaggccgggcccagccagaggaggggcagggcagggcaggaggtttctggatgtttgttgggtttggtttggttttgttttgttttgtttattgtggtaaaatacaaaatctaccgtcttacagtgaggtggcgttcagtaccttcaccacgccgtgcagccatcccatctgattccagaacattctcatcacccagaaggcagccctgtccccattatgtcacctagtcacccccaggtccccctccccagtcccggcacccacgaatcctctccctgattctgtggattggtctgtcctggacatttcatagaagtgggatcacagcgtacccttctgtgtctggtgtctctcactgagcgtgacatcctcaaggtgcatccgcactgtggcctgggtcagagcttcgcacctccttgtggctgagtctcgttccagcgcgtgggtgcgtgggtggccgcgcgtgctgatcccctcaccttcactgggtgttcggtgttctc

SEQ ID NO: 294440 - DNA, 4973 bp, Homo sapiens
  misc_feature (3080)..(3080): n is a, c, g, or t
catcgaagacgcttgcaagcagcacgactctataggatccaccgatgtgcgctccctactccctgtctcccgtcagcaacaagagccagaagctgctccggtccccccggaaacccacccgcaagatctccaagatccccttcaaggtgctggacgcgcccgagctgcaggacgacttctacctcaatctggtggactggtcgtccctcaatgtgctcagcgtggggctaggcacctgcgtgtacctgtggagtgcctgtaccagccaggtgacgcggctctgtgacctctcagtggaaggggactcagtgacctccgtgggctggtctgagcgggggaacctggtggcggtgggcacacacaagggcttcgtgcagatctgggacgcagccgcagggaagaagctgtccatgttggagggccacacggcacgcgtcggggcgctggcctggaatgctgagcagctgtcgtccgggagccgcgaccgcatgatcctgcagagggacatccgcaccccgccactgcagtcggagcggcggctgcagggccaccggcaggaggtgtgcgggctcaagtggtccacagaccaccagctcctcgcctcggggggcaacgacaacaagctgctggtctggaatcactcgagcctgagccccgtgcagcagtacacggagcacctggcggccgtgaaggccatcgcctggtccccacatcagcacgggctgctggcctcggggggcggcacagctgaccgctgtatccgcttctggaacacgctgacaggacaaccactgcagtgtatcgacacgggctcccaagtgtgcaatctggcctggtccaagcacgccaacgagctggtgagcacgcacggctactcacagaaccagatccttgtctggaagtacccctccctgacccaggtggccaagctgaccgggcactcctaccgcgtgctgtacctggcaatgtcccctgatggggaggccatcgtcactggtgctggagacgagaccctgaggttctggaacgtctttagcaaaacccgttcgacaaaggagtctgtgtctgtgctcaacctcttcaccaggatccggtaaacctgccgggcaggaccgtgccacaccagctgtccagagtcggaggaccccagctcctcagcttgcatggactctgccttcccagcgcttgtcccccgaggaaggcggctgggcgggcggggagctgggcctggaggatcctggagtctcattaaatgcctgattgtgaaccatgtccaccagtatctggggtgggcacgtggtcggggaccctcagcagcaggggctctgtctcccttcccaaagggcgagaaccacattggacggtcccggctcagaccgtctgtactcagagcgacggatgccccctgggaccctcactgcctccgtctgttcatcacctgcccaccggagccgcatgctcttcctggaactgcccacgtctgcacagaacagaccaccagacgccagggctgattggtgggggcctgagacccccggttgcccattcatggctgcaccccaccatgtcaaacccaagaccagccccaaggccagaccaaggcatgtaggcctgggcaggtggctcggggccactggcggagccagcctgtggatccaagagacagtccccacctgggcttcacggcatccttgcagccacctctgctgtcactgctcgaagcagcagtctctctggaagcatctgtgtcatggccatcgcccggcggtcagtgggcttcagatgggcctgtgcatcctggccaagcgtcaccctcacactggaggaggatgtctgctctggacttatcaccccaggagaactgaacccggacctgctcactgccctggctggagaggagcacaacagatgccacgtcttcgtgcattcgccaacacgtgccctcacagggccagcgtcctccttccctgcgcaagacttgcgtcccccatgcctgctgggtggctgggtcctgtggaggccagcagcggtgtggcccccgcccccaggctgcctgtgtcttcacctgtcctgtccaccagcgccaacagccgtggggaagccaaggagacccaaggggtccaggaggtgggcgccctccatccttcgagaagcttcccaggctcctctgcttctctgtctcatgctcccaggctgcacagcaggcagggagggaggcaaggcaggggagtggggcctgagctgagcactgccccctcacccccccaccaccccttcccatttcatcggtggggacgtggagagggtggggcgggctggggttggagggtcccacccaccaccctgctgtgcttgggaacccccactccccactccccacatcccaacatcctggtgtctgtccccagtggggttggcgtgcatgtgtacatatgtatttgtgacttttctttggatttgttttgtgtttttgttgactagtcctggaaatgtttgaggctagacggggaggggccaggacccacccactgctcctgggggatgaggtcctggttttaaagccccgtcatttcaagcgggtcgatcttccacattcactggagagactctccccacctctgtctgggtggggcgcggacccctcactgtgcgcctgtgcagggggtgctggtgcacgtggcagtgtggatttccagtggtcacggtcttactgtttcaaggtttttaaataagaaaaccaaccctgccttcgcccatgcccgcccctgcccgcagttgccaaagagccgccttgtcgctgtgggcgtcagggcttggctggctcagtgcacaacccacagtggccttcagaggctcctcctgggactgggaaccgccgcagggccaggcggacggcgtgaggtttgtgttggggctggttctgcccatgctagggggtgggggagctcccaggacagaccagccttgtttctcatgtaatgcagtgacgctgtcattaaacacgtggattcatgtgtggccgggactggctggctctaggtccccggctcgggtggggtcacacggtcctgccctagagnccccatctggccctggagctgcagaagcagcttctgaggggcttcccaggcctgcatttcacagatggggagctcagccctcgaaggccgcagagacgcctcccaggcccgtctgccagggcgccggccacaatcctgcagggccaaggactggactccaggcaagtccctgcgctccagctggacggccctgttccagggaggaggtgctcggttgacaccatcagggagggagggtgggcactgctgggctgagttcacccccagggctggccagatggggccaggagggacagagcaaggggggtgaaggccgtggtgggagggtcccatgatgatgggccagggctcgtgtagaaatgggggaattggttccccatggcccaggacagctgagaggaggtggaggggccccaggggagtgtacgtcaggctttgcggggcacgggggccactcagcagcgctggggcaggtgcctctgctgtcagctccacccgacaggcagacgaaggccagtggggccatcgcttcctggggcgaccctggcagtggttgggagacgcccagatggagggggaggctgaccaagggccccgcagggcgggctgcaacttttctgttgatcctggaatgtagctggtgcagtgagagggaaagagaattgaaaaactcaggctgccataggttctgcgatgagaggtgcaggaggcaggagcctggcccagggggtgctggtgcctccccggggtctgggcggagagaacaggaggaatggctgggaagtggctgagggagccaggaggccggggggccgggggctgcaggggaggctgtgggggtcctggcagccaggaggccccaggtggttttgaggctcgctcttgcgcggtgcctgagaagagggtgaaggagctggggcaggccccatcctgggcattggagatgatgaaaccgagcagacctggcccatgtggagctggcatgggggacacagcccagagacagagaagcttatgaggaagtgaggaggtggcgtcacaagggtggggagggggccttggggaagggcggccttggatcagaggctcaccacaagcctggcatttcagccagggctggagaaggcagggacgcctgggtgagaggcaaagggcacagccatgcaaaggccctggggcaggacggcacctggtatgcgggaggaacagagtgaggagaggagggcagggcgtgcagggccttgtgggcctcagggaggacttgggcacctaccccgagggagtggagctcctgggtgcgtgtccagatgggaaaggcagggtcgtatctgtggggacctgacaagggcaggggaagcggagaccagggtgcaggctccgcccccacccaaggccgggcccagccagaggaggggcagggcagggcaggaggtttctggatgtttgttgggtttggtttggttttgttttgttttgtttattgtggtaaaatacaaaatctaccgtcttacagtgaggtggcgttcagtaccttcaccacgccgtgcagccatcccatctgattccagaacattctcatcacccagaaggcagccctgtccccattatgtcacctagtcacccccaggtccccctccccagtcccggcacccacgaatcctctccctgattctgtggattggtctgtcctggacatttcatagaagtgggatcacagcgtacccttctgtgtctggtgtctctcactgagcgtgacatcctcaaggtgcatccgcactgtggcctgggtcagagcttcgcacctccttgtggctgagtctcgttccagcgcgtgggtgcgtgggtggccgcgcgtgctgatcccctcaccttcactgggtgttcggtgttctc

SEQ ID NO: 294441 - DNA, 3552 bp, Homo sapiens
  misc_feature (1659)..(1659): n is a, c, g, or t
ctgcccacgttgcacagaacagaccaccagacgtgggcagttccaggaagtgcccacgtctgcacagaacagaccaccagacgccagggctgattggtgggggcctgagacccccggttgcccattcatggctgcaccccaccatgtcaaacccaagaccagccccaaggccagaccaaggcatgtaggcctgggcaggtggctcggggccactggcggagccagcctgtggatccaagagacagtccccacctgggcttcacggcatccttgcagccacctctgctgtcactgctcgaagcagcagtctctctggaagcatctgtgtcatggccatcgcccggcggtcagtgggcttcagatgggcctgtgcatcctggccaagcgtcaccctcacactggaggaggatgtctgctctggacttatcaccccaggagaactgaacccggacctgctcactgccctggctggagaggagcacaacagatgccacgtcttcgtgcattcgccaacacgtgccctcacagggccagcgtcctccttccctgcgcaagacttgcgtcccccatgcctgctgggtggctgggtcctgtggaggccagcagcggtgtggcccccgcccccaggctgcctgtgtcttcacctgtcctgtccaccagcgccaacagccgtggggaagccaaggagacccaaggggtccaggaggtgggcgccctccatccttcgagaagcttcccaggctcctctgcttctctgtctcatgctcccaggctgcacagcaggcagggagggaggcaaggcaggggagtggggcctgagctgagcactgccccctcacccccccaccaccccttcccatttcatcggtggggacgtggagagggtggggcgggctggggttggagggtcccacccaccaccctgctgtgcttgggaacccccactccccactccccacatcccaacatcctggtgtctgtccccagtggggttggcgtgcatgtgtacatatgtatttgtgacttttctttggatttgttttgtgtttttgttgactagtcctggaaatgtttgaggctagacggggaggggccaggacccacccactgctcctgggggatgaggtcctggttttaaagccccgtcatttcaagcgggtcgatcttccacattcactggagagactctccccacctctgtctgggtggggcgcggacccctcactgtgcgcctgtgcagggggtgctggtgcacgtggcagtgtggatttccagtggtcacggtcttactgtttcaaggtttttaaataagaaaaccaaccctgccttcgcccatgcccgcccctgcccgcagttgccaaagagccgccttgtcgctgtgggcgtcagggcttggctggctcagtgcacaacccacagtggccttcagaggctcctcctgggactgggaaccgccgcagggccaggcggacggcgtgaggtttgtgttggggctggttctgcccatgctagggggtgggggagctcccaggacagaccagccttgtttctcatgtaatgcagtgacgctgtcattaaacacgtggattcatgtgtggccgggactggctggctctaggtccccggctcgggtggggtcacacggtcctgccctagagnccccatctggccctggagctgcagaagcagcttctgaggggcttcccaggcctgcatttcacagatggggagctcagccctcgaaggccgcagagacgcctcccaggcccgtctgccagggcgccggccacaatcctgcagggccaaggactggactccaggcaagtccctgcgctccagctggacggccctgttccagggaggaggtgctcggttgacaccatcagggagggagggtgggcactgctgggctgagttcacccccagggctggccagatggggccaggagggacagagcaaggggggtgaaggccgtggtgggagggtcccatgatgatgggccagggctcgtgtagaaatgggggaattggttccccatggcccaggacagctgagaggaggtggaggggccccaggggagtgtacgtcaggctttgcggggcacgggggccactcagcagcgctggggcaggtgcctctgctgtcagctccacccgacaggcagacgaaggccagtggggccatcgcttcctggggcgaccctggcagtggttgggagacgcccagatggagggggaggctgaccaagggccccgcagggcgggctgcaacttttctgttgatcctggaatgtagctggtgcagtgagagggaaagagaattgaaaaactcaggctgccataggttctgcgatgagaggtgcaggaggcaggagcctggcccagggggtgctggtgcctccccggggtctgggcggagagaacaggaggaatggctgggaagtggctgagggagccaggaggccggggggccgggggctgcaggggaggctgtgggggtcctggcagccaggaggccccaggtggttttgaggctcgctcttgcgcggtgcctgagaagagggtgaaggagctggggcaggccccatcctgggcattggagatgatgaaaccgagcagacctggcccatgtggagctggcatgggggacacagcccagagacagagaagcttatgaggaagtgaggaggtggcgtcacaagggtggggagggggccttggggaagggcggccttggatcagaggctcaccacaagcctggcatttcagccagggctggagaaggcagggacgcctgggtgagaggcaaagggcacagccatgcaaaggccctggggcaggacggcacctggtatgcgggaggaacagagtgaggagaggagggcagggcgtgcagggccttgtgggcctcagggaggacttgggcacctaccccgagggagtggagctcctgggtgcgtgtccagatgggaaaggcagggtcgtatctgtggggacctgacaagggcaggggaagcggagaccagggtgcaggctccgcccccacccaaggccgggcccagccagaggaggggcagggcagggcaggaggtttctggatgtttgttgggtttggtttggttttgttttgttttgtttattgtggtaaaatacaaaatctaccgtcttacagtgaggtggcgttcagtaccttcaccacgccgtgcagccatcccatctgattccagaacattctcatcacccagaaggcagccctgtccccattatgtcacctagtcacccccaggtccccctccccagtcccggcacccacgaatcctctccctgattctgtggattggtctgtcctggacatttcatagaagtgggatcacagcgtacccttctgtgtctggtgtctctcactgagcgtgacatcctcaaggtgcatccgcactgtggcctgggtcagagcttcgcacctccttgtggctgagtctcgttccagcgcgtgggtgcgtgggtggccgcgcgtgctgatcccctcaccttcactgggtgttcggtgttctc

SEQ ID NO: 294442 - DNA, 297 bp, Homo sapiens
gtcttaaaattaaaaaaaaaaaaaaaaaaaaggctccaaccttggtttctgcttgtggtggccccagcctgcccctccctcctggctccagagtctggggggcccagccacccgacaccttgctcccctctccttcagtcccccagcactgtcccgaggcacctagaggcccagagacatggggtgcttccctcctgtccacaggcaatgtcccctgatggggaggccatcgtcactggtgctggagacgagaccctgaggttctggaacgtctttagcaaaacccgttcgacaaag

SEQ ID NO: 294443 - DNA, 1375 bp, Homo sapiens
cgtggagagttctcgcgggacaccgacggggagcggaagccaggaggtattgctgcttcggcgaccgggcggcggcagcggcggcggcggctgtggcagagtctgtgcctgtggcggtgacggcggcgggagcaagcgctgccctcgcagagcagccttggggtcgccggccgctcgcagcgttgtggaggggcgggccggacgctgagcggagcagctgcgccacgggtggcattgtgtgtcccagagtgccggagcgagtcccagaagagaggcgaggctaagcccagagcgctgggttgcttcagcagggaagactcccttccccctgcttcaggctgctgagcactgagcagcgctcagaatggaagccatcgccaaatatgacttcaaagctactgcagacgacgagctgagcttcaaaaggggggacatcctcaaggttttgaacgaagaatgtgatcagaactggtacaaggcagagcttaatggaaaagacggcttcattcccaagaactacatagaaatgaaaccacatccgtggttttttggcaaaatccccagagccaaggcagaagaaatgcttagcaaacagcggcacgatggggcctttcttatccgagagagtgagagcgctcctggggacttctccctctctgtcaagtttggaaacgatgtgcagcacttcaaggtgctccgagatggagccgggaagtacttcctctgggtggtgaagttcaattctttgaatgagctggtggattatcacagatctacatctgtctccagaaaccagcagatattcctgcgggacatagaacaggtgccacagcagccgacatacgtccaggccctctttgactttgatccccaggaggatggagagctgggcttccgccggggagattttatccatgtcatggataactcagaccccaactggtggaaaggagcttgccacgggcagaccggcatgtttccccgcaattatgtcacccccgtgaaccggaacgtctaagagtcaagaagcaattatttaaagaaagtgaaaaatgtaaaacacatacaaaagaattaaacccacaagctgcctctgacagcagcctgtgagggagtgcagaacacctggccgggtcaccctgtgaccctctcactttggttggaactttagggggtgggagggggcgttggatttaaaaatgccaaaacttacctataaattaagaagagtttttattacaaattttcactgctgctcctctttcccctcctttgtcttttttttcatccttttttctcttctgtccatcagtgcatgacgtttaaggccacgtatagtcctagctgacgccaataataaaaaacaagaaaccaa

SEQ ID NO: 294444 - DNA, 1128 bp, Homo sapiens
  misc_feature (1093)..(1094): n is a, c, g, or t
  misc_feature (1106)..(1106): n is a, c, g, or t
gccagtgaattcgggggctcagccctcctccctcccttccccctgcttcaggctgctgagcactgagcagcgctcagaatggaagccatcgccaaatatgacttcaaagctactgcagacgacgagctgagcttcaaaaggggggacatcctcaaggttttgaacgaagaatgtgatcagaactggtacaaggcagagcttaatggaaaagacggcttcattcccaagaactacatagaaatgaaaccacatccgtggttttttggcaaaatccccagagccaaggcagaagaaatgcttagcaaacagcggcacgatggggcctttcttatccgagagagtgagagcgctcctggggacttctccctctctgtcaagtttggaaacgatgtgcagcacttcaaggtgctccgagatggagccgggaagtacttcctctgggtggtgaagttcaattctttgaatgagctggtggattatcacagatctacatctgtctccagaaaccagcagatattcctgcgggacatagaacaggtgccacagcagccgacatacgtccaggccctctttgactttgatccccaggaggatggagagctgggcttccgccggggagattttatccatgtcatggataactcagaccccaactggtggaaaggagcttgccacgggcagaccggcatgtttccccgcaattatgtcacccccgtgaaccggaacgtctaagagtcaagaagcaattatttaaagaaagtgaaaaatgtaaaacacatacaaaagaattaaacccacaagctgcctctgacagcagcctgtgagggagtgcagaacacctggccgggtcaccctgtgaccctctcactttggttggaactttagggggtgggagggggcgttggatttaaaaatgccaaaacttacctataaattaagaagagtttttattacaaattttcactgctgctcctctttcccctcctttgtcttttttttcatccttttttctcttctgtccatcagtgcatgacgtttaaggccacgtatagtcctagctgacgccaataataaaaaacaagaaaccaaaatnnaaatcttaattnatatccttcttgaacaacctgt

SEQ ID NO: 294445 - DNA, 2051 bp, Homo sapiens
cgtggagagttctcgcgggacaccgacggggagcggaagccaggaggtattgctgcttcggcgaccgggcggcggcagcggcggcggcggctgtggcagagtctgtgcctgtggcggtgacggcggcgggagcaagcgctgccctcgcagagcagccttggggtcgccggccgctcgcagcgttgtggaggggcgggccggacgctgagcggagcagctgcgccacgggtggcattgtgtgtcccagagtgccggagcgagtcccagaagagaggcgaggctaagcccagagcgctgggttgcttcagcagggaagactcccttccccctgcttcaggctgctgagcactgagcagcgctcagaatggaagccatcgccaaatatgacttcaaagctactgcagacgacgagctgagcttcaaaaggggggacatcctcaaggttttgaacgaagaatgtgatcagaactggtacaaggcagagcttaatggaaaagacggcttcattcccaagaactacatagaaatgaaaccacatccgtggttttttggcaaaatccccagagccaaggcagaagaaatgcttagcaaacagcggcacgatggggcctttcttatccgagagagtgagagcgctcctggggacttctccctctctgtcaagtttggaaacgatgtgcagcacttcaaggtgctccgagatggagccgggaagtacttcctctgggtggtgaagttcaattctttgaatgagctggtggattatcacagatctacatctgtctccagaaaccagcagatattcctgcgggacatagaacaggtgccacagcagccgacatacgtccaggccctctttgactttgatccccaggaggatggagagctgggcttccgccggggagattttatccatgtcatggataactcagaccccaactggtggaaaggagcttgccacgggcagaccggcatgtttccccgcaattatgtcacccccgtgaaccggaacgtctaagagtcaagaagcaattatttaaagaaagtgaaaaatgtaaaacacatacaaaagaattaaacccacaagctgcctctgacagcagcctgtgagggagtgcagaacacctggccgggtcaccctgtgaccctctcactttggttggaactttagggggtgggagggggcgttggatttaaaaatgccaaaacttacctataaattaagaagagtttttattacaaattttcactgctgctcctctttcccctcctttgtcttttttttcatccttttttctcttctgtccatcagtgcatgacgtttaaggccacgtatagtcctagctgacgccaataataaaaaacaagaaaccaagtgggctggtattctctctatgcaaaatgtctgttttagttggaatgactgaaagaagaacagctgttcctgtgttcttcgtatatacacacaaaaaggagcgggcagggccgctcgatgcctttgctgtttagcttcctccagaggaggggacttgtaggaatctgccttccagcccagacccccagtgtattttgtccaagttcacagtagagtagggtagaaggaaagcatgtctctgcttccatggcttcctgagaaagcccacctgggctgggcgcggtggctcacgcctgtaatcccagcactttgggaggccaaggtgggcggatcacaaggtcaggagttcgagaccaacctagccaacatggtgaaaccccgtctctactaaaaataagaaattagccgggtgtggtggcacgcacctgtagtcccagctacttgggagcctgaggcaggagaatcgcttgaacctgggaagtggaggttgagtgagccgggaccgtgccattgtactccagcctgggtgacagagcgagattccgtctcaaaaaaaaaaaaaaaaaggcccacctgaaagcctgtctcttcccactttggtgggcccttccagggggattatcgagcatgtggttttgccatagtgccttttgcctaattacagggttgcttctga

SEQ ID NO: 294446 - DNA, 1638 bp, Homo sapiens
cgtggagagttctcgcgggacaccgacggggagcggaagccaggaggtattgctgcttcggcgaccgggcggcggcagcggcggcggcggctgtggcagagtctgtgcctgtggcggtgacggcggcgggagcaagcgctgccctcgcagagcagccttggggtcgccggccgctcgcagcgttgtggaggggcgggccggacgctgagcggagcagctgcgccacgggtggcattgtgtgtcccagagtgccggagcgagtcccagaagagaggcgaggctaagcccagagcgctgggttgcttcagcagggaagactcccttccccctgcttcaggctgctgagcactgagcagcgctcagaatggaagccatcgccaaatatgacttcaaagctactgcagacgacgagctgagcttcaaaaggggggacatcctcaaggttttgaacgaagaatgtgatcagaactggtacaaggcagagcttaatggaaaagacggcttcattcccaagaactacatagaaatgaaaccacatccgtggttttttggcaaaatccccagagccaaggcagaagaaatgcttagcaaacagcggcacgatggggcctttcttatccgagagagtgagagcgctcctggggacttctccctctctgtcaagtttggaaacgatgtgcagcacttcaaggtgctccgagatggagccgggaagtacttcctctgggtggtgaagttcaattctttgaatgagctggtggattatcacagatctacatctgtctccagaaaccagcagatattcctgcgggacatagaacaggtgccacagcagccgacatacgtccaggccctctttgactttgatccccaggaggatggagagctgggcttccgccggggagattttatccatgtcatggataactcagaccccaactggtggaaaggagcttgccacgggcagaccggcatgtttccccgcaattatgtcacccccgtgaaccggaacgtctaagagtcaagaagcaattatttaaagaaagtgaaaaatgtaaaacacatacaaaagaattaaacccacaagctgcctctgacagcagcctgtgagggagtgcagaacacctggccgggtcaccctgtgaccctctcactttggttggaactttagggggtgggagggggcgttggatttaaaaatgccaaaacttacctataaattaagaagagtttttattacaaattttcactgctgctcctctttcccctcctttgtcttttttttcatccttttttctcttctgtccatcagtgcatgacgtttaaggccacgtatagtcctagctgacgccaataataaaaaacaagaaaccaagtgggctggtattctctctatgcaaaatgtctgttttagttggaatgactgaaagaagaacagctgttcctgtgttcttcgtatatacacacaaaaaggagcgggcagggccgctcgatgcctttgctgtttagcttcctccagaggaggggacttgtaggaatctgccttccagcccagaccccagaagagaggcgaggctaagcccagagcgctgggttgctttcagcaggggaagacttcctttccccctggtttcaagg

SEQ ID NO: 294447 - DNA, 1265 bp, Homo sapiens
aggagggctgagccaggccgagccaggggcgtgggggctgggacagcaggccgattggcagggcggggttgccttcaatcctggccactgctcttaatcgtccctctcctgcttcagggtggcattgtgtgtcccagagtgccggagcgagtcccagaagagaggcgaggctaagcccagagcgctgggttgcttcagcagggaagactcccttccccctgcttcaggctgctgagcactgagcagcgctcagaatggaagccatcgccaaatatgacttcaaagctactgcagacgacgagctgagcttcaaaaggggggacatcctcaaggttttgaacgaagaatgtgatcagaactggtacaaggcagagcttaatggaaaagacggcttcattcccaagaactacatagaaatgaaaccacatccgtggttttttggcaaaatccccagagccaaggcagaagaaatgcttagcaaacagcggcacgatggggcctttcttatccgagagagtgagagcgctcctggggacttctccctctctgtcaagtttggaaacgatgtgcagcacttcaaggtgctccgagatggagccgggaagtacttcctctgggtggtgaagttcaattctttgaatgagctggtggattatcacagatctacatctgtctccagaaaccagcagatattcctgcgggacatagaacaggtgccacagcagccgacatacgtccaggccctctttgactttgatccccaggaggatggagagctgggcttccgccggggagattttatccatgtcatggataactcagaccccaactggtggaaaggagcttgccacgggcagaccggcatgtttccccgcaattatgtcacccccgtgaaccggaacgtctaagagtcaagaagcaattatttaaagaaagtgaaaaatgtaaaacacatacaaaagaattaaacccacaagctgcctctgacagcagcctgtgagggagtgcagaacacctggccgggtcaccctgtgaccctctcactttggttggaactttagggggtgggagggggcgttggatttaaaaatgccaaaacttacctataaattaagaagagtttttattacaaattttcactgctgctcctctttcccctcctttgtcttttttttcatccttttttctcttctgtccatcagtgcatgacgtttaaggccacgtatagtcctagctgacgccaataataaaaaacaagaaaccaa

SEQ ID NO: 294448 - DNA, 1721 bp, Homo sapiens
cgtggagagttctcgcgggacaccgacggggagcggaagccaggaggtattgctgcttcggcgaccgggcggcggcagcggcggcggcggctgtggcagagtctgtgcctgtggcggtgacggcggcgggagcaagcgctgccctcgcagagcagccttggggtcgccggccgctcgcagcgttgtggaggggcgggccggacgctgagcggagcagctgcgccacgggtggcattgtgtgtcccagagtgccggagcgagtcccagaagagaggcgaggctaagcccagagcgctgggttgcttcagcagggaagactcccttccccctgcttcaggctgctgagcactgagcagcgctcagaatggaagccatcgccaaatatgacttcaaagctactgcagacgacgagctgagcttcaaaaggggggacatcctcaaggttttgaacgaagaatgtgatcagaactggtacaaggcagagcttaatggaaaagacggcttcattcccaagaactacatagaaatgaaaccacatccgtggttttttggcaaaatccccagagccaaggcagaagaaatgcttagcaaacagcggcacgatggggcctttcttatccgagagagtgagagcgctcctggggacttctccctctctgtcaagtttggaaacgatgtgcagcacttcaaggtgctccgagatggagccgggaagtacttcctctgggtggtgaagttcaattctttgaatgagctggtggattatcacagatctacatctgtctccagaaaccagcagatattcctgcgggacatagaacaggtgccacagcagccgacatacgtccaggccctctttgactttgatccccaggaggatggagagctgggcttccgccggggagattttatccatgtcatggataactcagaccccaactggtggaaaggagcttgccacgggcagaccggcatgtttccccgcaattatgtcacccccgtgaaccggaacgtctaagagtcaagaagcaattatttaaagaaagtgaaaaatgtaaaacacatacaaaagaattaaacccacaagctgcctctgacagcagcctgtgagggagtgcagaacacctggccgggtcaccctgtgaccctctcactttggttggaactttagggggtgggagggggcgttggatttaaaaatgccaaaacttacctataaattaagaagagtttttattacaaattttcactgctgctcctctttcccctcctttgtcttttttttcatccttttttctcttctgtccatcagtgcatgacgtttaaggccacgtatagtcctagctgacgccaataataaaaaacaagaaaccaaaaaaaaaaaaaaaaaaaaaaaaaaaaaaaaaaaaaaaaaaaaaaaaaaaaaagacaaaaaaaaaaaaaaaaaaaaaaaaaacatagaaaaaacagagcaaaaaaaaaaaagggggggggggggacagaaactgacaccccggagagaaaaaagaagcgcacgacggggagagaaggaggaaacacaaaagggagggggaaaaaaatacacgaggggaggggggcgagaagaaaaaagacgagagaaggagcacagacaaaaggacaaagacgtgagaaaggaggaggaagagcaaaaaacacaagaatgtgggcgggaggacaaacagagagagagaaagacagaa

SEQ ID NO: 294449 - DNA, 1414 bp, Homo sapiens
  misc_feature (1379)..(1380): n is a, c, g, or t
  misc_feature (1392)..(1392): n is a, c, g, or t
cgtggagagttctcgcgggacaccgacggggagcggaagccaggaggtattgctgcttcggcgaccgggcggcggcagcggcggcggcggctgtggcagagtctgtgcctgtggcggtgacggcggcgggagcaagcgctgccctcgcagagcagccttggggtcgccggccgctcgcagcgttgtggaggggcgggccggacgctgagcggagcagctgcgccacgggtggcattgtgtgtcccagagtgccggagcgagtcccagaagagaggcgaggctaagcccagagcgctgggttgcttcagcagggaagactcccttccccctgcttcaggctgctgagcactgagcagcgctcagaatggaagccatcgccaaatatgacttcaaagctactgcagacgacgagctgagcttcaaaaggggggacatcctcaaggttttgaacgaagaatgtgatcagaactggtacaaggcagagcttaatggaaaagacggcttcattcccaagaactacatagaaatgaaaccacatccgtggttttttggcaaaatccccagagccaaggcagaagaaatgcttagcaaacagcggcacgatggggcctttcttatccgagagagtgagagcgctcctggggacttctccctctctgtcaagtttggaaacgatgtgcagcacttcaaggtgctccgagatggagccgggaagtacttcctctgggtggtgaagttcaattctttgaatgagctggtggattatcacagatctacatctgtctccagaaaccagcagatattcctgcgggacatagaacaggtgccacagcagccgacatacgtccaggccctctttgactttgatccccaggaggatggagagctgggcttccgccggggagattttatccatgtcatggataactcagaccccaactggtggaaaggagcttgccacgggcagaccggcatgtttccccgcaattatgtcacccccgtgaaccggaacgtctaagagtcaagaagcaattatttaaagaaagtgaaaaatgtaaaacacatacaaaagaattaaacccacaagctgcctctgacagcagcctgtgagggagtgcagaacacctggccgggtcaccctgtgaccctctcactttggttggaactttagggggtgggagggggcgttggatttaaaaatgccaaaacttacctataaattaagaagagtttttattacaaattttcactgctgctcctctttcccctcctttgtcttttttttcatccttttttctcttctgtccatcagtgcatgacgtttaaggccacgtatagtcctagctgacgccaataataaaaaacaagaaaccaaaatnnaaatcttaattnatatccttcttgaacaacctgt

SEQ ID NO: 294450 - DNA, 1160 bp, Homo sapiens
cgtggagagttctcgcgggacaccgacggggagcggaagccaggaggtattgctgcttcggcgaccgggcggcggcagcggcggcggcggctgtggcagagtctgtgcctgtggcggtgacggcggcgggagcaagcgctgccctcgcagagcagccttggggtcgccggccgctcgcagcgttgtggaggggcgggccggacgctgagcggagcagctgcgccacggttttgaacgaagaatgtgatcagaactggtacaaggcagagcttaatggaaaagacggcttcattcccaagaactacatagaaatgaaaccacatccgtggttttttggcaaaatccccagagccaaggcagaagaaatgcttagcaaacagcggcacgatggggcctttcttatccgagagagtgagagcgctcctggggacttctccctctctgtcaagtttggaaacgatgtgcagcacttcaaggtgctccgagatggagccgggaagtacttcctctgggtggtgaagttcaattctttgaatgagctggtggattatcacagatctacatctgtctccagaaaccagcagatattcctgcgggacatagaacaggtgccacagcagccgacatacgtccaggccctctttgactttgatccccaggaggatggagagctgggcttccgccggggagattttatccatgtcatggataactcagaccccaactggtggaaaggagcttgccacgggcagaccggcatgtttccccgcaattatgtcacccccgtgaaccggaacgtctaagagtcaagaagcaattatttaaagaaagtgaaaaatgtaaaacacatacaaaagaattaaacccacaagctgcctctgacagcagcctgtgagggagtgcagaacacctggccgggtcaccctgtgaccctctcactttggttggaactttagggggtgggagggggcgttggatttaaaaatgccaaaacttacctataaattaagaagagtttttattacaaattttcactgctgctcctctttcccctcctttgtcttttttttcatccttttttctcttctgtccatcagtgcatgacgtttaaggccacgtatagtcctagctgacgccaataataaaaaacaagaaaccaa

SEQ ID NO: 294451 - DNA, 1142 bp, Homo sapiens
aggagggctgagccaggccgagccaggggcgtgggggctgggacagcaggccgattggcagggcggggttgccttcaatcctggccactgctcttaatcgtccctctcctgcttcagggtggcattgtgtgtcccagagtgccggagcgagtcccagaagagaggcgaggctaagcccagagcgctgggttgcttcagcagggaagactcccttccccctgcttcaggctgctgagcactgagcagcgctcagaatggaagccatcgccaaatatgacttcaaagctactgcagacgacgagctgagcttcaaaaggggggacatcctcaaggttttgaacgaagaatgtgatcagaactggtacaaggcagagcttaatggaaaagacggcttcattcccaagaactacatagaaatgaaaccacatccgtttggaaacgatgtgcagcacttcaaggtgctccgagatggagccgggaagtacttcctctgggtggtgaagttcaattctttgaatgagctggtggattatcacagatctacatctgtctccagaaaccagcagatattcctgcgggacatagaacaggtgccacagcagccgacatacgtccaggccctctttgactttgatccccaggaggatggagagctgggcttccgccggggagattttatccatgtcatggataactcagaccccaactggtggaaaggagcttgccacgggcagaccggcatgtttccccgcaattatgtcacccccgtgaaccggaacgtctaagagtcaagaagcaattatttaaagaaagtgaaaaatgtaaaacacatacaaaagaattaaacccacaagctgcctctgacagcagcctgtgagggagtgcagaacacctggccgggtcaccctgtgaccctctcactttggttggaactttagggggtgggagggggcgttggatttaaaaatgccaaaacttacctataaattaagaagagtttttattacaaattttcactgctgctcctctttcccctcctttgtcttttttttcatccttttttctcttctgtccatcagtgcatgacgtttaaggccacgtatagtcctagctgacgccaataataaaaaacaagaaaccaa

SEQ ID NO: 294452 - DNA, 954 bp, Homo sapiens
gagcttttccccaggcgcctttgtcatgagtcagtagggagtccagtgggctttggcctggggggcccattttcaaatgtctccctctatagaaagagtgacccacggttagtgccttggtggttttttggcaaaatccccagagccaaggcagaagaaatgcttagcaaacagcggcacgatggggcctttcttatccgagagagtgagagcgctcctggggacttctccctctctgtcaagtttggaaacgatgtgcagcacttcaaggtgctccgagatggagccgggaagtacttcctctgggtggtgaagttcaattctttgaatgagctggtggattatcacagatctacatctgtctccagaaaccagcagatattcctgcgggacatagaacaggtgccacagcagccgacatacgtccaggccctctttgactttgatccccaggaggatggagagctgggcttccgccggggagattttatccatgtcatggataactcagaccccaactggtggaaaggagcttgccacgggcagaccggcatgtttccccgcaattatgtcacccccgtgaaccggaacgtctaagagtcaagaagcaattatttaaagaaagtgaaaaatgtaaaacacatacaaaagaattaaacccacaagctgcctctgacagcagcctgtgagggagtgcagaacacctggccgggtcaccctgtgaccctctcactttggttggaactttagggggtgggagggggcgttggatttaaaaatgccaaaacttacctataaattaagaagagtttttattacaaattttcactgctgctcctctttcccctcctttgtcttttttttcatccttttttctcttctgtccatcagtgcatgacgtttaaggccacgtatagtcctagctgacgccaataataaaaaacaagaaaccaa

SEQ ID NO: 294453 - DNA, 1206 bp, Homo sapiens
aggagggctgagccaggccgagccaggggcgtgggggctgggacagcaggccgattggcagggcggggttgccttcaatcctggccactgctcttaatcgtccctctcctgcttcagggtggcattgtgtgtcccagagtgccggagcgagtcccagaagagaggcgaggctaagcccagagcgctgggttgcttcagcagggaagactcccttccccctgcttcaggctgctgagcactgagcagcgctcagaatggaagccatcgccaaatatgacttcaaagctactgcagacgacgagctgagcttcaaaaggggggacatcctcaaggttttgaacgaagaatgtgatcagaactggtacaaggcagagcttaatggaaaagacggcttcattcccaagaactacatagaaatgaaaccacatccacgatggggcctttcttatccgagagagtgagagcgctcctggggacttctccctctctgtcaagtttggaaacgatgtgcagcacttcaaggtgctccgagatggagccgggaagtacttcctctgggtggtgaagttcaattctttgaatgagctggtggattatcacagatctacatctgtctccagaaaccagcagatattcctgcgggacatagaacaggtgccacagcagccgacatacgtccaggccctctttgactttgatccccaggaggatggagagctgggcttccgccggggagattttatccatgtcatggataactcagaccccaactggtggaaaggagcttgccacgggcagaccggcatgtttccccgcaattatgtcacccccgtgaaccggaacgtctaagagtcaagaagcaattatttaaagaaagtgaaaaatgtaaaacacatacaaaagaattaaacccacaagctgcctctgacagcagcctgtgagggagtgcagaacacctggccgggtcaccctgtgaccctctcactttggttggaactttagggggtgggagggggcgttggatttaaaaatgccaaaacttacctataaattaagaagagtttttattacaaattttcactgctgctcctctttcccctcctttgtcttttttttcatccttttttctcttctgtccatcagtgcatgacgtttaaggccacgtatagtcctagctgacgccaataataaaaaacaagaaaccaa

SEQ ID NO: 294454 - DNA, 1638 bp, Homo sapiens
ggcagtatgcaagactatatatatgaaacttagctaattacaagaggctacgacaaaattaataatggaccaaacatatttatactaataaaaaagtttctcaaattttcaagtctatttgagtttagtttagagttcatgcacagacatgaatatgttttatttgatatcctactattgagacagaaaaattccaaccggcctgcccactgaggtggtctaaatgcaatcatgattgcatttagaccaagtttggaaacgatgtgcagcacttcaaggtgctccgagatggagccgggaagtacttcctctgggtggtgaagttcaattctttgaatgagctggtggattatcacagatctacatctgtctccagaaaccagcagatattcctgcgggacatagaacaggtgccacagcagccgacatacgtccaggccctctttgactttgatccccaggaggatggagagctgggcttccgccggggagattttatccatgtcatggataactcagaccccaactggtggaaaggagcttgccacgggcagaccggcatgtttccccgcaattatgtcacccccgtgaaccggaacgtctaagagtcaagaagcaattatttaaagaaagtgaaaaatgtaaaacacatacaaaagaattaaacccacaagctgcctctgacagcagcctgtgagggagtgcagaacacctggccgggtcaccctgtgaccctctcactttggttggaactttagggggtgggagggggcgttggatttaaaaatgccaaaacttacctataaattaagaagagtttttattacaaattttcactgctgctcctctttcccctcctttgtcttttttttcatccttttttctcttctgtccatcagtgcatgacgtttaaggccacgtatagtcctagctgacgccaataataaaaaacaagaaaccaagtgggctggtattctctctatgcaaaatgtctgttttagttggaatgactgaaagaagaacagctgttcctgtgttcttcgtatatacacacaaaaaggagcgggcagggccgctcgatgcctttgctgtttagcttcctccagaggaggggacttgtaggaatctgccttccagcccagacccccagtgtattttgtccaagttcacagtagagtagggtagaaggaaagcatgtctctgcttccatggcttcctgagaaagcccacctgggctgggcgcggtggctcacgcctgtaatcccagcactttgggaggccaaggtgggcggatcacaaggtcaggagttcgagaccaacctagccaacatggtgaaaccccgtctctactaaaaataagaaattagccgggtgtggtggcacgcacctgtagtcccagctacttgggagcctgaggcaggagaatcgcttgaacctgggaagtggaggttgagtgagccgggaccgtgccattgtactccagcctgggtgacagagcgagattccgtctcaaaaaaaaaaaaaaaaaggcccacctgaaagcctgtctcttcccactttggtgggcccttccagggggattatcgagcatgtggttttgccatagtgccttttgcctaattacagggttgcttctga

SEQ ID NO: 294455 - DNA, 1106 bp, Homo sapiens
agacgttccggttcacgggggtgacataattgcggggaaacatgccggtctccccgtgaaccggaacgtctaagagtcaagaagcaattatttaaagaaagtgaaaaatgtaaaacacatacaaaagaattaaacccacaagctgcctctgacagcagcctgtgagggagtgcagaacacctggccgggtcaccctgtgaccctctcactttggttggaactttagggggtgggagggggcgttggatttaaaaatgccaaaacttacctataaattaagaagagtttttattacaaattttcactgctgctcctctttcccctcctttgtcttttttttcatccttttttctcttctgtccatcagtgcatgacgtttaaggccacgtatagtcctagctgacgccaataataaaaaacaagaaaccaagtgggctggtattctctctatgcaaaatgtctgttttagttggaatgactgaaagaagaacagctgttcctgtgttcttcgtatatacacacaaaaaggagcgggcagggccgctcgatgcctttgctgtttagcttcctccagaggaggggacttgtaggaatctgccttccagcccagacccccagtgtattttgtccaagttcacagtagagtagggtagaaggaaagcatgtctctgcttccatggcttcctgagaaagcccacctgggctgggcgcggtggctcacgcctgtaatcccagcactttgggaggccaaggtgggcggatcacaaggtcaggagttcgagaccaacctagccaacatggtgaaaccccgtctctactaaaaataagaaattagccgggtgtggtggcacgcacctgtagtcccagctacttgggagcctgaggcaggagaatcgcttgaacctgggaagtggaggttgagtgagccgggaccgtgccattgtactccagcctgggtgacagagcgagattccgtctcaaaaaaaaaaaaaaaaaggcccacctgaaagcctgtctcttcccactttggtgggcccttccagggggattatcgagcatgtggttttgccatagtgccttttgcctaattacagggttgcttctga

SEQ ID NO: 294456 - DNA, 688 bp, Homo sapiens
aggagggctgagccaggccgagccaggggcgtgggggctgggacagcaggccgattggcagggcggggttgccttcaatcctggccactgctcttaatcgtccctctcctgcttcagggtggcattgtgtgtcccagagtgccggagcgagtcccagaagagaggcgaggctaagcccagagcgctgggttgcttcagcagggaagactcccttccccctgcttcaggctgctgagcactgagcagcgctcagaatggaagccatcgccaaatatgacttcaaagctactgcagacgacgagctgagcttcaaaaggggggacatcctcaaggttttgaacgaagaatgtgatcagaactggtacaaggcagagcttaatggaaaagacggcttcattcccaagaactacatagaaatgaaaccacatccgtggttttttggcaaaatccccagagccaaggcagaagaaatgcttagcaaacagcggcgaagtggaggttgagtgagccgggaccgtgccattgtactccagcctgggtgacagagcgagattccgtctcaaaaaaaaaaaaaaaaaggcccacctgaaagcctgtctcttcccactttggtgggcccttccagggggattatcgagcatgtggttttgccatagtgccttttgcctaattacagggttgcttctga

SEQ ID NO: 294457 - DNA, 762 bp, Homo sapiens
aagccatcgccaaatatgacttcaaagctactgcagacgacgagctgagcttcaaaaggggggacatcctcaaggtaagtgctgatgccgagcacaatgctgagatcgctctccctgtgctcacccaccttctttcgccctgattacacacaaagaagctgtgtttttcattgtacacttttaacatttaccatcatatttgttctggagagctttagatgctgagtagaatattaaatatgacttaagtgagttggtgtgatgtgtggtgtttaactgcctttgtgtgaatgcctcatttgtctgttgatactggtaatatttcaagtaaagtcaaagtaatgtgattgtagaaaggaagtatatgagtagattgatttgccctgtagagttttattttaaaaatagcattttttaaaaagacccagacctgaagtatttatgtaaaagcattcagttagtcttactttgtatagccaaaggattttgcgttctggaatatgattttggtaggttagaaattaattttcccagtttagagaggttgttagaagtacataccaaaactcattaaagaacttcagtgtatttttattctttgtgaaaaaacaaatggagttctaaataataaggtgcaacctgctattgtacaagtcagatttcgactttcttaaaagaaacttgaggagcaattaccccatattaaactctaattgcacgaaaagaaacctgctgacagtttaaaaatcagcttctatacca

SEQ ID NO: 294458 - DNA, 5263 bp, Homo sapiens
  misc_feature (150)..(150): n is a, c, g, or t
  misc_feature (685)..(685): n is a, c, g, or t
cacgggggaagcaggcgggccccccagcacccgggaggccgagctgaagctgcggctaaagctggtggaggaggaagccaacatcttgggccggaagatcgtggagctggaggtggagaaccgtggcctcaaggcagagatggaggacangcggggccagcaggagcgggagggcccgggtcgggaccacgcacccagcattcctacctcacccttcggtgactccctggagtcctccactgagctccgccgccacctgcagtttgtagaagaggaagcggagttgctccggaggtccatctccgagatcgaagaccacaaccggcaactgacccacgagctcagcaagtttaagtttgagcctccccgggagccgggctggctaggagagggtgcaagtcctggtgccgggggtggggcccccctgcaggaggagctgaagtcagccaggctgcagatcagcgagctcagcggcaaggtgctcaaactgcagcacgagaaccacgcgctgctgtccaacatccagcgctgcgacctggcagcccacctggggctgcgtgcccccagtccccgggacagcgatgccgagagtgatgcgggcaagaaggagagtgatggggaggagagccgcctgccccagcccaagcgggaagggcctgttggcggggagagtgactcggagganatgtttgagaagacgtcgggcttcgggagcgggaagccatcggaggccagcgagccatgccccacggagctcctgaaggcccgggaggactctgagtacctagtgaccctaaaacacgaggcccagcggctagagcggacggtggagcgcctcatcacggacaccgacagcttcctccatgatgcggggctgcggggtggtgcgcccttaccggggcctggcctccagggcgaagaggagcagggtgagggggaccagcaggagccccagctgctggggaccatcaacgccaagatgaaggctttcaagaaagagctgcaggccttcctggagcaggtgaaccgcattggggatggcctatcccccttgccccacctcacagagtcctctagcttcctctccactgtgacttccgtgtcccgggactcccccatcgggaacctggggaaggagctgggcccagacttgcagtccagactgaaagagcagctggagtggcagctcgggccggcccgaggggacgagcgggagagcctgcgcctccgagccgcgcgggagctgcaccgccgcgcagacggggacaccgggagccacgggctgggaggccagacctgcttcagcctggagatggaggaggagcacctctatgccttgaggtggaaagaactggaaatgcacagcctggctttgcaaaacaccctccatgagcgaacctggagtgatgagaagaatctgatgcagcaggagctccggtccttgaagcagaacattttcctcttctacgtcaaactcaggtggctgctgaaacactggcggcaagggaagcagatggaggaggaaggagaggagttcactgagggtgaacatccagagaccctctccaggctcggggagcttggagtccaggggggtcaccaggcggatggcccagaccacgacagtgaccgaggctgtggctttccagtgggggagcactccccacactcccgggtgcagattggagatcacagcttgcggctgcagaccgcggacaggggacagccccacaaacaggtggtggaaaaccagcagctgttcagcgccttcaaggccttgctggaggacttccgtgcggagctgcgggaggatgagcgtgcccgactacggctgcagcagcaatatgccagcgacaaggcggcctgggacgtggagtgggccgtgctcaagtgccgtctggaacagctggaagagaagactgagaacaagttgggagaactaggctcctccgctgagagcaagggggccttgaagaaggagagagaggtgcaccagaagctcctggcagacagtcacagcctggtcatggacctgcgctggcagatccatcacagcgagaagaactggaaccgggagaaggtggaacttctcgaccgcctggacagagatcggcaggagtgggagcggcagaagaaggaattcttgtggaggatagagcagttgcagaaagagaacagtccccggagaggtggcagtttcctctgtgatcaaaaagacggcaacgttcgcccctttccccaccagggaagcctccgcatgccccgtccagtggccatgtggccttgtgcagatgctgactccatcccgtttgaagaccggccgctgtccaagctgaaggagtcggacaggtgctcggccagtgagaatctctacctggatgccttgtccctggatgacgagccagaagagccaccagcccacaggcccgagagggagttcaggaaccgcctccctgaggaagaagaaaatcacaaaggaaatcttcaaagggcggtgtccgtgtcctccatgtctgagttccagcgtctaatggacatctcccccttcctgcctgagaagggcctgccgtccaccagcagcaaggaggatgtcaccccacccctgtctccagacgacctcaagtacatcgaggagttcaacaagagctgggactacacacccaacaggggccacaatggtggggggccggacctttgggccgacaggaccgaggtggggcgggcagggcacgaggacagcacagagcctttccccgactcctcctggtacctaaccacaagtgtcaccatgaccacggacaccatgaccagcccagagcactgccagaagcagccactgcggagccacgtcctcaccgagcagtcggggttgcgcgtgttacacagcccgcctgccgtgcgcagggtcgacagcatcacggcggcaggtggtgagggtccctttcccacaagcagagccagagggagcccgggagacaccaaggggggccctccagaacccatgctcagcaggtggccttgcacctcccccaggcactcccgggactatgtggagggggcacggcgcccccttgatagtcccctctgtacctccctggggtttgcctccccactgcacagcctggagatgtccaagaacttgagtgatgacatgaaggaggtggccttctctgtcaggaatgccatctgctccggccctggcgagctgcaagtcaaggacatggcctgccagaccaatgggtcccggacgatggggacccagactgttcagaccatcagtgtgggcttgcagactgaagccctgcgtggcagcggtgtcaccagcagcccccacaagtgtctcactccaaaggctgggggcggtgctacacccgtgtcgtctccttcccggagccttaggagcagacaggtggcccctgccatcgagaaggtgcaggccaagtttgaacgcacatgctgctcccccaagtatggttctcccaagctgcagaggaagcccctccccaaagccgaccagccaaataacaggacgtcaccagggatggcccagaaagggtacagtgagtcagcctgggcccgctccaccaccacaagggagagccccgtgcacaccaccattaatgatggcctctccagcctcttcaacatcattgaccacagccccgtggtgcaggaccccttccagaaggggctgcgggccggcagtcggtctcgctcagcagagccccgaccagagctgggcccaggccaggaaacaggcaccaattcccgaggaaggtcgcctagccccattggggtggggtcagagatgtgcagggaggaagggggagagggcacgccagtgaagcaggacttatctgctccccctggctacaccctcactgagaacgtggcccggatcctcaacaagaagctgctggaacatgccttaaaggaggagaggaggcaggctgcccacgggcccccgggtctccacagtgacagccactcgctgggggacacagccgagccagggcccatggagaaccaaactgtcttgctaactgccccctggggactctagccctgcccgcctcacgctgaactaccttgttctgcactagctccatccctagagccctgcttctccaggcccgagagaccagcaaaccgtcgccctccgtcccgttgggccccacattcccccactgcctcacagcctcagtcacccggagacccgacgtccttggaggagcatggtggcgaggagccgcccgaggagcagccacaccgagatgcaagcttgcatggattatcacagtataattcactgtaatttgcataaccacaccatcaccatgaacaaaactctgcccaacaggagagatctagttttctcaaggtcaaagaatgttttttaaaaacacaaagctgctgaatgttcaacctgtgaaactgagatgtttctagaatgaaacagtaaatgtgcctgtaataacttaatttttttcatagctcagaaaactatttttgtctccatcttttttacacacagtatattaaacgaaaaggtaaataaggtataaatagatttaaaaaataaaagttttaaaaaatgtacattttaagagattctgaacaccctcgctgtcaatacctgactgcctctgttaaatttgcactgttacattttggttcagtttatttccatgttgaattagagtggattaagttaattttattttgtcagtgttactgttttttacgaattttttaatgcttcagactgtctgattcagtgaactttttgtagtgaaaaagccatgaagccagtagacaagacagatattctgtatgctggaggggatacaggatgattttgaaaaggtacaaagtcctcagtgggcttagaaaattcactgtatgatccttatattatcctacttggcttgcacgtcttcgggtgcatgtatataccgctactgtgtcctcgccatcacctaaatgtgactcagtctgttccactgtaatatgttgtgaatttccttgtactgtacttttattgttggtcttcttgcatcgatgatccaacagcaacaccatttttaaattattgtgaaaagattaactggcaatgtacagagtttactcaaagttttcttaagggaaaacactacaaaaagtcacaaggataccaaatggaaacacatgatgatgcctctgggtctgtatgagaccgtgatgaagtagaaataaagcccttctgagatggcaaaaaaaaaaa

SEQ ID NO: 294459 - DNA, 3947 bp, Homo sapiens
agctgctttaatagggagatcaagatgaatttgatgtataatcagaatcctagatggaggaggagcacctctatgccttgaggtggaaagaactggaaatgcacagcctggctttgcaaaacaccctccatgagcgaacctggagtgatgagaagaatctgatgcagcaggagctccggtccttgaagcagaacattttcctcttctacgtcaaactcaggtggctgctgaaacactggcggcaagggaagcagatggaggaggaaggagaggagttcactgagggtgaacatccagagaccctctccaggctcggggagcttggagtccaggggggtcaccaggcggatggcccagaccacgacagtgaccgaggctgtggctttccagtgggggagcactccccacactcccgggtgcagattggagatcacagcttgcggctgcagaccgcggacaggggacagccccacaaacaggtggtggaaaaccagcagctgttcagcgccttcaaggccttgctggaggacttccgtgcggagctgcgggaggatgagcgtgcccgactacggctgcagcagcaatatgccagcgacaaggcggcctgggacgtggagtgggccgtgctcaagtgccgtctggaacagctggaagagaagactgagaacaagttgggagaactaggctcctccgctgagagcaagggggccttgaagaaggagagagaggtgcaccagaagctcctggcagacagtcacagcctggtcatggacctgcgctggcagatccatcacagcgagaagaactggaaccgggagaaggtggaacttctcgaccgcctggacagagatcggcaggagtgggagcggcagaagaaggaattcttgtggaggatagagcagttgcagaaagagaacagtccccggagaggtggcagtttcctctgtgatcaaaaagacggcaacgttcgcccctttccccaccagggaagcctccgcatgccccgtccagtggccatgtggccttgtgcagatgctgactccatcccgtttgaagaccggccgctgtccaagctgaaggagtcggacaggtgctcggccagtgagaatctctacctggatgccttgtccctggatgacgagccagaagagccaccagcccacaggcccgagagggagttcaggaaccgcctccctgaggaagaagaaaatcacaaaggaaatcttcaaagggcggtgtccgtgtcctccatgtctgagttccagcgtctaatggacatctcccccttcctgcctgagaagggcctgccgtccaccagcagcaaggaggatgtcaccccacccctgtctccagacgacctcaagtacatcgaggagttcaacaagagctgggactacacacccaacaggggccacaatggtggggggccggacctttgggccgacaggaccgaggtggggcgggcagggcacgaggacagcacagagcctttccccgactcctcctggtacctaaccacaagtgtcaccatgaccacggacaccatgaccagcccagagcactgccagaagcagccactgcggagccacgtcctcaccgagcagtcggggttgcgcgtgttacacagcccgcctgccgtgcgcagggtcgacagcatcacggcggcaggtggtgagggtccctttcccacaagcagagccagagggagcccgggagacaccaaggggggccctccagaacccatgctcagcaggtggccttgcacctcccccaggcactcccgggactatgtggagggggcacggcgcccccttgatagtcccctctgtacctccctggggtttgcctccccactgcacagcctggagatgtccaagaacttgagtgatgacatgaaggaggtggccttctctgtcaggaatgccatctgctccggccctggcgagctgcaagtcaaggacatggcctgccagaccaatgggtcccggacgatggggacccagactgttcagaccatcagtgtgggcttgcagactgaagccctgcgtggcagcggtgtcaccagcagcccccacaagtgtctcactccaaaggctgggggcggtgctacacccgtgtcgtctccttcccggagccttaggagcagacaggtggcccctgccatcgagaaggtgcaggccaagtttgaacgcacatgctgctcccccaagtatggttctcccaagctgcagaggaagcccctccccaaagccgaccagccaaataacaggacgtcaccagggatggcccagaaagggtacagtgagtcagcctgggcccgctccaccaccacaagggagagccccgtgcacaccaccattaatgatggcctctccagcctcttcaacatcattgaccacagccccgtggtgcaggaccccttccagaaggggctgcgggccggcagtcggtctcgctcagcagagccccgaccagagctgggcccaggccaggaaacaggcaccaattcccgaggaaggtcgcctagccccattggggtggggtcagagatgtgcagggaggaagggggagagggcacgccagtgaagcaggacttatctgctccccctggctacaccctcactgagaacgtggcccggatcctcaacaagaagctgctggaacatgccttaaaggaggagaggaggcaggctgcccacgggcccccgggtctccacagtgacagccactcgctgggggacacagccgagccagggcccatggaggaactaccttgttctgcactagctccatccctagagccctgcttctccaggcccgagagaccagcaaaccgtcgccctccgtcccgttgggccccacattcccccactgcctcacagcctcagtcacccggagacccgacgtccttggaggagcatggtggcgaggagccgcccgaggagcagccacaccgagatgcaagcttgcatggattatcacagtataattcactgtaatttgcataaccacaccatcaccatgaacaaaactctgcccaacaggagagatctagttttctcaaggtcaaagaatgttttttaaaaacacaaagctgctgaatgttcaacctgtgaaactgagatgtttctagaatgaaacagtaaatgtgcctgtaataacttaatttttttcatagctcagaaaactatttttgtctccatcttttttacacacagtatattaaacgaaaaggtaaataaggtataaatagatttaaaaaataaaagttttaaaaaatgtacattttaagagattctgaacaccctcgctgtcaatacctgactgcctctgttaaatttgcactgttacattttggttcagtttatttccatgttgaattagagtggattaagttaattttattttgtcagtgttactgttttttacgaattttttaatgcttcagactgtctgattcagtgaactttttgtagtgaaaaagccatgaagccagtagacaagacagatattctgtatgctggaggggatacaggatgattttgaaaaggtacaaagtcctcagtgggcttagaaaattcactgtatgatccttatattatcctacttggcttgcacgtcttcgggtgcatgtatataccgctactgtgtcctcgccatcacctaaatgtgactcagtctgttccactgtaatatgttgtgaatttccttgtactgtacttttattgttggtcttcttgcatcgatgatccaacagcaacaccatttttaaattattgtgaaaagattaactggcaatgtacagagtttactcaaagttttcttaagggaaaacactacaaaaagtcacaaggataccaaatggaaacacatgatgatgcctctgggtctgtatgagaccgtgatgaagtagaaataaagcccttctgagatggcaaaaaaaaaaa

SEQ ID NO: 294460 - DNA, 3342 bp, Homo sapiens
agctgctttaatagggagatcaagatgaatttgatgtataatcagaatcctagatggaggaggagcacctctatgccttgaggtggaaagaactggaaatgcacagcctggctttgcaaaacaccctccatgagcgaacctggagtgatgagaagaatctgatgcagcaggagctccggtccttgaagcagaacattttcctcttctacgtcaaactcaggtggctgctgaaacactggcggcaagggaagcagatggaggaggaaggagaggagttcactgagggtgaacatccagagaccctctccaggctcggggagcttggagtccaggggggtcaccaggcggatggcccagaccacgacagtgaccgaggctgtggctttccagtgggggagcactccccacactcccgggtgcagattggagatcacagcttgcggctgcagaccgcggacaggggacagccccacaaacaggtggtggaaaaccagcagctgttcagcgccttcaaggccttgctggaggacttccgtgcggagctgcgggaggatgagcgtgcccgactacggctgcagcagcaatatgccagcgacaaggcggcctgggacgtggagtgggccgtgctcaagtgccgtctggaacagctggaagagaagactgagaacaagttgggagaactaggctcctccgctgagagcaagggggccttgaagaaggagagagaggtgcaccagaagctcctggcagacagtcacagcctggtcatggacctgcgctggcagatccatcacagcgagaagaactggaaccgggagaaggtggaacttctcgaccgcctggacagagatcggcaggagtgggagcggcagaagaaggaattcttgtggaggatagagcagttgcagaaagagaacagtccccggagaggtggcagtttcctctgtgatcaaaaagacggcaacgttcgcccctttccccaccagggaagcctccgcatgccccgtccagtggccatgtggccttgtgcagatgctgactccatcccgtttgaagaccggccgctgtccaagctgaaggagtcggacaggtgctcggccagtgagaatctctacctggatgccttgtccctggatgacgagccagaagagccaccagcccacaggcccgagagggagttcaggaaccgcctccctgaggaagaagaaaatcacaaaggaaatcttcaaagggcggtgtccgtgtcctccatgtctgagttccagcgtctaatggacatctcccccttcctgcctgagaagggcctgccgtccaccagcagcaaggaggatgtcaccccacccctgtctccagacgacctcaagtacatcgaggagttcaacaagagctgggactacacacccaacaggggccacaatggtggggggccggacctttgggccgacaggaccgaggtggggcgggcagggcacgaggacagcacagagcctttccccgactcctcctggtacctaaccacaagtgtcaccatgaccacggacaccatgaccagcccagagcactgccagaagcagccactgcggagccacgtcctcaccgagcagtcggggttgcgcgtgttacacagcccgcctgccgtgcgcagggtcgacagcatcacggcggcaggtggtgagggtccctttcccacaagcagagccagagggagcccgggagacaccaaggggggccctccagaacccatgctcagcaggtggccttgcacctcccccaggcactcccgggactatgtggagggggcacggcgcccccttgatagtcccctctgtacctccctggggtttgcctccccactgcacagcctggagatgtccaagaacttgagtgatgacatgaaggaggtggccttctctgtcaggaatgccatctgctccggccctggcgagctgcaagtcaaggacatggcctgccagaccaatgggtcccggacgatggggacccagactgttcagaccatcagtgtgggcttgcagactgaagccctgcgtggcagcggtgtcaccagcagcccccacaagtgtctcactccaaaggctgggggcggtgctacacccgtgtcgtctccttcccggagccttaggagcagacaggtggcccctgccatcgagaaggtgcaggccaagtttgaacgcacatgctgctcccccaagtatggttctcccaagctgcagaggaagcccctccccaaagccgaccagccaaataacaggacgtcaccagggatggcccagaaagggtacagtgagtcagcctgggcccgctccaccaccacaagggagagccccgtgcacaccaccattaatgatggcctctccagcctcttcaacatcattgaccacagccccgtggtgcaggaccccttccagaaggggctgcgggccggcagtcggtctcgctcagcagagccccgaccagagctgggcccaggccaggaaacaggcaccaattcccgaggaaggtcgcctagccccattggggtggggtcagagatgtgcagggaggaagggggagagggcacgccagtgaagcaggacttatctgctccccctggctacaccctcactgagaacgtggcccggatcctcaacaagaagctgctggaacatgccttaaaggaggagaggaggcaggctgcccacgggcccccgggtctccacagtgacagccactcgctgggggacacagccgagccagggcccatggaggaactaccttgttctgcactagctccatccctagagccctgcttctccaggcccgagagaccagcaaaccgtcgccctccgtcccgttgggccccacattcccccactgcctcacagcctcagtcacccggagacccgacgtccttggaggagcatggtggcgaggagccgcccgaggagcagccacaccgagatgcaagcttgcatggattatcacagtataattcactgtaatttgcataaccacaccatcaccatgaacaaaactctgcccaacaggagagatctagttttctcaaggtcaaagaatgttttttaaaaacacaaagctgctgaatgttcaacctgtgaaactgagatgtttctagaatgaaacagtaaatgtgcctgtaataacttaatttttttcatagctcagaaaactatttttgtctccatcttttttacacacagtatattaaacgaaaaggtaaataaggtataaatagatttaaaaaataaaagttttaaaaaatgtacattttaagagattctgaacaccctcgactgggggagcctgctagtagtcgaccgggaa

SEQ ID NO: 294461 - DNA, 540 bp, Homo sapiens
atctctgtttgccaaagtgctgtttgaaatgttaaatgctaaagggtgactcggaagcatagaaactagagggaggtctgtgactcctccatggagtttccttcttctctctgggcagatggcagagggcaggcctgtgtgcctagtgcctggccacttccccacacctgccttggagtgaatgtgctagatctgagagcccgcaagtctctcctggtggctacccctgagcgagagggatggtcctctacctccgggcttgctgactttaaacctttattgttctcctgtttaaaaaacactttccaaccttcttgcttttcttttctttctctgtctgttctgtccagaaccaaactgtcttgctaactgccccctggggactctagccctgcccgcctcacgctgtaagtgcttccttccttgtttcccaactgtctggagaggtcgtgttgtgtaactcgcagttggcacctgacgctcatcacctgagggagttctgcccggtggcggtaccctcgctcaccccaagttccagga

SEQ ID NO: 294462 - DNA, 432 bp, Homo sapiens
aagacgggtcagttccagaaattctcattagcctgctttataatgccacaaatgggagactatcagcagaagtgataaaaggcagccacttaaaaaattgggcagcaaacagaccacccaatacatatgttaagttaactctacggaaatccacggatcaagagatgtccaaatgcaagatatccatccgcagagggcggccaaatccagtatacaaggaaacttttgttttcaaagtgaccctatttcagctttctcatgtgacactcatgctgtctgtgtataacaaaagcagcatgagaagaaagatgataggctggatttatttaggtctcaacagctctggagaagaactcaatcactggactgaaatgaaagagtcaaaaggacggcaagtacgtagatggcaggcgttgctagagtcacgatgaa

SEQ ID NO: 294463 - DNA, 228 bp, Homo sapiens
tgcataagagggttgataaaatggaattcaagtgaacattttatgtgaagaactgcagtaatgaattctgaatttgttcaaatcattgaagatgtgtgaagacaaaacattcactcaaatctctatcatgttagcatgttatttatcattgctctgttcttcattgttgaataatgcaattgagttaaaaagaataaacattatttaccgaagactcatatgttgata

SEQ ID NO: 294464 - DNA, 564 bp, Homo sapiens
aactggctggatcacactgtcagccaagaaaaggaaggacgaatgaggctgaagagactgcagggctgcagatgaaatatccagacctatgcatcctcatgtgggatgagtgggttccggcaaaatttaagaggctaatgatgggatggaggggttggcagcagcacagcatagcagaattttctgattcactaccactgctggtgttacagcgtgaacgtgacctgaagacaaaaaggcatgggtgaatccaactatgcaagttttctggatcagtcctaaacagctggctgagcagtgctggaaggagtcacacaaaagcggtgtattacactacaaatccatgttcattaacttcaagtggggccacaccacggttcagcaatcctgccacttttcacagatctaagtacaaagtggtttcaaactctccaccctgcaaccctctgacccacagtactcctgtttcagcaaatgattttgttttctccttccgaaggaaaaagcagcctccagatgtaactctttcatcttcctgctaccaaaaataaaaacttaccaaca

SEQ ID NO: 294465 - DNA, 636 bp, Homo sapiens
aactggctggatcacactgtcagccaagaaaaggaaggacgaatgaggctgaagagactgcagggctgcagatgaaatatccagacctatgcatcctcatgtgggatgagtgggttccggcaaaatttaagaggctaatgatgggatggaggggttggcagcagcacagcatagcagaattttctgattcactaccactgctggtgttacagcgtgaacgtgacctgaagacaaaaaggctgtacagaatcattgtcacttccacaggaggggtttcggcgacgcgtgtaagggaactttggcgacttagtgcgatcactgggagaattgtagagtccactggagagaaagaaaaatggtcaaaaagagcccagagagttcctgggggaaaacacaccgcagcccagacctattcataactgcacagctggtacttccagaggcacatgcaccaggggcacgtggttctctttgctgacaagatttattaaaagaaaagaggaaagaactattctaaaatggaccctccctccaaaaaagcccaaacagccaaagcaattctaagcagaaagaacaaagctggaggcatcacactacctgacttcaaactgtactacaaggctacagtaacaaaaa

SEQ ID NO: 294466 - DNA, 532 bp, Homo sapiens
aactggctggatcacactgtcagccaagaaaaggaaggacgaatgaggctgaagagactgcagggctgcagatgaaatatccagacctatgcatcctcatgtgggatgagtgggttccggcaaaatttaagaggctaatgatgggatggaggggttggcagcagcacagcatagcagaattttctgattcactaccactgctggtgttacagcgtgaacgtgacctgaagacaaaaagcagtaagtgttaaaatgactggagccctttggatggtgcagtgcacgttaattaatggcctcacagtaatatgagggcagcctcaatcatttcactggatgatcctttgaaagaagccagcggaaaatgaacctcagtgtagaagtcaagtctggatttgggagtgtatatgctgcaaactatttcaagcaattattttgtatgaaaatatgcaaatttagccatattttagcaaaatgtaattaagctcattttcaaatgtattaaaatgactatctgctcaacatgtgtaat

SEQ ID NO: 294467 - DNA, 680 bp, Homo sapiens
aactggctggatcacactgtcagccaagaaaaggaaggacgaatgaggctgaagagactgcagggctgcagatgaaatatccagacctatgcatcctcatgtgggatgagtgggttccggcaaaatttaagaggctaatgatgggatggaggggttggcagcagcacagcatagcagaattttctgattcactaccactgctggtgttacagcgtgaacgtgacctgaagacaaaaaggctgtacagaatcattgtcacttccacaggaggggtttcggcgacgcgtgtaagggaactttggcgacttagtgcgatcactgggagaattgtagagtccactggagagaaagaaaaatggtcaaaaagagcccagagagttcctgggggaaaacacaccgcagcccagacctattcataactgcacagctggtacttccagaggcacatgcaccaggggcacgtggttctctttgctgacaagatttattaaaagaaaagagttatcctactgatgctgtttgattctagcagaggaggagaaggaaagatggaagagagaggaaacagtgataaggaaatgaaagaaacagaagacttattttaaaatgcaattttagggacactgtggcacattttattgataaattataaccccaaataaataatgaatcacccaata

SEQ ID NO: 294468 - DNA, 718 bp, Homo sapiens
ggagttcccaccttgtcccaggcactgtcgtggagactgctttgctctgtggcctcgtgttccccgctgcctctcggtcttgcttttatccacatccagcctcatccacacccgccagggctcctccttgggatcttggggtgggccaaggcggtaccagttgcacagacggcccgggccttgtcagcggggagcccggtgctttggtggcttgtttttccctgtctttaataggaatcaagtgtgatatcatgaattgatggggggaagattaagaaggctttgtaagactataagttagtttgctgtgaagagtgtgcttattaaatgctttctgcaacacgaagactgcagcccttgactttgaaatcatctgtttttagaatcttgaaagaattgaaattagttttctggctgattcccttcccttccttcctagaaaagacaactggcagtgcagagtttagcatttaatttgaaagataaagtcttttgtgaattatttcctgaagtcgtggaggtaagaaagacggaagtgggtttcgccttcccctgcgttaaaacacttgagtttcacctctttccaaagagtaaaatctgtgtcctgaagctgcagacctccccaggggatggctcctctcccccaggagccccgaggcaggggaggcagaaagcctgggctctggggggtggcctgcggacagctgtgctggtgggc

SEQ ID NO: 294469 - DNA, 859 bp, Homo sapiens
agcggggttccgccccgcgagcggccatcttggaggctgaggcggcggcggcggcgctgcggcgggttcggtgggcccaatcccggggcggtgcggctgtttcgggcgcgggccccgcttttccgcaccctgctccggcctcgactacggcgagcctgagcgcggcggcggcccacgcgcagcgacagggagagatgagcagcaccagcagtaagagggctccgaccacggcaacccagaggctgaagcaggactaccttcgcattaagaaagacccggtgccttacatctgtgccgagcccctcccttcgaatattctcgagtggcactatgtcgtccgaggcccagagatgaccccttatgaaggtaaggattctgtgcttaggagaagaacaccaggcggtttttatattctcagtcagccttgcctgttcaacatcttttatttgcaaacagcagcctttctactttggatgtgtgctagttaaattggcttagttggaactcctcctcgtctgcttctccacacgctggaagtgtttgctctgctgatgtgtctcagcctgcagggccgcctgtagcgtctgtgttcaccagcctctgacaccatagggccatagctgagaaaaccagaccggggtaaacactgaagctggcctgttctactatttcttaagacccagtgcatatcatcaaaggaaaggcacatatattcagttattcagtgtgccttctgtgctgggcgcccccagggtttcgcaatccccaggacggtctctgagctaagtggaagtacccctgtgtggtggcacctggggcttcggtaggctgcaggacctgtccagcacctcagcccttc

SEQ ID NO: 294470 - DNA, 1276 bp, Homo sapiens
agcggggttccgccccgcgagcggccatcttggaggctgaggcggcggcggcggcgctgcggcgggttcggtgggcccaatcccggggcggtgcggctgtttcgggcgcgggccccgcttttccgcaccctgctccggcctcgactacggcgagcctgagcgcggcggcggcccacgcgcagcgacagggagagatgagcagcaccagcagtaagagggctccgaccacggcaacccagaggctgaagcaggactaccttcgcattaagaaagacccggtgccttacatctgtgccgagcccctcccttcgaatattctcgagtggcactatgtcgtccgaggcccagagatgaccccttatgaaggtggctattatcatggaaaactaatttttcccagagaatttcctttcaaacctcccagtatctatatgatcactcccaacgggaggtttaagtgcaacaccaggctgtgtctttctatcacggatttccacccggacacgtggaacccggcctggtctgtctccaccatcctgactgggctcctgagcttcatggtggagaagggccccaccctgggcagtatagagacgtcggacttcacgaaaagacaactggcagtgcagagtttagcatttaatttgaaagataaagtcttttgtgaattatttcctgaagtcgtggaggagattaaacaaaaacagaaagcacaagacgaactcagtagcagaccccagactctccccttgccagacgtggttccagacggggagacgcacctcgtccagaacgggattcagctgctcaacgggcatgcgccgggggccgtcccaaacctcgcagggctccagcaggccaaccggcaccacggactcctgggtggcgccctggcgaacttgtttgtgatagttgggtttgcagcctttgcttacacggtcaagtacgtgctgaggagcatcgcgcaggagtgaggcccaggcgccgagacccaaggcgccactgagggcaccgcgcaccagagcgtgacctcggcaggctggacacactgcccagcacaggcagacccaccaggctcctaggtttagcttttaaaaacctgaaaggggaagcaaaaaccaaaatgtgtgactgggctttggaggagactggagcctcagccctgtcctggccacgggccgctggggctggtgtgggtgggccttgtgtgctggatttgtagcttatcttccgtgttgtctttggacctgttttagtaaacccgtttttcatttta

SEQ ID NO: 294471 - DNA, 1895 bp, Homo sapiens
agcggggttccgccccgcgagcggccatcttggaggctgaggcggcggcggcggcgctgcggcgggttcggtgggcccaatcccggggcggtgcggctgtttcgggcgcgggccccgcttttccgcaccctgctccggcctcgactacggcgagcctgagcgcggcggcggcccacgcgcagcgacagggagagatgagcagcaccagcagtaagagggctccgaccacggcaacccagaggctgaagcaggactaccttcgcattaagaaagacccggtgccttacatctgtgccgagcccctcccttcgaatattctcgagtggcactatgtcgtccgaggcccagagatgaccccttatgaaggtggctattatcatggaaaactaatttttcccagagaatttcctttcaaacctcccagtatctatatgatcactcccaacgggaggtttaagtgcaacaccaggctgtgtctttctatcacggatttccacccggacacgtggaacccggcctggtctgtctccaccatcctgactgggctcctgagcttcatggtggagaagggccccaccctgggcagtatagagacgtcggacttcacgaaaagacaactggcagtgcagagtttagcatttaatttgaaagataaagtcttttgtgaattatttcctgaagtcgtggaggagattaaacaaaaacagaaagcacaagacgaactcagtagcagaccccagactctccccttgccagacgtggttccagacggggagacgcacctcgtccagaacgggattcagctgctcaacgggcatgcgccgggggccgtcccaaacctcgcagggctccagcaggccaaccggcaccacggactcctgggtggcgccctggcgaacttgtttgtgatagttgggtttgcagcctttgcttacacggtcaagtacgtgctgaggagcatcgcgcaggagtgaggcccaggcgccgagacccaaggcgccactgagggcaccgcgcaccagagcgtgacctcggcaggctggacacactgcccagcacaggcagacccaccaggctcctaggtttagcttttaaaaacctgaaaggggaagcaaaaaccaaaatgtgtgactgggctttggaggagactggagcctcagccctgtcctggccacgggccgctggggctggtgtgggtgggccttgtgtgctggatttgtagcttatcttccgtgttgtctttggacctgttttagtaaacccgtttttcattttattagatgtggtcacttagaaatgcaaacttgctgccgaccgcgggctgctcctgcgttcttggagctcctggcgcgtttctcggagctcccggctcctcagcgggtgggaacctcggggcccaggggtggagctggcgtccgcgggtgctggtctggcctggccgtgtggtgatgaggcttagcggggccagtgacggccgtggctcaggatccataagtcggggtttggtctcagcatttacaaatgtgtttacagtcagaatgaaacacattccttctagaaagtgcttgggggtttttgctgccctggaagccaggagcctgctcactccaaccacaagtcgcccttgactgcggcggccgcgagcggggcgggggctgccggtgccctccgcaggccgggcctcctgggcgcccctcggtgctgcaggctggggggccttgggtacctgcagagccttttctctgaattccttatgtccggtgggccagaagcccgtcctcctatgctggtggaaggcggaggaccggagtccctgcagaaggccccgtgcactcgggggcctccctcacatcccgtgccccctgcgctggccttcacagtaggtaatggctccg

SEQ ID NO: 294472 - DNA, 1273 bp, Homo sapiens
aaattaggctaggtacgaggctgggtttgaatctggcagcggcggcggcggcgctgcggcgggttcggtgggcccaatcccggggcggtgcggctgtttcgggcgcgggccccgcttttccgcaccctgctccggcctcgactacggcgagcctgagcgcggcggcggcccacgcgcagcgacagggagagatgagcagcaccagcagtaagagggctccgaccacggcaacccagaggctgaagcaggactaccttcgcattaagaaagacccggtgccttacatctgtgccgagcccctcccttcgaatattctcgagtggcactatgtcgtccgaggcccagagatgaccccttatgaaggtggctattatcatggaaaactaatttttcccagagaatttcctttcaaacctcccagtatctatatgatcactcccaacgggaggtttaagtgcaacaccaggctgtgtctttctatcacggatttccacccggacacgtggaacccggcctggtctgtctccaccatcctgactgggctcctgagcttcatggtggagaagggccccaccctgggcagtatagagacgtcggacttcacgaaaagacaactggcagtgcagagtttagcatttaatttgaaagataaagtcttttgtgaattatttcctgaagtcgtggaggagattaaacaaaaacagaaagcacaagacgaactcagtagcagaccccagactctccccttgccagacgtggttccagacggggagacgcacctcgtccagaacgggattcagctgctcaacgggcatgcgccgggggccgtcccaaacctcgcagggctccagcaggccaaccggcaccacggactcctgggtggcgccctggcgaacttgtttgtgatagttgggtttgcagcctttgcttacacggtcaagtacgtgctgaggagcatcgcgcaggagtgaggcccaggcgccgagacccaaggcgccactgagggcaccgcgcaccagagcgtgacctcggcaggctggacacactgcccagcacaggcagacccaccaggctcctaggtttagcttttaaaaacctgaaaggggaagcaaaaaccaaaatgtgtgactgggctttggaggagactggagcctcagccctgtcctggccacgggccgctggggctggtgtgggtgggccttgtgtgctggatttgtagcttatcttccgtgttgtctttggacctgttttagtaaacccgtttttcatttta

SEQ ID NO: 294473 - DNA, 1674 bp, Homo sapiens
  misc_feature (1579)..(1579): n is a, c, g, or t
  misc_feature (1584)..(1586): n is a, c, g, or t
  misc_feature (1595)..(1595): n is a, c, g, or t
agcggggttccgccccgcgagcggccatcttggaggctgaggcggcggcggcggcgctgcggcgggttcggtgggcccaatcccggggcggtgcggctgtttcgggcgcgggccccgcttttccgcaccctgctccggcctcgactacggcgagcctgagcgcggcggcggcccacgcgcagcgacagggagagatgagcagcaccagcagtaagagggctccgaccacggcaacccagaggctgaagcaggactaccttcgcattaagaaagacccggtgccttacatctgtgccgagcccctcccttcgaatattctcgagtggcactatgtcgtccgaggcccagagatgaccccttatgaaggtggctattatcatggaaaactaatttttcccagagaatttcctttcaaacctcccagtatctatatgatcactcccaacgggaggtttaagtgcaacaccaggctgtgtctttctatcacggatttccacccggacacgtggaacccggcctggtctgtctccaccatcctgactgggctcctgagcttcatggtggagaagggccccaccctgggcagtatagagacgtcggacttcacgaaaagacaactggcagtgcagagtttagcatttaatttgaaagataaagtcttttgtgaattatttcctgaagtcgtggaggagattaaacaaaaacagaaagcacaagacgaactcagtagcagaccccagactctccccttgccagacgtggttccagacggggagacgcacctcgtccagaacgggattcagctgctcaacgggcatgcgccgggggccgtcccaaacctcgcagggctccagcaggccaaccggcaccacggactcctgggtggcgccctggcgaacttgtttgtgatagttgggtttgcagcctttgcttacacggtcaagtacgtgctgaggagcatcgcgcaggagtgaggcccaggcgccgagacccaaggcgccactgagggcaccgcgcaccagagcgtgacctcggcaggctggacacactgcccagcacaggcagacccaccaggctcctaggtttagcttttaaaaacctgaaaggggaagcaaaaaccaaaatgtgtgactgggctttggaggagactggagcctcagccctgtcctggccacgggccgctggggctggtgtgggtgggccttgtgtgctggatttgtagcttatcttccgtgttgtctttggacctgttttagtaaacccgtttttcattttattagatgtggtcacttagaaatgcaaacttgctgccgaccgcgggctgctcctgcgttcttggagctcctggcgcgtttctcggagctcccggctcctcagcgggtgggaacctcggggcccaggggtggagctggcgtccgcgggtgctggtctggcctggccgtgtggtgatgaggcttagcggggccagtgacggccgtggctcaggatccataagtcggggtttggtctcagcatttacaaatgtgtttacagtcagaatgaaacacattccttctagaaagtgcttgggggttttggngccgnnnacggctgtnttcacagttcgcttatggggcgacgggggctcgccccggcggccggcccggttggtggcgccgggttcctcttggggcc

SEQ ID NO: 294474 - DNA, 1561 bp, Homo sapiens
aaattaggctaggtacgaggctgggtttgaatctggcagcggcggcggcggcgctgcggcgggttcggtgggcccaatcccggggcggtgcggctgtttcgggcgcgggccccgcttttccgcaccctgctccggcctcgactacggcgagcctgagcgcggcggcggcccacgcgcagcgacagggagaggtgagcgcgctcgcaggcctgcgccgggtcctcgggcccgctcgtcccccctgccggagccggccacagcggcggcccggggctgctggggaccctgcgcgacgcttctccgttcgcgcccgccgcccgcggggccccggcccgagcctgcctgcgcggaacccgaggtcggttacggcgggctcccggagctccgggtcaggtcatgtcggggacttgaccactcggccgggtttcccgtcagctgggacacttgcagctgccccaggacgggcagcctcgatcctgatgagcagcaccagcagtaagagggctccgaccacggcaacccagaggctgaagcaggactaccttcgcattaagaaagacccggtgccttacatctgtgccgagcccctcccttcgaatattctcgagtggcactatgtcgtccgaggcccagagatgaccccttatgaaggtggctattatcatggaaaactaatttttcccagagaatttcctttcaaacctcccagtatctatatgatcactcccaacgggaggtttaagtgcaacaccaggctgtgtctttctatcacggatttccacccggacacgtggaacccggcctggtctgtctccaccatcctgactgggctcctgagcttcatggtggagaagggccccaccctgggcagtatagagacgtcggacttcacgaaaagacaactggcagtgcagagtttagcatttaatttgaaagataaagtcttttgtgaattatttcctgaagtcgtggaggagattaaacaaaaacagaaagcacaagacgaactcagtagcagaccccagactctccccttgccagacgtggttccagacggggagacgcacctcgtccagaacgggattcagctgctcaacgggcatgcgccgggggccgtcccaaacctcgcagggctccagcaggccaaccggcaccacggactcctgggtggcgccctggcgaacttgtttgtgatagttgggtttgcagcctttgcttacacggtcaagtacgtgctgaggagcatcgcgcaggagtgaggcccaggcgccgagacccaaggcgccactgagggcaccgcgcaccagagcgtgacctcggcaggctggacacactgcccagcacaggcagacccaccaggctcctaggtttagcttttaaaaacctgaaaggggaagcaaaaaccaaaatgtgtgactgggctttggaggagactggagcctcagccctgtcctggccacgggccgctggggctggtgtgggtgggccttgtgtgctggatttgtagcttatcttccgtgttgtctttggacctgttttagtaaacccgtttttcatttta

SEQ ID NO: 294475 - DNA, 2085 bp, Homo sapiens
aaattaggctaggtacgaggctgggtttgaatctggcagcggcggcggcggcgctgcggcgggttcggtgggcccaatcccggggcggtgcggctgtttcgggcgcgggccccgcttttccgcaccctgctccggcctcgactacggcgagcctgagcgcggcggcggcccacgcgcagcgacagggagaggtgagcgcgctcgcaggcctgcgccgggtcctcgggcccgctcgtcccccctgccggagccggccacagcggcggcccggggctgctggggaccctgcgcgacgcttctccgttcgcgcccgccgcccgcggggccccggcccgagcctgcctgcgcggaacccgaggtcggttacggcgggctcccggagctccgggtcaggtcatgtcggggacttgaccactcggccgggtttcccgtcagctgggacacttgcagctgccccaggacgggcagcctcgatcctggttcgtcagtggatcacgggagtctgtgtcgggggagggctgccgtcgagcccgccgtcgcctcgcccctgaactgttagactccagactgccccgtaaaccccgagagaaacgagcgtgcccgggactgtgcttagggccagcgtttctgggaaacccgggcggtgacagtgggagaccaccgccggccggcgagtgagacacgagcccggaacaagtctctaagcggcgccgggcctcgccatccacacctgccagttccctgcatcctttcagcccctggccaggtgtcacctcctggcgtccttttcagtgcctgccacttagtgcgtgtgtatttaactctagtccggttgccatcctcttgccagacccagataggaagcggctgaaaggtcgggcctcagcccggtgggaggtgggcagcgaagagtgtacagcgggcttggctggggcaggtcggtggccccgcgccctgctccaggggaaccagactgtgtaatctggcttccgaagaaaggatcatgagcagcaccagcagtaagagggctccgaccacggcaacccagaggctgaagcaggactaccttcgcattaagaaagacccggtgccttacatctgtgccgagcccctcccttcgaatattctcgagtggcactatgtcgtccgaggcccagagatgaccccttatgaaggtggctattatcatggaaaactaatttttcccagagaatttcctttcaaacctcccagtatctatatgatcactcccaacgggaggtttaagtgcaacaccaggctgtgtctttctatcacggatttccacccggacacgtggaacccggcctggtctgtctccaccatcctgactgggctcctgagcttcatggtggagaagggccccaccctgggcagtatagagacgtcggacttcacgaaaagacaactggcagtgcagagtttagcatttaatttgaaagataaagtcttttgtgaattatttcctgaagtcgtggaggagattaaacaaaaacagaaagcacaagacgaactcagtagcagaccccagactctccccttgccagacgtggttccagacggggagacgcacctcgtccagaacgggattcagctgctcaacgggcatgcgccgggggccgtcccaaacctcgcagggctccagcaggccaaccggcaccacggactcctgggtggcgccctggcgaacttgtttgtgatagttgggtttgcagcctttgcttacacggtcaagtacgtgctgaggagcatcgcgcaggagtgaggcccaggcgccgagacccaaggcgccactgagggcaccgcgcaccagagcgtgacctcggcaggctggacacactgcccagcacaggcagacccaccaggctcctaggtttagcttttaaaaacctgaaaggggaagcaaaaaccaaaatgtgtgactgggctttggaggagactggagcctcagccctgtcctggccacgggccgctggggctggtgtgggtgggccttgtgtgctggatttgtagcttatcttccgtgttgtctttggacctgttttagtaaacccgtttttcatttta

SEQ ID NO: 294476 - DNA, 1405 bp, Homo sapiens
agcggggttccgccccgcgagcggccatcttggaggctgaggcggcggcggcggcgctgcggcgggttcggtgggcccaatcccggggcggtgcggctgtttcgggcgcgggccccgcttttccgcaccctgctccggcctcgactacggcgagcctgagcgcggcggcggcccacgcgcagcgacagggagagatgagcagcaccagcagtaagagggctccgaccacggcaacccagaggctgaagcaggactaccttcgcattaagaaagacccggtgccttacatctgtgccgagcccctcccttcgaatattctcgagtggtaaggctccgcgccactgatcgccctgcgctgactgtcgctgccacgcaggcctctgccggcccctgctgggcgagcctggtgccccagtcatggcattggcaaggtgctcctgcaccctcccccggggcactatgtcgtccgaggcccagagatgaccccttatgaaggtggctattatcatggaaaactaatttttcccagagaatttcctttcaaacctcccagtatctatatgatcactcccaacgggaggtttaagtgcaacaccaggctgtgtctttctatcacggatttccacccggacacgtggaacccggcctggtctgtctccaccatcctgactgggctcctgagcttcatggtggagaagggccccaccctgggcagtatagagacgtcggacttcacgaaaagacaactggcagtgcagagtttagcatttaatttgaaagataaagtcttttgtgaattatttcctgaagtcgtggaggagattaaacaaaaacagaaagcacaagacgaactcagtagcagaccccagactctccccttgccagacgtggttccagacggggagacgcacctcgtccagaacgggattcagctgctcaacgggcatgcgccgggggccgtcccaaacctcgcagggctccagcaggccaaccggcaccacggactcctgggtggcgccctggcgaacttgtttgtgatagttgggtttgcagcctttgcttacacggtcaagtacgtgctgaggagcatcgcgcaggagtgaggcccaggcgccgagacccaaggcgccactgagggcaccgcgcaccagagcgtgacctcggcaggctggacacactgcccagcacaggcagacccaccaggctcctaggtttagcttttaaaaacctgaaaggggaagcaaaaaccaaaatgtgtgactgggctttggaggagactggagcctcagccctgtcctggccacgggccgctggggctggtgtgggtgggccttgtgtgctggatttgtagcttatcttccgtgttgtctttggacctgttttagtaaacccgtttttcatttta

SEQ ID NO: 294477 - DNA, 1488 bp, Homo sapiens
aaattaggctaggtacgaggctgggtttgaatctggcagcggcggcggcggcgctgcggcgggttcggtgggcccaatcccggggcggtgcggctgtttcgggcgcgggccccgcttttccgcaccctgctccggcctcgactacggcgagcctgagcgcggcggcggcccacgcgcagcgacagggagaggtgagcgcgctcgcaggcctgcgccgggtcctcgggcccgctcgtcccccctgccggagccggccacagcggcggcccggggctgctggggaccctgcgcgacgcttctccgttcgcgcccgccgcccgcggggccccggcccgagcctgcctgcgcggaacccgagatgagcagcaccagcagtaagagggctccgaccacggcaacccagaggctgaagcaggactaccttcgcattaagaaagacccggtgccttacatctgtgccgagcccctcccttcgaatattctcgagtggttcaagcgattctcctggctcagcctcctgagtagctgggattacaggcactatgtcgtccgaggcccagagatgaccccttatgaaggtggctattatcatggaaaactaatttttcccagagaatttcctttcaaacctcccagtatctatatgatcactcccaacgggaggtttaagtgcaacaccaggctgtgtctttctatcacggatttccacccggacacgtggaacccggcctggtctgtctccaccatcctgactgggctcctgagcttcatggtggagaagggccccaccctgggcagtatagagacgtcggacttcacgaaaagacaactggcagtgcagagtttagcatttaatttgaaagataaagtcttttgtgaattatttcctgaagtcgtggaggagattaaacaaaaacagaaagcacaagacgaactcagtagcagaccccagactctccccttgccagacgtggttccagacggggagacgcacctcgtccagaacgggattcagctgctcaacgggcatgcgccgggggccgtcccaaacctcgcagggctccagcaggccaaccggcaccacggactcctgggtggcgccctggcgaacttgtttgtgatagttgggtttgcagcctttgcttacacggtcaagtacgtgctgaggagcatcgcgcaggagtgaggcccaggcgccgagacccaaggcgccactgagggcaccgcgcaccagagcgtgacctcggcaggctggacacactgcccagcacaggcagacccaccaggctcctaggtttagcttttaaaaacctgaaaggggaagcaaaaaccaaaatgtgtgactgggctttggaggagactggagcctcagccctgtcctggccacgggccgctggggctggtgtgggtgggccttgtgtgctggatttgtagcttatcttccgtgttgtctttggacctgttttagtaaacccgtttttcatttta

SEQ ID NO: 294478 - DNA, 1861 bp, Homo sapiens
agcggggttccgccccgcgagcggccatcttggaggctgaggcggcggcggcggcgctgcggcgggttcggtgggcccaatcccggggcggtgcggctgtttcgggcgcgggccccgcttttccgcaccctgctccggcctcgactacggcgagcctgagcgcggcggcggcccacgcgcagcgacagggagagatgagcagcaccagcagtaagagggctccgaccacggcaacccagaggctgaagcaggactaccttcgcattaagaaagacccggtgccttacatctgtgccgagcccctcccttcgaatattctcgagtggcactatgtcgtccgaggcccagagatgaccccttatgaaggtggctattatcatggaaaactaatttttcccagagaatttcctttcaaacctcccagtatctatatgatcactcccaacgggaggtttaagtgcaacaccaggctgtgtctttctatcacggatttccacccggacacgtggaacccggcctggtctgtctccaccatcctgactgggctcctgagcttcatggtggagaagggccccaccctgggcagtatagagacgtcggacttcacgaaaagacaactggcagtgcagagtttagcatttaatttgaaagataaagtcttttgtgaattatttcctgaagtcgtggaggagattaaacaaaaacagaaagcacaagacgaactcagtagcagaccccagactctccccttgccagacgtggttccagacggggagacgcacctcgtccagaacgggattcagctgctcaacgggcatgcgccgggggccgtcccaaacctcgcagggctccagcaggccaaccggcaccacggactcctgggtggcgccctggcgaacttgtttgtgatagttgggtttgcagcctttgcttacacggtcaagtacgtgctgaggagcatcgcgcaggagtgaggcccaggcgccgagacccaaggcgccactgagggcaccgcgcaccagagcgtgacctcggcaggctggacacactgcccagcacaggcagacccaccaggctcctaggtttagcttttaaaaacctgaaaggggaagcaaaaaccaaaatgtgtgactgggctttggaggagactggagcctcagccctgtcctggccacgggccgctggggctggtgtgggtgggccttgtgtgctggatttgtagcttatcttccgtgttgtctttggacctgttttagtaaacccgtttttcattttaaaaaaaaaaaaaaaaaaaaaaaaaaaaaaaaaaaaaaaaaaaaaaaaaaagaggggggcgggcgagcatccaaaaaataatcaccctcccgagggggccacaaaactaacgccgaccaccaggatttgctggtgcacaagagggcgcccccaacaagggaaggacgaattataaagaagaagaggagacaggggggcgcgagcgatataaaacaaggctgctgggagggggcgaacaacacggtgaccaacacgggggaaaccacctggggggacaaggaggaaccccactaacaatccgcgcgggggggggggggcaccaacgagggtgcggcagccaacacactacccaacaggaagagaattttataaagaagccctaaaggggggagcaataattatatcaaaactttatagagagggtgtgaatatgggggttgtttaaacccacaagacaggcgaagtaattgtgaagtcgatgcggttgaaaaaaagtgtttggtgatcaaaacggaggatattggaattttatgaagaaaaattttcttataaaacaggggggttagtgtagtaaaataaaaagcga

SEQ ID NO: 294479 - DNA, 1142 bp, Homo sapiens
taaaagcacccacggtagaagagacgggggttttgaagccgtgtggctgtgtgacatttcaccttcatttgttcactgcctgaatgtgaatgtaattttggctgggttctataaaccccaggcttggaatgattcagattttggagaatttgctgtcctcaaatcccaagtaattttcttctctcccttaggcactatgtcgtccgaggcccagagatgaccccttatgaaggtggctattatcatggaaaactaatttttcccagagaatttcctttcaaacctcccagtatctatatgatcactcccaacgggaggtttaagtgcaacaccaggctgtgtctttctatcacggatttccacccggacacgtggaacccggcctggtctgtctccaccatcctgactgggctcctgagcttcatggtggagaagggccccaccctgggcagtatagagacgtcggacttcacgaaaagacaactggcagtgcagagtttagcatttaatttgaaagataaagtcttttgtgaattatttcctgaagtcgtggaggagattaaacaaaaacagaaagcacaagacgaactcagtagcagaccccagactctccccttgccagacgtggttccagacggggagacgcacctcgtccagaacgggattcagctgctcaacgggcatgcgccgggggccgtcccaaacctcgcagggctccagcaggccaaccggcaccacggactcctgggtggcgccctggcgaacttgtttgtgatagttgggtttgcagcctttgcttacacggtcaagtacgtgctgaggagcatcgcgcaggagtgaggcccaggcgccgagacccaaggcgccactgagggcaccgcgcaccagagcgtgacctcggcaggctggacacactgcccagcacaggcagacccaccaggctcctaggtttagcttttaaaaacctgaaaggggaagcaaaaaccaaaatgtgtgactgggctttggaggagactggagcctcagccctgtcctggccacgggccgctggggctggtgtgggtgggccttgtgtgctggatttgtagcttatcttccgtgttgtctttggacctgttttagtaaacccgtttttcatttta

SEQ ID NO: 294480 - DNA, 1395 bp, Homo sapiens
aaattaggctaggtacgaggctgggtttgaatctggcagcggcggcggcggcgctgcggcgggttcggtgggcccaatcccggggcggtgcggctgtttcgggcgcgggccccgcttttccgcaccctgctccggcctcgactacggcgagcctgagcgcggcggcggcccacgcgcagcgacagggagagatgagcagcaccagcagtaagagggctccgaccacggcaacccagaggctgaagcaggactaccttcgcattaagaaagacccggtgccttacatctgtgccgagcccctcccttcgaatattctcgagtggcactatgtcgtccgaggcccagagatgaccccttatgaaggaatcccagttctggatcatctgcaactagggcagccagagtgcgggagtacatctgtagggtgggccctccatcatcgtgtcattgcccatgaccagcgttggggatgccagcaggccgtggtggctattatcatggaaaactaatttttcccagagaatttcctttcaaacctcccagtatctatatgatcactcccaacgggaggtttaagtgcaacaccaggctgtgtctttctatcacggatttccacccggacacgtggaacccggcctggtctgtctccaccatcctgactgggctcctgagcttcatggtggagaagggccccaccctgggcagtatagagacgtcggacttcacgaaaagacaactggcagtgcagagtttagcatttaatttgaaagataaagtcttttgtgaattatttcctgaagtcgtggaggagattaaacaaaaacagaaagcacaagacgaactcagtagcagaccccagactctccccttgccagacgtggttccagacggggagacgcacctcgtccagaacgggattcagctgctcaacgggcatgcgccgggggccgtcccaaacctcgcagggctccagcaggccaaccggcaccacggactcctgggtggcgccctggcgaacttgtttgtgatagttgggtttgcagcctttgcttacacggtcaagtacgtgctgaggagcatcgcgcaggagtgaggcccaggcgccgagacccaaggcgccactgagggcaccgcgcaccagagcgtgacctcggcaggctggacacactgcccagcacaggcagacccaccaggctcctaggtttagcttttaaaaacctgaaaggggaagcaaaaaccaaaatgtgtgactgggctttggaggagactggagcctcagccctgtcctggccacgggccgctggggctggtgtgggtgggccttgtgtgctggatttgtagcttatcttccgtgttgtctttggacctgttttagtaaacccgtttttcatttta

SEQ ID NO: 294481 - DNA, 1497 bp, Homo sapiens
agcggggttccgccccgcgagcggccatcttggaggctgaggcggcggcggcggcgctgcggcgggttcggtgggcccaatcccggggcggtgcggctgtttcgggcgcgggccccgcttttccgcaccctgctccggcctcgactacggcgagcctgagcgcggcggcggcccacgcgcagcgacagggagagatgagcagcaccagcagtaagagggctccgaccacggcaacccagaggctgaagcaggactaccttcgcattaagaaagacccggtgccttacatctgtgccgagcccctcccttcgaatattctcgagtggcactatgtcgtccgaggcccagagatgaccccttatgaaggaatcccagttctggatcatctgcaactagggcagccagagtgcgggagtacatctgtagggtgggccctccatcatcgtgtcattgcccatgaccagcgttggggatgccagcaggccgtggtgagataaggcccgggagcaggtgtccagggcgtgttaaagtacttgttacgatgcgtgtgtgtgccttcagctgatctgaagaatatataccaccgagtggctattatcatggaaaactaatttttcccagagaatttcctttcaaacctcccagtatctatatgatcactcccaacgggaggtttaagtgcaacaccaggctgtgtctttctatcacggatttccacccggacacgtggaacccggcctggtctgtctccaccatcctgactgggctcctgagcttcatggtggagaagggccccaccctgggcagtatagagacgtcggacttcacgaaaagacaactggcagtgcagagtttagcatttaatttgaaagataaagtcttttgtgaattatttcctgaagtcgtggaggagattaaacaaaaacagaaagcacaagacgaactcagtagcagaccccagactctccccttgccagacgtggttccagacggggagacgcacctcgtccagaacgggattcagctgctcaacgggcatgcgccgggggccgtcccaaacctcgcagggctccagcaggccaaccggcaccacggactcctgggtggcgccctggcgaacttgtttgtgatagttgggtttgcagcctttgcttacacggtcaagtacgtgctgaggagcatcgcgcaggagtgaggcccaggcgccgagacccaaggcgccactgagggcaccgcgcaccagagcgtgacctcggcaggctggacacactgcccagcacaggcagacccaccaggctcctaggtttagcttttaaaaacctgaaaggggaagcaaaaaccaaaatgtgtgactgggctttggaggagactggagcctcagccctgtcctggccacgggccgctggggctggtgtgggtgggccttgtgtgctggatttgtagcttatcttccgtgttgtctttggacctgttttagtaaacccgtttttcatttta

SEQ ID NO: 294482 - DNA, 1376 bp, Homo sapiens
agcggggttccgccccgcgagcggccatcttggaggctgaggcggcggcggcggcgctgcggcgggttcggtgggcccaatcccggggcggtgcggctgtttcgggcgcgggccccgcttttccgcaccctgctccggcctcgactacggcgagcctgagcgcggcggcggcccacgcgcagcgacagggagagatgagcagcaccagcagtaagagggctccgaccacggcaacccagaggctgaagcaggactaccttcgcattaagaaagacccggtgccttacatctgtgccgagcccctcccttcgaatattctcgagtggcactatgtcgtccgaggcccagagatgaccccttatgaaggtggctattatcatggaaaactaatttttcccagagaatttcctttcaaacctcccagtatctatatgatcactcccaacgggaggtttaagtgcaacaccaggctgtgtctttctatcacggatttccacccggacacgtggaacccggcctggtctgtctccaccatcctgactgggctcctgagcttcatggtggagaagggccccaccctgggcagtatagagacgtcggacttcacgaaaagacaactggcagtgcagagtttagcatttaatttgaaagataaagtcttttgtgaattatttcctgaagtcgtggaggagattaaacaaaaacagaaagcacaagacgaactcagtagcagaccccagactctccccttgccagacgtggttccagacggggagacgcacctcgtccagaacgggattcagctgctcaacgggcatgcgccgggggccgtcccaaacctcgcagggctccagcaggccaaccggcaccacggactcctgggtggcgccctggcgaacttgtttgtgatagttgggtttgcagcctttgcttacacggtcaagtacgtgctgaggagcatcgcgcaggagtgaggcccaggcgccgagacccaaggcgccactgagggcaccgcgcaccagagcgtgacctcggcaggctggacacactgcccagcacaggcagacccaccaggctcctaggtttagcttttaaaaacctgaaaggggaagcaaaaaccaaaatgtgtgactgggctttggaggagactggagcctcagccctgtcctggccacgggccgctggggctggtgtgggcttgggggagggcgtcactattcagcttctaggtggaggcatgagaaggccttggcctagccctccagggtcccatactgtggagtttggaggggcaggtctggcctttcctgggtcagcatagggcacccaggtgggggcacaggtggacacccagcacaggcacctaggcggggtac

SEQ ID NO: 294483 - DNA, 1726 bp, Homo sapiens
ggagttcccaccttgtcccaggcactgtcgtggagactgctttgctctgtggcctcgtgttccccgctgcctctcggtcttgcttttatccacatccagcctcatccacacccgccagggctcctccttgggatcttggggtgggccaaggcggtaccagttgcacagacggcccgggccttgtcagcggggagcccggtgctttggtggcttgtttttccctgtctttaataggaatcaagtgtgatatcatgaattgatggggggaagattaagaaggctttgtaagactataagttagtttgctgtgaagagtgtgcttattaaatgctttctgcaacacgaagactgcagcccttgactttgaaatcatctgtttttagaatcttgaaagaattgaaattagttttctggctgattcccttcccttccttcctagaaaagacaactggcagtgcagagtttagcatttaatttgaaagataaagtcttttgtgaattatttcctgaagtcgtggaggagattaaacaaaaacagaaagcacaagacgaactcagtagcagaccccagactctccccttgccagacgtggttccagacggggagacgcacctcgtccagaacgggattcagctgctcaacgggcatgcgccgggggccgtcccaaacctcgcagggctccagcaggccaaccggcaccacggactcctgggtggcgccctggcgaacttgtttgtgatagttgggtttgcagcctttgcttacacggtcaagtacgtgctgaggagcatcgcgcaggagtgaggcccaggcgccgagacccaaggcgccactgagggcaccgcgcaccagagcgtgacctcggcaggctggacacactgcccagcacaggcagacccaccaggctcctaggtttagcttttaaaaacctgaaaggggaagcaaaaaccaaaatgtgtgactgggctttggaggagactggagcctcagccctgtcctggccacgggccgctggggctggtgtgggtgggccttgtgtgctggatttgtagcttatcttccgtgttgtctttggacctgttttagtaaacccgtttttcattttattagatgtggtcacttagaaatgcaaacttgctgccgaccgcgggctgctcctgcgttcttggagctcctggcgcgtttctcggagctcccggctcctcagcgggtgggaacctcggggcccaggggtggagctggcgtccgcgggtgctggtctggcctggccgtgtggtgatgaggcttagcggggccagtgacggccgtggctcaggatccataagtcggggtttggtctcagcatttacaaatgtgtttacagtcagaatgaaacacattccttctagaaagtgcttgggggtttttgctgccctggaagccaggagcctgctcactccaaccacaagtcgcccttgactgcggcggccgcgagcggggcgggggctgccggtgccctccgcaggccgggcctcctgggcgcccctcggtgctgcaggctggggggccttgggtacctgcagagccttttctctgaattccttatgtccggtgggccagaagcccgtcctcctatgctggtggaaggcggaggaccggagtccctgcagaaggccccgtgcactcgggggcctccctcacatcccgtgccccctgcgctggccttcacagtaggtaatggctccg

SEQ ID NO: 294484 - DNA, 2780 bp, Homo sapiens
aaattaggctaggtacgaggctgggtttgaatctggcagcggcggcggcggcgctgcggcgggttcggtgggcccaatcccggggcggtgcggctgtttcgggcgcgggccccgcttttccgcaccctgctccggcctcgactacggcgagcctgagcgcggcggcggcccacgcgcagcgacagggagaggtgagcgcgctcgcaggcctgcgccgggtcctcgggcccgctcgtcccccctgccggagccggccacagcggcggcccggggctgctggggaccctgcgcgacgcttctccgttcgcgcccgccgcccgcggggccccggcccgagcctgcctgcgcggaacccgaggtcggttacggcgggctcccggagctccgggtcaggtcatgtcggggacttgaccactcggccgggtttcccgtcagctgggacacttgcagctgccccaggacgggcagcctcgatcctggttcgtcagtggatcacgggagtctgtgtcgggggagggctgccgtcgagcccgccgtcgcctcgcccctgaactgttagactccagactgccccgtaaaccccgagagaaacgagcgtgcccgggactgtgcttagggccagcgtttctgggaaacccgggcggtgacagtgggagaccaccgccggccggcgagtgagacacgagcccggaacaagtctctaagcggcgccgggcctcgccatccacacctgccagttccctgcatcctttcagcccctggccaggtgtcacctcctggcgtccttttcagtgcctgccacttagtgcgtgtgtatttaactctagtccggttgccatcctcttgccagacccagataggaagcggctgaaaggtcgggcctcagcccggtgggaggtgggcagcgaagagtgtacagcgggcttggctggggcaggtcggtggccccgcgccctgctccaggggaaccagactgtgtaatctggcttccgaagaaaggatcatgagcagcaccagcagtaagagggctccgaccacggcaacccagaggctgaagcaggactaccttcgcattaagaaagacccggtgccttacatctgtgccgagcccctcccttcgaatattctcgagtggcactatgtcgtccgaggcccagagatgaccccttatgaaggtggctattatcatggaaaactaatttttcccagagaatttcctttcaaacctcccagtatctatatgatcactcccaacggcgcagagtattaatgatgcatactagcgaggacatgtgctcgttttcgtgatctagcgggattatccatcgcctgggacgacgatggtaaccccaggatcgtggttcgtgttctccgacgcaatcgcatgaacttggcgctccatgagacttcatggctgggagaagggccccgatgctgggcgagtcatgagagagcgtctggaatttcacgaaaacagaccaacctggcagtagccactagtttgagcgattcctcattctaggaatagtattaacgtcttttggtgaatttagtgtcctgtaagttcgtggagcgagattaaacaaaaacagaaagcacaagacgaactcagtagcagaccccagactctccccttgccagacgtggttccagacggggagacgcacctcgtccagaacgggattcagctgctcaacgggcatgcgccgggggccgtcccaaacctcgcagggctccagcaggccaaccggcaccacggactcctgggtggcgccctggcgaacttgtttgtgatagttgggtttgcagcctttgcttacacggtcaagtacgtgctgaggagcatcgcgcaggagtgaggcccaggcgccgagacccaaggcgccactgagggcaccgcgcaccagagcgtgacctcggcaggctggacacactgcccagcacaggcagacccaccaggctcctaggtttagcttttaaaaacctgaaaggggaagcaaaaaccaaaatgtgtgactgggctttggaggagactggagcctcagccctgtcctggccacgggccgctggggctggtgtgggtgggccttgtgtgctggatttgtagcttatcttccgtgttgtctttggacctgttttagtaaacccgtttttcattttattagatgtggtcacttagaaatgcaaacttgctgccgaccgcgggctgctcctgcgttcttggagctcctggcgcgtttctcggagctcccggctcctcagcgggtgggaacctcggggcccaggggtggagctggcgtccgcgggtgctggtctggcctggccgtgtggtgatgaggcttagcggggccagtgacggccgtggctcaggatccataagtcggggtttggtctcagcatttacaaatgtgtttacagtcagaatgaaacacattccttctagaaagtgcttgggggtttttgctgccctggaagccaggagcctgctcactccaaccacaagtcgcccttgactgcggcggccgcgagcggggcgggggctgccggtgccctccgcaggccgggcctcctgggcgcccctcggtgctgcaggctggggggccttgggtacctgcagagccttttctctgaattccttatgtccggtgggccagaagcccgtcctcctatgctggtggaaggcggaggaccggagtccctgcagaaggccccgtgcactcgggggcctccctcacatcccgtgccccctgcgctggccttcacagtaggtaatggctccg

SEQ ID NO: 294485 - DNA, 1293 bp, Homo sapiens
ctgggtctaagactgtttcaaagaagagctcatagactgactggtccagaagacagagggtacaacagtggcatcacagtgacagtgtcatgtgggcctgtcccacaggggcgtggagctcgtggttctgagcagccaactctccccttgccagacgtggttccagacggggagacgcacctcgtccagaacgggattcagctgctcaacgggcatgcgccgggggccgtcccaaacctcgcagggctccagcaggccaaccggcaccacggactcctgggtggcgccctggcgaacttgtttgtgatagttgggtttgcagcctttgcttacacggtcaagtacgtgctgaggagcatcgcgcaggagtgaggcccaggcgccgagacccaaggcgccactgagggcaccgcgcaccagagcgtgacctcggcaggctggacacactgcccagcacaggcagacccaccaggctcctaggtttagcttttaaaaacctgaaaggggaagcaaaaaccaaaatgtgtgactgggctttggaggagactggagcctcagccctgtcctggccacgggccgctggggctggtgtgggtgggccttgtgtgctggatttgtagcttatcttccgtgttgtctttggacctgttttagtaaacccgtttttcattttattagatgtggtcacttagaaatgcaaacttgctgccgaccgcgggctgctcctgcgttcttggagctcctggcgcgtttctcggagctcccggctcctcagcgggtgggaacctcggggcccaggggtggagctggcgtccgcgggtgctggtctggcctggccgtgtggtgatgaggcttagcggggccagtgacggccgtggctcaggatccataagtcggggtttggtctcagcatttacaaatgtgtttacagtcagaatgaaacacattccttctagaaagtgcttgggggtttttgctgccctggaagccaggagcctgctcactccaaccacaagtcgcccttgactgcggcggccgcgagcggggcgggggctgccggtgccctccgcaggccgggcctcctgggcgcccctcggtgctgcaggctggggggccttgggtacctgcagagccttttctctgaattccttatgtccggtgggccagaagcccgtcctcctatgctggtggaaggcggaggaccggagtccctgcagaaggccccgtgcactcgggggcctccctcacatcccgtgccccctgcgctggccttcacagtaggtaatggctccg

SEQ ID NO: 294486 - DNA, 1314 bp, Homo sapiens
agcggggttccgccccgcgagcggccatcttggaggctgaggcggcggcggcggcgctgcggcgggttcggtgggcccaatcccggggcggtgcggctgtttcgggcgcgggccccgcttttccgcaccctgctccggcctcgactacggcgagcctgagcgcggcggcggcccacgcgcagcgacagggagagatgagcagcaccagcagtaagagggctccgaccacggcaacccagaggctgaagcaggactaccttcgcattaagaaagacccggtgccttacatctgtgccgagcccctcccttcgaatattctcgagtggcactatgtcgtccgaggcccagagatgaccccttatgaaggtggctattatcatggaaaactaatttttcccagagaatttcctttcaaacctcccagtatctatatgatcactcccaacgggaggtttaagtgcaacaccaggctgtgtctttctatcacggatttccacccggacacgtggaacccggcctggtctgtctccaccatcctgactgggctcctgagcttcatggtggagaagggccccaccctgggcagtatagagacgtcggacttcacgaaaagacaactggcagtgcagagtttagcatttaatttgaaagataaagtcttttgtgaattatttcctgaagtcgtggaggagattaaacaaaaacagaaagcacaagacgaactcagtagcagaccccagactctccccttgccagacgtggttccagacggggagacgcacctcgtccagaacgggattcagctgctcaacgggcatgcgccgggggccgtcccaaacctcgctggtctggcctggccgtgtggtgatgaggcttagcggggccagtgacggccgtggctcaggatccataagtcggggtttggtctcagcatttacaaatgtgtttacagtcagaatgaaacacattccttctagaaagtgcttgggggtttttgctgccctggaagccaggagcctgctcactccaaccacaagtcgcccttgactgcggcggccgcgagcggggcgggggctgccggtgccctccgcaggccgggcctcctgggcgcccctcggtgctgcaggctggggggccttgggtacctgcagagccttttctctgaattccttatgtccggtgggccagaagcccgtcctcctatgctggtggaaggcggaggaccggagtccctgcagaaggccccgtgcactcgggggcctccctcacatcccgtgccccctgcgctggccttcacagtaggtaatggctccg

SEQ ID NO: 294487 - DNA, 1435 bp, Homo sapiens
aaattaggctaggtacgaggctgggtttgaatctggcagcggcggcggcggcgctgcggcgggttcggtgggcccaatcccggggcggtgcggctgtttcgggcgcgggccccgcttttccgcaccctgctccggcctcgactacggcgagcctgagcgcggcggcggcccacgcgcagcgacagggagaggtgagcgcgctcgcaggcctgcgccgggtcctcgggcccgctcgtcccccctgccggagccggccacagcggcggcccggggctgctggggaccctgcgcgacgcttctccgttcgcgcccgccgcccgcggggccccggcccgagcctgcctgcgcggaacccgaggtggctattatcatggaaaactaatttttcccagagaatttcctttcaaacctcccagtatctatatgatcactcccaacgggaggtttaagtgcaacaccaggctgtgtctttctatcacggatttccacccggacacgtggaacccggcctggtctgtctccaccatcctgactgggctcctgagcttcatggtggagaagggccccaccctgggcagtatagagacgtcggacttcacgaaaagacaactggcagtgcagagtttagcttttaaaaacctgaaaggggaagcaaaaaccaaaatgtgtgactgggctttggaggagactggagcctcagccctgtcctggccacgggccgctggggctggtgtgggtgggccttgtgtgctggatttgtagcttatcttccgtgttgtctttggacctgttttagtaaacccgtttttcattttattagatgtggtcacttagaaatgcaaacttgctgccgaccgcgggctgctcctgcgttcttggagctcctggcgcgtttctcggagctcccggctcctcagcgggtgggaacctcggggcccaggggtggagctggcgtccgcgggtgctggtctggcctggccgtgtggtgatgaggcttagcggggccagtgacggccgtggctcaggatccataagtcggggtttggtctcagcatttacaaatgtgtttacagtcagaatgaaacacattccttctagaaagtgcttgggggtttttgctgccctggaagccaggagcctgctcactccaaccacaagtcgcccttgactgcggcggccgcgagcggggcgggggctgccggtgccctccgcaggccgggcctcctgggcgcccctcggtgctgcaggctggggggccttgggtacctgcagagccttttctctgaattccttatgtccggtgggccagaagcccgtcctcctatgctggtggaaggcggaggaccggagtccctgcagaaggccccgtgcactcgggggcctccctcacatcccgtgccccctgcgctggccttcacagtaggtaatggctccg

SEQ ID NO: 294488 - DNA, 824 bp, Homo sapiens
agcggggttccgccccgcgagcggccatcttggaggctgaggcggcggcggcggcgctgcggcgggttcggtgggcccaatcccggggcggtgcggctgtttcgggcgcgggccccgcttttccgcaccctgctccggcctcgactacggcgagcctgagcgcggcggcggcccacgcgcagcgacagggagagatgagcagcaccagcagtaagagggctccgaccacggcaacccagaggctgaagcaggactaccttcgcattaagaaagacccggtgccttacatctgtgccgagcccctcccttcgaatattctcgagtggcactatgtcgtccgaggcccagagatgaccccttatgaaggtggctattatcatggaaaactaatttttcccagagaatttcctttcaaacctcccagtatctatatgatcactcccaacgggaggtttaagtgcaacaccaggctgtgtctttctatcacggatttccacccggacacgtggaacccggcctggtctgtctccaccatcctgactgggctcctgagcttcatggtggagaagggccccaccctgggcagtatagagacgtcggacttcacgaaaagacaactggcagtgcagagtttagcttttaaaaacctgaaaggggaagcaaaaaccaaaatgtgtgactgggctttggaggagactggagcctcagccctgtcctggccacgggccgctggggctggtgtgggtgggccttgtgtgctggatttgtagcttatcttccgtgttgtctttggacctgttttagtaaacccgtttttcatttta

SEQ ID NO: 294489 - DNA, 737 bp, Homo sapiens
agcggggttccgccccgcgagcggccatcttggaggctgaggcggcggcggcggcgctgcggcgggttcggtgggcccaatcccggggcggtgcggctgtttcgggcgcgggccccgcttttccgcaccctgctccggcctcgactacggcgagcctgagcgcggcggcggcccacgcgcagcgacagggagagatgagcagcaccagcagtaagagggctccgaccacggcaacccagaggctgaagcaggactaccttcgcattaagaaagacccggtgccttacatctgtgccgagcccctcccttcgaatattctcgagtggcactatgtcgtccgaggcccagagatgaccccttatgaaggtggctattatcatggaaaactaatttttcccagagaatttcctttcaaacctcccagtatctatatgatcactcccaacgggaggtttaagtgcaacaccaggctgtgtctttctatcacggatttccacccggacacgtggaacccggcctggtctgtctccaccatcctgactgggctcctgagcttcatggtggagaagggccccaccctgggcagtatagagacgtcggacttcacgctgcgttcctttgcctgcaacaggggtcaagatgagttttgcctgacttctttgatgtcctgaactttccgtagtcctttttcttgaatttgttcattataaatatagcttggcatttgtttgatcttt

SEQ ID NO: 294490 - DNA, 917 bp, Homo sapiens
agcggggttccgccccgcgagcggccatcttggaggctgaggcggcggcggcggcgctgcggcgggttcggtgggcccaatcccggggcggtgcggctgtttcgggcgcgggccccgcttttccgcaccctgctccggcctcgactacggcgagcctgagcgcggcggcggcccacgcgcagcgacagggagagatgagcagcaccagcagtaagagggctccgaccacggcaacccagaggctgaagcaggactaccttcgcattaagaaagacccggtgccttacatctgtgccgagcccctcccttcgaatattctcgagtggtaaggctccgcgccactgatcgccctgcgctgactgtcgctgccacgcaggcctctgccggcccctgctgggcgagcctggtgccccagtcatggcattggcaaggtgctcctgcaccctcccccggggcactatgtcgtccgaggcccagagatgaccccttatgaaggtggctattatcatggaaaactaatttttcccagagaatttcctttcaaacctcccagtatctatatgatcactcccaacgggaggtttaagtgcaacaccaggctgtgtctttctatcacggatttccacccggacacgtggaacccggcctggtctgtctccaccatcctgactgggctcctgagcttcatggtggagaagggccccaccctgggcagtatagagacgtcggacttcacgaacagacaactggcagtgcagcagttcagcattctacagtttggacccgattaaggtctttggtggcattctttccctgaagtccgtgcaggacgattagacgaagagcggactgtccagccgaacccgtagcagaccccagactctcccttgccagacgtgtcccgacgggcacagccc

SEQ ID NO: 294491 - DNA, 648 bp, Homo sapiens
ggctcgggctggggctcgggctccgcgagcggcggcaggcggcggcggcccgaggcagcggtccgcgctctccgggcgcatagggaagccctgcctaatgcatggctgtccgcacgcggccgcctcctcggagcgaacacgcgcccacgacaaacggggggagcgggattaaggaaaaccccgagaatagagaatgaatgcattttgacaattcgtgaaaataatcactagtttagtatccgtggttgtaccagttctctgaattctaaagatgaaaagatcattgagaacatctttgttactggcactgtctacatggtattttgagcagagttttgcagtgtttccaagtgctgcagtttcttcccgcagagagatggccactacagactctagctgccagaagaatttcccccagatctggaaagtttctacagttgcttacctcgaatattcacatacagagaggtacttcctccaaagtgcggttttccaacaactccataatgataacatgggaactggacctggctctgccaacagatgtcaatactttcacgatgaagagaaatagcgattccttcatgatctgcttcaaaatattggaatagattttagtgattctggaatggatgagaagatttgaca

SEQ ID NO: 294492 - DNA, 427 bp, Homo sapiens
ggctcgggctggggctcgggctccgcgagcggcggcaggcggcggcggcccgaggcagcggtccgcgctctccgggcgcatagggaagccctgcctaatgcatggctgtccgcacgcggccgcctcctcggagcgaacacgcgcccacgacaaacggggggagcgggattaaggaaaaccccgagagtgagtagtcacttcccgacggcctcgctgcctgactcaggacccagccgggggtcgccgcccccacaagtttcctcctccgtaccggtgtgaagcgagaaaacccccgccctggcgcgcacgctgggccggctcaggtgaagcggggcctgcgcccccgcgcactccccacgccgggagccgaggaaaccaaaaagaaagacgcggcctttcgtttccccacctcgctggagggcgccgg

SEQ ID NO: 294493 - DNA, 368 bp, Homo sapiens
ttaacttcaataagaacaacttttggagcggtcactggcaggttaacatgccaactttttcaactttgacattccacagatgtcaactctaacactaatgatagaaagttatgaaatctctgacttccaagggtgagtaattgcagatggaatcaaaattcccattgcttgcttgctttttcaagtaaggattgtatcaaaaaataccagaattctcaaacagtttatgagttagattctatttgtgcctttttttttttccccagatcattgagaacatctttgttactggcactgtctacatggtattttgagcagagttttgcagtgtttccaagtgctgcagtttcttcccgcagagagatggc

SEQ ID NO: 294494 - DNA, 310 bp, Homo sapiens
gaactagataacatggtaactttattcttcatatataaataaggcataatctgttatgtcctaaaattcaaatcactatttgagaaaccctcaaattggtgctttcattatataatgatacatttagacaaaaccccaaactaagccatttgaaacaagattctctccattgcagtttgtagcaatgttatttctgtgtatgtcatgagaaggctaaatatcagtgttaatttcttgtttgaatccgtgaaatcatgcctgtaaagcccaaacatttgtaacaaactccctaataaatttagagaaagtc

SEQ ID NO: 294495 - DNA, 4970 bp, Homo sapiens
gcggccgcggcgtgcgagcgcgcctccgggaggcagcgggagcgcgcacgctccggggccaccgcccctccggggccgggcccgccctccttccctccctccctcccccgctgtcctggcccgccctgcccggcccgccctgcgagtcagttcgctggttccctccctccctgggcgcgctcgggccgccgccgcgctccccgccctcgagcctcggtgccggagccgcccgccgccggaggaggaggtggagggagccggaggggcccgccgaggcggcggcggcggcggcaagatggcggacttcctgccgtcgcggtccgtgctgtccgtgtgcttccccggctgcctgctgacgagtggcgaggccgagcagcaacgcaagtccaaggagatcgacaaatgcctgtctcgggaaaagacctatgtgaagcggctggtgaagatcctgctgctgggcgcgggcgagagcggcaagtccaccttcctgaagcagatgcggatcatccacgggcaggacttcgaccagcgcgcgcgcgaggagttccgccccaccatctacagcaacgtgatcaaaggtatgagggtgctggttgatgctcgagagaagcttcatattccctggggagacaactcaaaccaacaacatggagataagatgatgtcgtttgatacccgggcccccatggcagcccaaggaatggtggaaacaagggttttcttacaatatcttcctgctataagagcattatgggcagacagcggcatacagaatgcctatgaccggcgtcgagaatttcaactgggtgaatctgtaaaatatttcctggataacttggataaacttggagaaccagattatattccatcacaacaagatattctgcttgccagaagacccaccaaaggcatccatgaatacgactttgaaataaaaaatgttcctttcaaaatggttgatgtaggtggtcagagatcagaaaggaaacgttggtttgaatgtttcgacagtgtgacatcaatacttttccttgtttcctcaagtgaatttgaccaggtgcttatggaagatcgactgaccaatcgccttacagagtctctgaacatttttgaaacaatcgtcaataaccgggttttcagcaatgtctccataattctgttcttaaacaagacagacttgcttgaggagaaggtgcaaattgtgagcatcaaagactatttcctagaatttgaaggggatccccactgcttaagagacgtccaaaaattcctggtggaatgtttccggaacaaacgccgggaccagcaacagaagcccttataccaccacttcaccactgctatcaacacggagaacatccgccttgttttccgcgacgtgaaggatactattctgcatgacaacctcaagcagcttatgctacagtgatgtacaaaagacttgctgttttaatatctttttgtgtttttgatgttttctgtttgttttgttttttaaaatagcagtttacaaccagaattagaacaatcttaattctacgtttaacttcttgaaaatcttagtactttttctgcggcctttggtttgtggctgaaagctgttgagtgactcatcgccaagatttgctgtaatgcaggctttgatctgtttcaccatggcttctattcaagtccagttaaaacctcccagctgacctcagactaggcatatttcaggctttaaattattctactttccaaactgaattctcctgcagtgccaagtatcaaaggtgtccttaaatacttgtagggatgaggttaggaatattcagttccaaaacaagatatcttctgtccgccttacatatagcagtgacacttgttgcctaactttatggtgacctcctattttgtaagggctgttagaagttctatctaagaaatggcattctgtaggtttatagaaggtttagccttcatattttaattgcttgtatacacaacagctgttttgcttttagatttctgtgtttctgaaggtaatgttcttcctgttttcaagtttacataaggatctttggtctgatgctgatgaagagttcacaggtggtatgggagagcaaaaggcaagctaatgctgtttaccgtgttttggtcaaacgtaacgagtgaaatagaatttgcctttctcatatttaattatcatgtagtttaatgtaccatatgtgaaacattctggccatagcagcaactaaaaactgcaagcaacttggtaacagaactttctaaataaacttaacctgttccagaatgtcatgtatttgacttttaagccctatctcagttggtcagtaaagaccaatccttactgtaggaaatcattgttgtatcatcacaaacatctatcttttgctgtcctgtccagtcccatcaactccacactgtgccatttgtggcatcgttttgtttatttggagtttgctaagggcagtatttttctgtcaagactattcaagaaggcattatttgagattcctgttcattcttggtgtgtctctaacagatacagtatgtatacatttgtataattgttgttgttgaaagtccagcttttttgaggtatattttaaatgttttaaggatgcttctaaggatcagtagtaatttttttagttcgcacctaaagatgattacattgacctcccccgactgcttaccaaattaaaatgtgtccacgaagtagctttgtgatcgcagatacattcatagtgaactcatcagaatggctggtttgcagtactgaaatactatcttctaggctgtatgtagtgctacaattagagaaacagaagtccaaggctggcgacagcttgaaaagtctgacagcttttctacttttcctgaaaattttaagactgtgatatctgtcattttactgtatagctgactgtgtactcaggtattttattggtccttgaaagattggtcgttatggatcacccagcctttccaagtcagtggctgttgttctgtcttgctgtctgatacgagagtggggcttttcagtgaactaaccagggattgttcttgacatacctgacttttctcacatttgaacttccactatcattgtatccatataacttctagcattttcatgccatggtaatccatgagctacacatacgtagcccggcaccgtgatgcaagttcatggtatcgtgcatgttcgtggtatcatggtatcattcatgcgtgtttgaatagttctacatctagtgcttcttgccaaaaagaatacattgtttaaattcacaaaattagcataattgcagtgctaatgaatatcggaatatgtgcacagtaacatttggactattcattggagagtttacccatacatttagcaaattgaatggccaaaacatttgactccagtgagggctcaagttagatccctatagaaagaggacacttcatcttacttaagtcatagttaagatctgtgatacgaaccatagatattgcctgacaaagcagaaatcaccaagtttcccccttttgaattaccaccaagaagtgttgaaacaccaaatagatatcatgttattttgggcatttgcagttttcttccctgctgcatgtaatgtctcagaatcaacattcttttaaaatctagactatattttgaggcaatgaattacttatattcaacttaggcttgttttgacattcagtagaactttaagttcaatctaaaggcttcagtccacatttttttatacgttgtattttaaaaacgtttgaaaggagtcttacacctgtatcatgaaaactgaatccttttgaaataccactatatgaagagagagatgaaatttagtgaacagaattgaaaaggtgctcataatttcactatgcaaacttaccccagtctctaaaaaagtaatttagatttaaagttctttgatgtatttgattttctaaatctttatggttatgatttggaataaaatgtgcctaatcctgtgttacattctgttcttaaatctgaatgccttctcatttaattctgaggaaatatcacacaagtgtcttcattgaccttgaagaaatgtatatacagttgccttataaaacaacataaatttagaccataacttttatagagaaagggttttgtcaaatgttttctgaaaatctgagtaattcaaagcatgcctctgcccctttaatatttttaataacctgcattgttgctgtctgccaaatattaaattgaaatcttcatttcaattttattatctggaaagggcactggattgctctgcaaccaaagaaagcaatatggaatgaaaaaactcattcacttttgtcttattttcttttaaggtgtattggcatgtaatttgcatagagaaggtcctctggttagtctctcaaattgaggctgtttagggaaatccttattcagttggtggcagtggttggtttaaagtagaaggaaataagatcgccttaataccagaaatgattagaagtgctgatttagattcaacaaataccatatgtccttatcattttttgtaagaagaaattggttaagtcctaactttcaatgtgtacccaaatacttgtatttatgcttttgataaaatgtattttcagcattaatacacatccgattatgccttatttatatatgaagaataaagttaccatgttatactgttatgtcctaaaattcaaatcactatttgagaaaccctcaaattggtgctttcattatataatgatacatttagacaaaaccccaaactaagccatttgaaacaagattctctccattgcagtttgtagcaatgttatttctgtgtatgtcatgagaaggctaaatatcagtgttaatttcttgtttgaatccgtgaaatcatgcctgtaaagcccaaacatttgtaacaaactccctaataaatttagagaaagtc

SEQ ID NO: 294496 - DNA, 4916 bp, Homo sapiens
gcggccgcggcgtgcgagcgcgcctccgggaggcagcgggagcgcgcacgctccggggccaccgcccctccggggccgggcccgccctccttccctccctccctcccccgctgtcctggcccgccctgcccggcccgccctgcgagtcagttcgctggttccctccctccctgggcgcgctcgggccgccgccgcgctccccgccctcgagcctcggtgccggagccgcccgccgccggaggaggaggtggagggagccggaggggcccgccgaggcggcggcggcggcggcaagatggcggacttcctgccgtcgcggtccgtgctgtccgtgtgcttccccggctgcctgctgacgagtggcgaggccgagcagcaacgcaagtccaaggagatcgacaaatgcctgtctcgggaaaagacctatgtgaagcggctggtgaagatcctgctgctgggcgcgggcgagagcggcaagtccaccttcctgaagcagatgcggatcatccacgggcaggacttcgaccagcgcgcgcgcgaggagttccgccccaccatctacagcaacgtgatcaaaggtatgagggtgctggttgatgctcgagagaagcttcatattccctggggagacaactcaaaccaacaacatggagataagatgatgtcgtttgatacccgggcccccatggcagcccaaggaatggtggaaacaagggttttcttacaatatcttcctgctataagagcattatgggcagacagcggcatacagaatgcctatgaccggcgtcgagaatttcaactgggtgaatctgtaaaatatttcctggataacttggataaacttggagaaccagattatattccatcacaacaagatattctgcttgccagaagacccaccaaaggcatccatgaatacgactttgaaataaaaaatgttcctttcaaaatggttgatgtaggtggtcagagatcagaaaggaaacgttggtttgaatgtttcgacagtgtgacatcaatacttttccttgtttcctcaagtgaatttgaccaggtgcttatggaagatcgactgaccaatcgccttacagagtctctgaacatttttgaaacaatcgtcaataaccgggttttcagcaatgtctccataattctgttcttaaacaagacagacttgcttgaggagaaggtgcaaattgtgagcatcaaagactatttcctagaatttgaaggggatccccactgcttaagagacgtccaaaaattcctggtggaatgtttccggaacaaacgccgggaccagcaacagaagcccttataccaccacttcaccactgctatcaacacggagaacatccgccttgttttccgcgacgtgaaggatactattctgcatgacaacctcaagcagcttatgctacagtgatgtacaaaagacttgctgttttaatatctttttgtgtttttgatgttttctgtttgttttgttttttaaaatagcagtttacaaccagaattagaacaatcttaattctacgtttaacttcttgaaaatcttagtactttttctgcggcctttggtttgtggctgaaagctgttgagtgactcatcgccaagatttgctgtaatgcaggctttgatctgtttcaccatggcttctattcaagtccagttaaaacctcccagctgacctcagactaggcatatttcaggctttaaattattctactttccaaactgaattctcctgcagtgccaagtatcaaaggtgtccttaaatacttgtagggatgaggttaggaatattcagttccaaaacaagatatcttctgtccgccttacatatagcagtgacacttgttgcctaactttatggtgacctcctattttgtaagggctgttagaagttctatctaagaaatggcattctgtaggtttatagaaggtttagccttcatattttaattgcttgtatacacaacagctgttttgcttttagatttctgtgtttctgaaggtaatgttcttcctgttttcaagtttacataaggatctttggtctgatgctgatgaagagttcacaggtggtatgggagagcaaaaggcaagctaatgctgtttaccgtgttttggtcaaacgtaacgagtgaaatagaatttgcctttctcatatttaattatcatgtagtttaatgtaccatatgtgaaacattctggccatagcagcaactaaaatgtcatgtatttgacttttaagccctatctcagttggtcagtaaagaccaatccttactgtaggaaatcattgttgtatcatcacaaacatctatcttttgctgtcctgtccagtcccatcaactccacactgtgccatttgtggcatcgttttgtttatttggagtttgctaagggcagtatttttctgtcaagactattcaagaaggcattatttgagattcctgttcattcttggtgtgtctctaacagatacagtatgtatacatttgtataattgttgttgttgaaagtccagcttttttgaggtatattttaaatgttttaaggatgcttctaaggatcagtagtaatttttttagttcgcacctaaagatgattacattgacctcccccgactgcttaccaaattaaaatgtgtccacgaagtagctttgtgatcgcagatacattcatagtgaactcatcagaatggctggtttgcagtactgaaatactatcttctaggctgtatgtagtgctacaattagagaaacagaagtccaaggctggcgacagcttgaaaagtctgacagcttttctacttttcctgaaaattttaagactgtgatatctgtcattttactgtatagctgactgtgtactcaggtattttattggtccttgaaagattggtcgttatggatcacccagcctttccaagtcagtggctgttgttctgtcttgctgtctgatacgagagtggggcttttcagtgaactaaccagggattgttcttgacatacctgacttttctcacatttgaacttccactatcattgtatccatataacttctagcattttcatgccatggtaatccatgagctacacatacgtagcccggcaccgtgatgcaagttcatggtatcgtgcatgttcgtggtatcatggtatcattcatgcgtgtttgaatagttctacatctagtgcttcttgccaaaaagaatacattgtttaaattcacaaaattagcataattgcagtgctaatgaatatcggaatatgtgcacagtaacatttggactattcattggagagtttacccatacatttagcaaattgaatggccaaaacatttgactccagtgagggctcaagttagatccctatagaaagaggacacttcatcttacttaagtcatagttaagatctgtgatacgaaccatagatattgcctgacaaagcagaaatcaccaagtttcccccttttgaattaccaccaagaagtgttgaaacaccaaatagatatcatgttattttgggcatttgcagttttcttccctgctgcatgtaatgtctcagaatcaacattcttttaaaatctagactatattttgaggcaatgaattacttatattcaacttaggcttgttttgacattcagtagaactttaagttcaatctaaaggcttcagtccacatttttttatacgttgtattttaaaaacgtttgaaaggagtcttacacctgtatcatgaaaactgaatccttttgaaataccactatatgaagagagagatgaaatttagtgaacagaattgaaaaggtgctcataatttcactatgcaaacttaccccagtctctaaaaaagtaatttagatttaaagttctttgatgtatttgattttctaaatctttatggttatgatttggaataaaatgtgcctaatcctgtgttacattctgttcttaaatctgaatgccttctcatttaattctgaggaaatatcacacaagtgtcttcattgaccttgaagaaatgtatatacagttgccttataaaacaacataaatttagaccataacttttatagagaaagggttttgtcaaatgttttctgaaaatctgagtaattcaaagcatgcctctgcccctttaatatttttaataacctgcattgttgctgtctgccaaatattaaattgaaatcttcatttcaattttattatctggaaagggcactggattgctctgcaaccaaagaaagcaatatggaatgaaaaaactcattcacttttgtcttattttcttttaaggtgtattggcatgtaatttgcatagagaaggtcctctggttagtctctcaaattgaggctgtttagggaaatccttattcagttggtggcagtggttggtttaaagtagaaggaaataagatcgccttaataccagaaatgattagaagtgctgatttagattcaacaaataccatatgtccttatcattttttgtaagaagaaattggttaagtcctaactttcaatgtgtacccaaatacttgtatttatgcttttgataaaatgtattttcagcattaatacacatccgattatgccttatttatatatgaagaataaagttaccatgttatactgttatgtcctaaaattcaaatcactatttgagaaaccctcaaattggtgctttcattatataatgatacatttagacaaaaccccaaactaagccatttgaaacaagattctctccattgcagtttgtagcaatgttatttctgtgtatgtcatgagaaggctaaatatcagtgttaatttcttgtttgaatccgtgaaatcatgcctgtaaagcccaaacatttgtaacaaactccctaataaatttagagaaagtc

SEQ ID NO: 294497 - DNA, 6407 bp, Homo sapiens
gcggccgcggcgtgcgagcgcgcctccgggaggcagcgggagcgcgcacgctccggggccaccgcccctccggggccgggcccgccctccttccctccctccctcccccgctgtcctggcccgccctgcccggcccgccctgcgagtcagttcgctggttccctccctccctgggcgcgctcgggccgccgccgcgctccccgccctcgagcctcggtgccggagccgcccgccgccggaggaggaggtggagggagccggaggggcccgccgaggcggcggcggcggcggcaagatggcggacttcctgccgtcgcggtccgtgctgtccgtgtgcttccccggctgcctgctgacgagtggcgaggccgagcagcaacgcaagtccaaggagatcgacaaatgcctgtctcgggaaaagacctatgtgaagcggctggtgaagatcctgctgctgggcgcgggcgagagcggcaagtccaccttcctgaagcagatgcggatcatccacgggcaggacttcgaccagcgcgcgcgcgaggagttccgccccaccatctacagcaacgtgatcaaaggtatgagggtgctggttgatgctcgagagaagcttcatattccctggggagacaactcaaaccaacaacatggagataagatgatgtcgtttgatacccgggcccccatggcagcccaaggaatggtggaaacaagggttttcttacaatatcttcctgctataagagcattatgggcagacagcggcatacagaatgcctatgaccggcgtcgagaatttcaactgggtgaatctgtaaaatatttcctggataacttggataaacttggagaaccagattatattccatcacaacaagatattctgcttgccagaagacccaccaaaggcatccatgaatacgactttgaaataaaaaatgttcctttcaaaatggttgatgtaggtggtcagagatcagaaaggaaacgttggtttgaatgtttcgacagtgtgacatcaatacttttccttgtttcctcaagtgaatttgaccaggtgcttatggaagatcgactgaccaatcgccttacagagtctctgaacatttttgaaacaatcgtcaataaccgggttttcagcaatgtctccataattctgttcttaaacaagacagacttgcttgaggagaaggtgcaaattgtgagcatcaaagactatttcctagaatttgaaggggatccccactgcttaagagacgtccaaaaattcctggtggaatgtttccggaacaaacgccgggaccagcaacagaagcccttataccaccacttcaccactgctatcaacacggagaacatccgccttgttttccgcgacgtgaaggatactattctgcatgacaacctcaagcagcttatgctacagtgatgtacaaaagacttgctgttttaatatctttttgtgtttttgatgttttctgtttgttttgttttttaaaatagcagtttacaaccagaattagaacaatcttaattctacgtttaacttcttgaaaatcttagtactttttctgcggcctttggtttgtggctgaaagctgttgagtgactcatcgccaagatttgctgtaatgcaggctttgatctgtttcaccatggcttctattcaagtccagttaaaacctcccagctgacctcagactaggcatatttcaggctttaaattattctactttccaaactgaattctcctgcagtgccaagtatcaaaggtgtccttaaatacttgtagggatgaggttaggaatattcagttccaaaacaagatatcttctgtccgccttacatatagcagtgacacttgttgcctaactttatggtgacctcctattttgtaagggctgttagaagttctatctaagaaatggcattctgtaggtttatagaaggtttagccttcatattttaattgcttgtatacacaacagctgttttgcttttagatttctgtgtttctgaaggtaatgttcttcctgttttcaagtttacataaggatctttggtctgatgctgatgaagagttcacaggtggtatgggagagcaaaaggcaagctaatgctgtttaccgtgttttggtcaaacgtaacgagtgaaatagaatttgcctttctcatatttaattatcatgtagtttaatgtaccatatgtgaaacattctggccatagcagcaactaaaaactgcaagcaacttggtaacagaactttctaaataaacttaacctgttccagaatgtcatgtatttgacttttaagccctatctcagttggtcagtaaagaccaatccttactgtaggaaatcattgttgtatcatcacaaacatctatcttttgctgtcctgtccagtcccatcaactccacactgtgccatttgtggcatcgttttgtttatttggagtttgctaagggcagtatttttctgtcaagactattcaagaaggcattatttgagattcctgttcattcttggtgtgtctctaacagatacagtatgtatacatttgtataattgttgttgttgaaagtccagcttttttgaggtatattttaaatgttttaaggatgcttctaaggatcagtagtaatttttttagttcgcacctaaagatgattacattgacctcccccgactgcttaccaaattaaaatgtgtccacgaagtagctttgtgatcgcagatacattcatagtgaactcatcagaatggctggtttgcagtactgaaatactatcttctaggctgtatgtagtgctacaattagagaaacagaagtccaaggctggcgacagcttgaaaagtctgacagcttttctacttttcctgaaaattttaagactgtgatatctgtcattttactgtatagctgactgtgtactcaggtattttattggtccttgaaagattggtcgttatggatcacccagcctttccaagtcagtggctgttgttctgtcttgctgtctgatacgagagtggggcttttcagtgaactaaccagggattgttcttgacatacctgacttttctcacatttgaacttccactatcattgtatccatataacttctagcattttcatgccatggtaatccatgagctacacatacgtagcccggcaccgtgatgcaagttcatggtatcgtgcatgttcgtggtatcatggtatcattcatgcgtgtttgaatagttctacatctagtgcttcttgccaaaaagaatacattgtttaaattcacaaaattagcataattgcagtgctaatgaatatcggaatatgtgcacagtaacatttggactattcattggagagtttacccatacatttagcaaattgaatggccaaaacatttgactccagtgagggctcaagttagatccctatagaaagaggacacttcatcttacttaagtcatagttaagatctgtgatacgaaccatagatattgcctgacaaagcagaaatcaccaagtttcccccttttgaattaccaccaagaagtgttgaaacaccaaatagatatcatgttattttgggcatttgcagttttcttccctgctgcatgtaatgtctcagaatcaacattcttttaaaatctagactatattttgaggcaatgaattacttatattcaacttaggcttgttttgacattcagtagaactttaagttcaatctaaaggcttcagtccacatttttttatacgttgtattttaaaaacgtttgaaaggagtcttacacctgtatcatgaaaactgaatccttttgaaataccactatatgaagagagagatgaaatttagtgaacagaattgaaaaggtgctcataatttcactatgcaaacttaccccagtctctaaaaaagtaatttagatttaaagttctttgatgtatttgattttctaaatctttatggttatgatttggaataaaatgtgcctaatcctgtgttacattctgttcttaaatctgaatgccttctcatttaattctgaggaaatatcacacaagtgtcttcattgaccttgaagaaatgtatatacagttgccttataaaacaacataaatttagaccataacttttatagagaaagggttttgtcaaatgttttctgaaaatctgagtaattcaaagcatgcctctgcccctttaatatttttaataacctgcattgttgctgtctgccaaatattaaattgaaatcttcatttcaattttattatctggaaagggcactggattgctctgcaaccaaagaaagcaatatggaatgaaaaaactcattcacttttgtcttattttcttttaaggtgtattggcatgtaatttgcatagagaaggtcctctggttagtctctcaaattgaggctgtttagggaaatccttattcagttggtggcagtggttggtttaaagtagaaggaaataagatcgccttaataccagaaatgattagaagtgctgatttagattcaacaaataccatatgtccttatcattttttgtaagaagaaattggttaagtcctaactttcaatgtgtacccaaatacttgtatttatgcttttgataaaatgtattttcagcattaatacacatccgattatgccttatttatatatgaagaataaagttaccatgttatactgttatgtcctaaaattcaaatcactatttgagaaaccctcaaattggtgctttcattatataatgatacatttagacaaaaccccaaactaagccatttgaaacaagattctctccattgcagtttgtagcaatgttatttctgtgtatgtcatgagaaggctaaatatcagtgttaatttcttgtttgaatccgtgaaatcatgcctgtaaagcccaaacatttgtaacaaactccctaataaatttagagaaagtcactctgttaccatttcatttattttagttttatttgagaaattaagaccagaagttttgctcatgtctttttcacttggaaatctgacttagtacctagttaatttgtctctctcccatcattttaaggcgttcgcttctgttaatcacagatgatctgtccttgtgttgtgctgcttgactaaaagcactgttttgttttgttttgttttgttttttaatgataggatacagggtggcttttcagtctagtaaacatgaggaggggagagattgtgggtgggtgtgggtgtgtccgcatgtcccaaatacagcacatgcccatttttttatggtacgaggttagggcttattaataaatgtatactagatcttgaagtgtaagtctaagtctgaacattttaaacaagttggactttatggctttttcaagttccatcaagtagatactagtcttaggctggtaggtgattaacaacatcatttggagtacagtgtttgtaccactagcattcttatgtctgtacttgaacgtgtagttagcatttaagttatgttcactcttgtagcattcaggtcttaccatctggtttcaaatgcgagagcttatatgaacattgttttgaaagcatgaatgatatggcaatattttatgtcttgataaggagagttttgtgacatatacaaatctgctgttgatgatgaaagtttacaggtggatcagagtatgctggaactcagtgtgcataaaatttcagtcagtgaatatcactgaacgtcatatactacttggtatgtgactttggtttgtgttaagaaagcttgtatataatattttttgccatagtaagtgagaaattgtccttaatcatgcctgtttgatggtactaggaaagaaaggggtagagattaattcttgcacagtataagcaacagtgcaacaaactatgccatttaccttttacctcttacttgaaggcagaatcgcaaaacgtttgaaatggcttttctaaactactctactctggtgagagctcatttaccacaagaagccttataaaaaagtatattttgtaataaccccgtagatactgtacctaacaaaacatgactcgtattagctctataaaatatttgtggcttaggattttttttttacatatatctttttataactttccaggaactaagcacattatctgataattgttgtaaatttttttgtcagtgctttagttcaggatgggcaataaattatttctaaaggaggtctaaaagtggaaagaatggtttgattttataaaatgagttgctagttcattacagctttttacttttgtacatattttgcaaaacatttgcctcttgctattaatatttgctttgtaaaaattactgacatttaataaacatttgtaaacaattcaaaaaaaagatg

SEQ ID NO: 294498 - DNA, 4916 bp, Homo sapiens
gcggccgcggcgtgcgagcgcgcctccgggaggcagcgggagcgcgcacgctccggggccaccgcccctccggggccgggcccgccctccttccctccctccctcccccgctgtcctggcccgccctgcccggcccgccctgcgagtcagttcgctggttccctccctccctgggcgcgctcgggccgccgccgcgctccccgccctcgagcctcggtgccggagccgcccgccgccggaggaggaggtggagggagccggaggggcccgccgaggcggcggcggcggcggcaagatggcggacttcctgccgtcgcggtccgtgctgtccgtgtgcttccccggctgcctgctgacgagtggcgaggccgagcagcaacgcaagtccaaggagatcgacaaatgcctgtctcgggaaaagacctatgtgaagcggctggtgaagatcctgctgctgggcgcgggcgagagcggcaagtccaccttcctgaagcagatgcggatcatccacgggcaggacttcgaccagcgcgcgcgcgaggagttccgccccaccatctacagcaacgtgatcaaaggtatgagggtgctggttgatgctcgagagaagcttcatattccctggggagacaactcaaaccaacaacatggagataagatgatgtcgtttgatacccgggcccccatggcagcccaaggaatggtggaaacaagggttttcttacaatatcttcctgctataagagcattatgggcagacagcggcatacagaatgcctatgaccggcgtcgagaatttcaactgggtgaatctgtaaaatatttcctggataacttggataaacttggagaaccagattatattccatcacaacaagatattctgcttgccagaagacccaccaaaggcatccatgaatacgactttgaaataaaaaatgttcctttcaaaatggttgatgtaggtggtcagagatcagaaaggaaacgttggtttgaatgtttcgacagtgtgacatcaatacttttccttgtttcctcaagtgaatttgaccaggtgcttatggaagatcgactgaccaatcgccttacagagtctctgaacatttttgaaacaatcgtcaataaccgggttttcagcaatgtctccataattctgttcttaaacaagacagacttgcttgaggagaaggtgcaaattgtgagcatcaaagactatttcctagaatttgaaggggatccccactgcttaagagacgtccaaaaattcctggtggaatgtttccggaacaaacgccgggaccagcaacagaagcccttataccaccacttcaccactgctatcaacacggagaacatccgccttgttttccgcgacgtgaaggatactattctgcatgacaacctcaagcagcttatgctacagtgatgtacaaaagacttgctgttttaatatctttttgtgtttttgatgttttctgtttgttttgttttttaaaatagcagtttacaaccagaattagaacaatcttaattctacgtttaacttcttgaaaatcttagtactttttctgcggcctttggtttgtggctgaaagctgttgagtgactcatcgccaagatttgctgtaatgcaggctttgatctgtttcaccatggcttctattcaagtccagttaaaacctcccagctgacctcagactaggcatatttcaggctttaaattattctactttccaaactgaattctcctgcagtgccaagtatcaaaggtgtccttaaatacttgtagggatgaggttaggaatattcagttccaaaacaagatatcttctgtccgccttacatatagcagtgacacttgttgcctaactttatggtgacctcctattttgtaagggctgttagaagttctatctaagaaatggcattctgtaggtttatagaaggtttagccttcatattttaattgcttgtatacacaacagctgttttgcttttagatttctgtgtttctgaaggtaatgttcttcctgttttcaagtttacataaggatctttggtctgatgctgatgaagagttcacaggtggtatgggagagcaaaaggcaagctaatgctgtttaccgtgttttggtcaaacgtaacgagtgaaatagaatttgcctttctcatatttaattatcatgtagtttaatgtaccatatgtgaaacattctggccatagcagcaactaaaaactgcaagcaacttggtaacagaactttctaaataaacttaacctgttccagaatgtcatgtatttgacttttaagccctatctcagttggtcagtaaagaccaatccttactgtaggaaatcattgttgtatcatcacaaacatctatcttttgctgtcctgtccagtcccatcaactccacactgtgccatttgtggcatcgttttgtttatttggagtttgctaagggcagtatttttctgtcaagactattcaagaaggcattatttgagattcctgttcattcttggtgtgtctctaacagatacagtatgtatacatttgtataattgttgttgttgaaagtccagcttttttgaggtatattttaaatgttttaaggatgcttctaaggatcagtagtaatttttttagttcgcacctaaagatgattacattgacctcccccgactgcttaccaaattaaaatgtgtccacgaagtagctttgtgatcgcagatacattcatagtgaactcatcagaatggctggtttgcagtactgaaatactatcttctaggctgtatgtagtgctacaattagagaaacagaagtccaaggctggcgacagcttgaaaagtctgacagcttttctacttttcctgaaaattttaagactgtgatatctgtcattttactgtatagctgactgtgtactcaggtattttattggtccttgaaagattggtcgttatggatcacccagcctttccaagtcagtggctgttgttctgtcttgctgtctgatacgagagtggggcttttcagtgaactaaccagggattgttcttgacatacctgacttttctcacatttgaacttccactatcattgtatccatataacttctagcattttcatgccatggtaatccatgagctacacatacgtagcccggcaccgtgatgcaagttcatggtatcgtgcatgttcgtggtatcatggtatcattcatgcgtgtttgaatagttctacatctagtgcttcttgccaaaaagaatacattgtttaaattcacaaaattagcataattgcagtgctaatgaatatcggaatatgtgcacagtaacatttggactattcattggagagtttacccatacatttagcaaattgaatggccaaaacatttgactccagtgagggctcaagttagatccctatagaaagaggacacttcatcttacttaagtcatagttaagatctgtgatacgaaccatagatattgcctgacaaagcagaaatcaccaagtttcccccttttgaattaccaccaagaagtgttgaaacaccaaatagatatcatgttattttgggcatttgcagttttcttccctgctgcatgtaatgtctcagaatcaacattcttttaaaatctagactatattttgaggcaatgaattacttatattcaacttaggcttgttttgacattcagtagaactttaagttcaatctaaaggcttcagtccacatttttttatacgttgtattttaaaaacgtttgaaaggagtcttacacctgtatcatgaaaactgaatccttttgaaataccactatatgaagagagagatgaaatttagtgaacagaattgaaaaggtgctcataatttcactatgcaaacttaccccagtctctaaaaaagtaatttagatttaaagttctttgatgtatttgattttctaaatctttatggttatgatttggaataaaatgtgcctaatcctgtgttacattctgttcttaaatctgaatgccttctcatttaattctgaggaaatatcacacaagtgtcttcattgaccttgaagaaatgtatatacagttgccttataaaacaacataaatttagaccataacttttatagagaaagggttttgtcaaatgttttctgaaaatctgagtaattcaaagcatgcctctgcccctttaatatttttaataacctgcattgttgctgtctgccaaatattaaattgaaatcttcatttcaattttattatctggaaagggcactggattgctctgcaaccaaagaaagcaatatggaatgaagcatagagaaggtcctctggttagtctctcaaattgaggctgtttagggaaatccttattcagttggtggcagtggttggtttaaagtagaaggaaataagatcgccttaataccagaaatgattagaagtgctgatttagattcaacaaataccatatgtccttatcattttttgtaagaagaaattggttaagtcctaactttcaatgtgtacccaaatacttgtatttatgcttttgataaaatgtattttcagcattaatacacatccgattatgccttatttatatatgaagaataaagttaccatgttatactgttatgtcctaaaattcaaatcactatttgagaaaccctcaaattggtgctttcattatataatgatacatttagacaaaaccccaaactaagccatttgaaacaagattctctccattgcagtttgtagcaatgttatttctgtgtatgtcatgagaaggctaaatatcagtgttaatttcttgtttgaatccgtgaaatcatgcctgtaaagcccaaacatttgtaacaaactccctaataaatttagagaaagtc

SEQ ID NO: 294499 - DNA, 4724 bp, Homo sapiens
gcggccgcggcgtgcgagcgcgcctccgggaggcagcgggagcgcgcacgctccggggccaccgcccctccggggccgggcccgccctccttccctccctccctcccccgctgtcctggcccgccctgcccggcccgccctgcgagtcagttcgctggttccctccctccctgggcgcgctcgggccgccgccgcgctccccgccctcgagcctcggtgccggagccgcccgccgccggaggaggaggtggagggagccggaggggcccgccgaggcggcggcggcggcggcaagatggcggacttcctgccgtcgcggtccgtgctgtccgtgtgcttccccggctgcctgctgacgagtggcgaggccgagcagcaacgcaagtccaaggagatcgacaaatgcctgtctcgggaaaagacctatgtgaagcggctggtgaagatcctgctgctgggcgcgggcgagagcggcaagtccaccttcctgaagcagatgcggatcatccacgggcaggacttcgaccagcgcgcgcgcgaggagttccgccccaccatctacagcaacgtgatcaaaggtatgagggtgctggttgatgctcgagagaagcttcatattccctggggagacaactcaaaccaacaacatggagataagatgatgtcgtttgatacccgggcccccatggcagcccaaggaatggtggaaacaagggttttcttacaatatcttcctgctataagagcattatgggcagacagcggcatacagaatgcctatgaccggcgtcgagaatttcaactgggtgaatctgtaaaatatttcctggataacttggataaacttggagaaccagattatattccatcacaacaagatattctgcttgccagaagacccaccaaaggcatccatgaatacgactttgaaataaaaaatgttcctttcaaaatggttgatgtaggtggtcagagatcagaaaggaaacgttggtttgaatgtttcgacagtgtgacatcaatacttttccttgtttcctcaagtgaatttgaccaggtgcttatggaagatcgactgaccaatcgccttacagagtctctgaacatttttgaaacaatcgtcaataaccgggttttcagcaatgtctccataattctgttcttaaacaagacagacttgcttgaggagaaggtgcaaattgtgagcatcaaagactatttcctagaatttgaaggggatccccactgcttaagagacgtccaaaaattcctggtggaatgtttccggaacaaacgccgggaccagcaacagaagcccttataccaccacttcaccactgctatcaacacggagaacatccgccttgttttccgcgacgtgaaggatactattctgcatgacaacctcaagcagcttatgctacagtgatgtacaaaagacttgctgttttaatatctttttgtgtttttgatgttttctgtttgttttgttttttaaaatagcagtttacaaccagaattagaacaatcttaattctacgtttaacttcttgaaaatcttagtactttttctgcggcctttggtttgtggctgaaagctgttgagtgactcatcgccaagatttgctgtaatgcaggctttgatctgtttcaccatggcttctattcaagtccagttaaaacctcccagctgacctcagactaggcatatttcaggctttaaattattctactttccaaactgaattctcctgcagtgccaagtatcaaaggtgtccttaaatacttgtagggatgaggttaggaatattcagttccaaaacaagatatcttctgtccgccttacatatagcagtgacacttgttgcctaactttatggtgacctcctattttgtaagggctgttagaagttctatctaagaaatggcattctgtaggtttatagaaggtttagccttcatattttaattgcttgtatacacaacagctgttttgcttttagatttctgtgtttctgaaggtaatgttcttcctgttttcaagtttacataaggatctttggtctgatgctgatgaagagttcacaggtggtatgggagagcaaaaggcaagctaatgctgtttaccgtgttttggtcaaacgtaacgagtgaaatagaatttgcctttctcatatttaattatcatgtagtttaatgtaccatatgtgaaacattctggccatagcagcaactaaaaactgcaagcaacttggtaacagaactttctaaataaacttaacctgttccagaatgtcatgtatttgacttttaagccctatctcagttggtcagtaaagaccaatccttactgtaggaaatcattgttgtatcatcacaaacatctatcttttgctgtcctgtccagtcccatcaactccacactgtgccatttgtggcatcgttttgtttatttggagtttgctaagggcagtatttttctgtcaagactattcaagaaggcattatttgagattcctgttcattcttggtgtgtctctaacagatacagtatgtatacatttgtataattgttgttgttgaaagtccagcttttttgaggtatattttaaatgttttaaggatgcttctaaggatcagtagtaatttttttagttcgcacctaaagatgattacattgacctcccccgactgcttaccaaattaaaatgtgtccacgaagtagctttgtgatcgcagatacattcatagtgaactcatcagaatggctggtttgcagtactgaaatactatcttctaggctgtatgtagtgctacaattagagaaacagaagtccaaggctggcgacagcttgaaaagtctgacagcttttctacttttcctgaaaattttaagactgtgatatctgtcattttactgtatagctgactgtgtactcaggtattttattggtccttgaaagattggtcgttatggatcacccagcctttccaagtcagtggctgttgttctgtcttgctgtctgatacgagagtggggcttttcagtgaactaaccagggattgttcttgacatacctgacttttctcacatttgaacttccactatcattgtatccatataacttctagcattttcatgccatggtaatccatgagctacacatacgtagcccggcaccgtgatgcaagttcatggtatcgtgcatgttcgtggtatcatggtatcattcatgcgtgtttgaatagttctacatctagtgcttcttgccaaaaagaatacattgtttaaattcacaaaattagcataattgcagtgctaatgaatatcggaatatgtgcacagtaacatttggactattcattggagagtttacccatacatttagcaaattgaatggccaaaacatttgactccagtgagggctcaagttagatccctatagaaagaggacacttcatcttacttaagtcatagttaagatctgtgatacgaaccatagatattgcctgacaaagcagaaatcaccaagtttcccccttttgaattaccaccaagaagtgttgaaacaccaaatagatatcatgttattttgggcatttgcagttttcttccctgctgcatgtaatgtctcagaatcaacattcttttaaaatctagactatattttgaggcaatgaattacttatattcaacttaggcttgttttgacattcagtagaactttaagttcaatctaaaggcttcagtccacatttttttatacgttgtattttaaaaacgtttgaaaggagtcttacacctgtatcatgaaaactgaatccttttgaaataccactatatgaagagagagatgaaatttagtgaacagaattgaaaaggtgctcataatttcactatgcaaacttaccccagtctctaaaaaagtaatttagatttaaagttctttgatgtatttgattttctaaatctttatggttatgatttggaataaaatgtgcctaatcctgtgttacattctgttcttaaatctgaatgccttctcatttaattctgaggaaatatcacacaagtgtcttcattgaccttgaagaaatgtatatacagttgccttataaaacaacataaatttagaccataacttttatagagaaagggttttgtcaaatgttttctgaaaatctgagtaattcaaagcatgcctctgcccctttaatatttttaataacctgcattgttgctgtctgccaaatattaaattgaaatcttcatttcaattttattatctggaaagggcactggattgctctgcaaccaaagaaagcaatatggaatgaaaaaactcattcacttttgtcttattttcttttaaggtgtattggcatgtaatttgcatagagaaggtcctctggttagtctctcaaattgaggctgtttagggaaatccttattcagttggtggcagtggttggtttaaagtagaaggaaataagatcgccttaataccagaaatgattagaagtgctgatttagattcaacaaataccatatgtccttatcattttttgtaagaagaaattggttaagtcgtacaggttactatgcaatcccgaatatctgtgtatcgacgctcaggatcaatgtagcatgcagcgactgaatcgcactactacgaggtatgcctcatttatgtgatgtagacagatagagcatgttatagatg

SEQ ID NO: 294500 - DNA, 2442 bp, Homo sapiens
ggctcatacggattcatgtatcacacttgctcagctcaggtctgcaacagtccgagctcttcttatgcaggctgtatattttaaatgttttaaggatgcttctaaggatcagtagtaatttttttagttcgcacctaaagatgattacattgacctcccccgactgcttaccaaattaaaatgtgtccacgaagtagctttgtgatcgcagatacattcatagtgaactcatcagaatggctggtttgcagtactgaaatactatcttctaggctgtatgtagtgctacaattagagaaacagaagtccaaggctggcgacagcttgaaaagtctgacagcttttctacttttcctgaaaattttaagactgtgatatctgtcattttactgtatagctgactgtgtactcaggtattttattggtccttgaaagattggtcgttatggatcacccagcctttccaagtcagtggctgttgttctgtcttgctgtctgatacgagagtggggcttttcagtgaactaaccagggattgttcttgacatacctgacttttctcacatttgaacttccactatcattgtatccatataacttctagcattttcatgccatggtaatccatgagctacacatacgtagcccggcaccgtgatgcaagttcatggtatcgtgcatgttcgtggtatcatggtatcattcatgcgtgtttgaatagttctacatctagtgcttcttgccaaaaagaatacattgtttaaattcacaaaattagcataattgcagtgctaatgaatatcggaatatgtgcacagtaacatttggactattcattggagagtttacccatacatttagcaaattgaatggccaaaacatttgactccagtgagggctcaagttagatccctatagaaagaggacacttcatcttacttaagtcatagttaagatctgtgatacgaaccatagatattgcctgacaaagcagaaatcaccaagtttcccccttttgaattaccaccaagaagtgttgaaacaccaaatagatatcatgttattttgggcatttgcagttttcttccctgctgcatgtaatgtctcagaatcaacattcttttaaaatctagactatattttgaggcaatgaattacttatattcaacttaggcttgttttgacattcagtagaactttaagttcaatctaaaggcttcagtccacatttttttatacgttgtattttaaaaacgtttgaaaggagtcttacacctgtatcatgaaaactgaatccttttgaaataccactatatgaagagagagatgaaatttagtgaacagaattgaaaaggtgctcataatttcactatgcaaacttaccccagtctctaaaaaagtaatttagatttaaagttctttgatgtatttgattttctaaatctttatggttatgatttggaataaaatgtgcctaatcctgtgttacattctgttcttaaatctgaatgccttctcatttaattctgaggaaatatcacacaagtgtcttcattgaccttgaagaaatgtatatacagttgccttataaaacaacataaatttagaccataacttttatagagaaagggttttgtcaaatgttttctgaaaatctgagtaattcaaagcatgcctctgcccctttaatatttttaataacctgcattgttgctgtctgccaaatattaaattgaaatcttcatttcaattttattatctggaaagggcactggattgctctgcaaccaaagaaagcaatatggaatgaaaaaactcattcacttttgtcttattttcttttaaggtgtattggcatgtaatttgcatagagaaggtcctctggttagtctctcaaattgaggctgtttagggaaatccttattcagttggtggcagtggttggtttaaagtagaaggaaataagatcgccttaataccagaaatgattagaagtgctgatttagattcaacaaataccatatgtccttatcattttttgtaagaagaaattggttaagtcctaactttcaatgtgtacccaaatacttgtatttatgcttttgataaaatgtattttcagcattaatacacatccgattatgccttatttatatatgaagaataaagttaccatgttatactgttatgtcctaaaattcaaatcactatttgagaaaccctcaaattggtgctttcattatataatgatacatttagacaaaaccccaaactaagccatttgaaacaagattctctccattgcagtttgtagcaatgttatttctgtgtatgtcatgagaaggctaaatatcagtgttaatttcttgtttgaatccgtgaaatcatgcctgtaaagcccaaacatttgtaacaaactccctaataaatttagagaaagtc

SEQ ID NO: 294501 - DNA, 4627 bp, Homo sapiens
gcggccgcggcgtgcgagcgcgcctccgggaggcagcgggagcgcgcacgctccggggccaccgcccctccggggccgggcccgccctccttccctccctccctcccccgctgtcctggcccgccctgcccggcccgccctgcgagtcagttcgctggttccctccctccctgggcgcgctcgggccgccgccgcgctccccgccctcgagcctcggtgccggagccgcccgccgccggaggaggaggtggagggagccggaggggcccgccgaggcggcggcggcggcggcaagatggcggacttcctgccgtcgcggtccgtgctgtccgtgtgcttccccggctgcctgctgacgagtggcgaggccgagcagcaacgcaagtccaaggagatcgacaaatgcctgtctcgggaaaagacctatgtgaagcggctggtgaagatcctgctgctgggcgcgggcgagagcggcaagtccaccttcctgaagcagatgcggatcatccacgggcaggacttcgaccagcgcgcgcgcgaggagttccgccccaccatctacagcaacgtgatcaaaggtatgagggtgctggttgatgctcgagagaagcttcatattccctggggagacaactcaaaccaacaacatggagataagatgatgtcgtttgatacccgggcccccatggcagcccaaggaatggtggaaacaagggttttcttacaatatcttcctgctataagagcattatgggcagacagcggcatacagaatgcctatgaccggcgtcgagaatttcaactgggtgaatctgtaaaatatttcctggataacttggataaacttggagaaccagattatattccatcacaacaagatattctgcttgccagaagacccaccaaaggcatccatgaatacgactttgaaataaaaaatgttcctttcaaaatggttgatgtaggtggtcagagatcagaaaggaaacgttggtttgaatgtttcgacagtgtgacatcaatacttttccttgtttcctcaagtgaatttgaccaggtgcttatggaagatcgactgaccaatcgccttacagagtctctgaacatttttgaaacaatcgtcaataaccgggttttcagcaatgtctccataattctgttcttaaacaagacagacttgcttgaggagaaggtgcaaattgtgagcatcaaagactatttcctagaatttgaaggggatccccactgcttaagagacgtccaaaaattcctggtggaatgtttccggaacaaacgccgggaccagcaacagaagcccttataccaccacttcaccactgctatcaacacggagaacatccgccttgttttccgcgacgtgaaggatactattctgcatgacaacctcaagcagcttatgctacagtgatgtacaaaagacttgctgttttaatatctttttgtgtttttgatgttttctgtttgttttgttttttaaaatagcagtttacaaccagaattagaacaatcttaattctacgtttaacttcttgaaaatcttagtactttttctgcggcctttggtttgtggctgaaagctgttgagtgactcatcgccaagatttgctgtaatgcaggctttgatctgtttcaccatggcttctattcaagtccagttaaaacctcccagctgacctcagactaggcatatttcaggctttaaattattctactttccaaactgaattctcctgcagtgccaagtatcaaaggtgtccttaaatacttgtagggatgaggttaggaatattcagttccaaaacaagatatcttctgtccgccttacatatagcagtgacacttgttgcctaactttatggtgacctcctattttgtaagggctgttagaagttctatctaagaaatggcattctgtaggtttatagaaggtttagccttcatattttaattgcttgtatacacaacagctgttttgcttttagatttctgtgtttctgaaggtaatgttcttcctgttttcaagtttacataaggatctttggtctgatgctgatgaagagttcacaggtggtatgggagagcaaaaggcaagctaatgctgtttaccgtgttttggtcaaacgtaacgagtgaaatagaatttgcctttctcatatttaattatcatgtagtttaatgtaccatatgtgaaacattctggccatagcagcaactaaaaactgcaagcaacttggtaacagaactttctaaataaacttaacctgttccagaatgtcatgtatttgacttttaagccctatctcagttggtcagtaaagaccaatccttactgtaggaaatcattgttgtatcatcacaaacatctatcttttgctgtcctgtccagtcccatcaactccacactgtgccatttgtggcatcgttttgtttatttggagtttgctaagggcagtatttttctgtcaagactattcaagaaggcattatttgagattcctgttcattcttggtgtgtctctaacagatacagtatgtatacatttgtataattgttgttgttgaaagtccagcttttttgaggtatattttaaatgttttaaggatgcttctaaggatcagtagtaatttttttagttcgcacctaaagatgattacattgacctcccccgactgcttaccaaattaaaatgtgtccacgaagtagctttgtgatcgcagatacattcatagtgaactcatcagaatggctggtttgcagtactgaaatactatcttctaggctgtatgtagtgctacaattagagaaacagaagtccaaggctggcgacagcttgaaaagtctgacagcttttctacttttcctgaaaattttaagactgtgatatctgtcattttactgtatagctgactgtgtactcaggtattttattggtccttgaaagattggtcgttatggatcacccagcctttccaagtcagtggctgttgttctgtcttgctgtctgatacgagagtggggcttttcagtgaactaaccagggattgttcttgacatacctgacttttctcacatttgaacttccactatcattgtatccatataacttctagcattttcatgccatggtaatccatgagctacacatacgtagcccggcaccgtgatgcaagttcatggtatcgtgcatgttcgtggtatcatggtatcattcatgcgtgtttgaatagttctacatctagtgcttcttgccaaaaagaatacattgtttaaattcacaaaattagcataattgcagtgctaatgaatatcggaatatgtgcacagtaacatttggactattcattggagagtttacccatacatttagcaaattgaatggccaaaacatttgactccagtgagggctcaagttagatccctatagaaagaggacacttcatcttacttaagtcatagttaagatctgtgatacgaaccatagatattgcctgacaaagcagaaatcaccaagtttcccccttttgaattaccaccaagaagtgttgaaacaccaaatagatatcatgttattttgggcatttgcagttttcttccctgctgcatgtaatgtctcagaatcaacattcttttaaaatctagactatattttgaggcaatgaattacttatattcaacttaggcttgttttgacattcagtagaactttaagttcaatctaaaggcttcagtccacatttttttatacgttgtattttaaaaacgtttgaaaggagtcttacacctgtatcatgaaaactgaatccttttgaaataccactatatgaagagagagatgaaatttagtgaacagaattgaaaaggtgctcataatttcactatgcaaacttaccccagtctctaaaaaagtaatttagatttaaagttctttgatgtatttgattttctaaatctttatggttatgatttggaataaaatgtgcctaatcctgtgttacattctgttcttaaatctgaatgccttctcatttaattctgaggaaatatcacacaagtgtcttcattgaccttgaagaaatgtatatacagttgccttataaaacaacataaatttagaccataacttttatagagaaagggttttgtcaaatgttttctgaaaatctgagtaattcaaagcatgcctctgcccctttaatatttttaataacctgcattgttgctgtctgccaaatattaaattgaaatcttcatttcaattttattatctggaaagggcactggattgctctgcaaccaaagaaagcaatatggaatgaaaaaactcattcacttttgtcttattttcttttaaggtgtattggcatgtaatttgcatagagaaggtcctctggttagtctctcaaattgaggctgtttagggaaatccttattcagttggtggcagtggttggtttaaagtagaaggaaataagatcgccttaacaagtgaatgagttttttcattccatattgctatctttggttgcagagcaatccagtgccctttccagataataaaattgaaatgaagatttcaatttaatatttggcagacagcaacaatgc

SEQ ID NO: 294502 - DNA, 2022 bp, Homo sapiens
tgcgccgttaaacatcgtccggaattggaaaacccctgcgggcacgactgcgtaagcatggccgtagcgctgtcctgtgatcgagagtggggcttttcagtgaactaaccagggattgttcttgacatacctgacttttctcacatttgaacttccactatcattgtatccatataacttctagcattttcatgccatggtaatccatgagctacacatacgtagcccggcaccgtgatgcaagttcatggtatcgtgcatgttcgtggtatcatggtatcattcatgcgtgtttgaatagttctacatctagtgcttcttgccaaaaagaatacattgtttaaattcacaaaattagcataattgcagtgctaatgaatatcggaatatgtgcacagtaacatttggactattcattggagagtttacccatacatttagcaaattgaatggccaaaacatttgactccagtgagggctcaagttagatccctatagaaagaggacacttcatcttacttaagtcatagttaagatctgtgatacgaaccatagatattgcctgacaaagcagaaatcaccaagtttcccccttttgaattaccaccaagaagtgttgaaacaccaaatagatatcatgttattttgggcatttgcagttttcttccctgctgcatgtaatgtctcagaatcaacattcttttaaaatctagactatattttgaggcaatgaattacttatattcaacttaggcttgttttgacattcagtagaactttaagttcaatctaaaggcttcagtccacatttttttatacgttgtattttaaaaacgtttgaaaggagtcttacacctgtatcatgaaaactgaatccttttgaaataccactatatgaagagagagatgaaatttagtgaacagaattgaaaaggtgctcataatttcactatgcaaacttaccccagtctctaaaaaagtaatttagatttaaagttctttgatgtatttgattttctaaatctttatggttatgatttggaataaaatgtgcctaatcctgtgttacattctgttcttaaatctgaatgccttctcatttaattctgaggaaatatcacacaagtgtcttcattgaccttgaagaaatgtatatacagttgccttataaaacaacataaatttagaccataacttttatagagaaagggttttgtcaaatgttttctgaaaatctgagtaattcaaagcatgcctctgcccctttaatatttttaataacctgcattgttgctgtctgccaaatattaaattgaaatcttcatttcaattttattatctggaaagggcactggattgctctgcaaccaaagaaagcaatatggaatgaaaaaactcattcacttttgtcttattttcttttaaggtgtattggcatgtaatttgcatagagaaggtcctctggttagtctctcaaattgaggctgtttagggaaatccttattcagttggtggcagtggttggtttaaagtagaaggaaataagatcgccttaataccagaaatgattagaagtgctgatttagattcaacaaataccatatgtccttatcattttttgtaagaagaaattggttaagtcctaactttcaatgtgtacccaaatacttgtatttatgcttttgataaaatgtattttcagcattaatacacatccgattatgccttatttatatatgaagaataaagttaccatgttatactgttatgtcctaaaattcaaatcactatttgagaaaccctcaaattggtgctttcattatataatgatacatttagacaaaaccccaaactaagccatttgaaacaagattctctccattgcagtttgtagcaatgttatttctgtgtatgtcatgagaaggctaaatatcagtgttaatttcttgtttgaatccgtgaaatcatgcctgtaaagcccaaacatttgtaacaaactccctaataaatttagagaaagtc

SEQ ID NO: 294503 - DNA, 4663 bp, Homo sapiens
gcggccgcggcgtgcgagcgcgcctccgggaggcagcgggagcgcgcacgctccggggccaccgcccctccggggccgggcccgccctccttccctccctccctcccccgctgtcctggcccgccctgcccggcccgccctgcgagtcagttcgctggttccctccctccctgggcgcgctcgggccgccgccgcgctccccgccctcgagcctcggtgccggagccgcccgccgccggaggaggaggtggagggagccggaggggcccgccgaggcggcggcggcggcggcaagatggcggacttcctgccgtcgcggtccgtgctgtccgtgtgcttccccggctgcctgctgacgagtggcgaggccgagcagcaacgcaagtccaaggagatcgacaaatgcctgtctcgggaaaagacctatgtgaagcggctggtgaagatcctgctgctgggcgcgggcgagagcggcaagtccaccttcctgaagcagatgcggatcatccacgggcaggacttcgaccagcgcgcgcgcgaggagttccgccccaccatctacagcaacgtgatcaaaggtatgagggtgctggttgatgctcgagagaagcttcatattccctggggagacaactcaaaccaacaacatggagataagatgatgtcgtttgatacccgggcccccatggcagcccaaggaatggtggaaacaagggttttcttacaatatcttcctgctataagagcattatgggcagacagcggcatacagaatgcctatgaccggcgtcgagaatttcaactgggtgaatctgtaaaatatttcctggataacttggataaacttggagaaccagattatattccatcacaacaagatattctgcttgccagaagacccaccaaaggcatccatgaatacgactttgaaataaaaaatgttcctttcaaaatggttgatgtaggtggtcagagatcagaaaggaaacgttggtttgaatgtttcgacagtgtgacatcaatacttttccttgtttcctcaagtgaatttgaccaggtgcttatggaagatcgactgaccaatcgccttacagagtctctgaacatttttgaaacaatcgtcaataaccgggttttcagcaatgtctccataattctgttcttaaacaagacagacttgcttgaggagaaggtgcaaattgtgagcatcaaagactatttcctagaatttgaaggggatccccactgcttaagagacgtccaaaaattcctggtggaatgtttccggaacaaacgccgggaccagcaacagaagcccttataccaccacttcaccactgctatcaacacggagaacatccgccttgttttccgcgacgtgaaggatactattctgcatgacaacctcaagcagcttatgctacagtgatgtacaaaagacttgctgttttaatatctttttgtgtttttgatgttttctgtttgttttgttttttaaaatagcagtttacaaccagaattagaacaatcttaattctacgtttaacttcttgaaaatcttagtactttttctgcggcctttggtttgtggctgaaagctgttgagtgactcatcgccaagatttgctgtaatgcaggctttgatctgtttcaccatggcttctattcaagtccagttaaaacctcccagctgacctcagactaggcatatttcaggctttaaattattctactttccaaactgaattctcctgcagtgccaagtatcaaaggtgtccttaaatacttgtagggatgaggttaggaatattcagttccaaaacaagatatcttctgtccgccttacatatagcagtgacacttgttgcctaactttatggtgacctcctattttgtaagggctgttagaagttctatctaagaaatggcattctgtaggtttatagaaggtttagccttcatattttaattgcttgtatacacaacagctgttttgcttttagatttctgtgtttctgaaggtaatgttcttcctgttttcaagtttacataaggatctttggtctgatgctgatgaagagttcacaggtggtatgggagagcaaaaggcaagctaatgctgtttaccgtgttttggtcaaacgtaacgagtgaaatagaatttgcctttctcatatttaattatcatgtagtttaatgtaccatatgtgaaacattctggccatagcagcaactaaaaactgcaagcaacttggtaacagaactttctaaataaacttaacctgttccagaatgtcatgtatttgacttttaagccctatctcagttggtcagtaaagaccaatccttactgtaggaaatcattgttgtatcatcacaaacatctatcttttgctgtcctgtccagtcccatcaactccacactgtgccatttgtggcatcgttttgtttatttggagtttgctaagggcagtatttttctgtcaagactattcaagaaggcattatttgagattcctgttcattcttggtgtgtctctaacagatacagtatgtatacatttgtataattgttgttgttgaaagtccagcttttttgaggtatattttaaatgttttaaggatgcttctaaggatcagtagtaatttttttagttcgcacctaaagatgattacattgacctcccccgactgcttaccaaattaaaatgtgtccacgaagtagctttgtgatcgcagatacattcatagtgaactcatcagaatggctggtttgcagtactgaaatactatcttctaggctgtatgtagtgctacaattagagaaacagaagtccaaggctggcgacagcttgaaaagtctgacagcttttctacttttcctgaaaattttaagactgtgatatctgtcattttactgtatagctgactgtgtactcaggtattttattggtccttgaaagattggtcgttatggatcacccagcctttccaagtcagtggctgttgttctgtcttgctgtctgatacgagagtggggcttttcagtgaactaaccagggattgttcttgacatacctgacttttctcacatttgaacttccactatcattgtatccatataacttctagcattttcatgccatggtaatccatgagctacacatacgtagcccggcaccgtgatgcaagttcatggtatcgtgcatgttcgtggtatcatggtatcattcatgcgtgtttgaatagttctacatctagtgcttcttgccaaaaagaatacattgtttaaattcacaaaattagcataattgcagtgctaatgaatatcggaatatgtgcacagtaacatttggactattcattggagagtttacccatacatttagcaaattgaatggccaaaacatttgactccagtgagggctcaagttagatccctatagaaagaggacacttcatcttacttaagtcatagttaagatctgtgatacgaaccatagatattgcctgacaaagcagaaatcaccaagtttcccccttttgaattaccaccaagaagtgttgaaacaccaaatagatatcatgttattttgggcatttgcagttttcttccctgctgcatgtaatgtctcagaatcaacattcttttaaaatctagactatattttgaggcaatgaattacttatattcaacttaggcttgttttgacattcagtagaactttaagttcaatctaaaggcttcagtccacatttttttatacgttgtattttaaaaacgtttgaaaggagtcttacacctgtatcatgaaaactgaatccttttgaaataccactatatgaagagagagatgaaatttagtgaacagaattgaaaaggtgctcataatttcactatgcaaacttaccccagtctctaaaaaagtaatttagatttaaagttctttgatgtatttgattttctaaatctttatggttatgatttggaataaaatgtgcctaatcctgtgttacattctgttcttaaatctgaatgccttctcatttaattctgaggaaatatcacacaagtgtcttcattgaccttgaagaaatgtatatacagttgccttataaaacaacataaatttagaccataacttttatagagaaagggttttgtcaaatgttttctgaaaatctgagtaattcaaagcatgcctctgccccctctagagccaaaaaaaaaaaaaaaaaggaaaaaaaaaaaaaaaaaaaaggggggggggtaaaaagatttccttggaggggccccaaagttttgggtttcccggttttttggcaaagggggcccataagagggggggggaataagaagcaaaggagggaccgtcgtttacacaccgtcgcgaccggacacgcgtaccgtgggggatcccggggaggaccccacctgcgcggggtggcgcccacgcctgcagccacccacccacgaaatttagaggtcccaggcaataaaaccttcagcgtgtactgcgtagccagcggctttgcggcgcgcgaagttcgctacggctatgattggaatagcggagagacatactacaaaaacaaacaacagacaagacatagaaaaaacgccagaacacacagaaaagcaaacacaacaacaaaccatagc

SEQ ID NO: 294504 - DNA, 1221 bp, Homo sapiens
gtattttaaaaacgtttgaaaggattcagttttcatgatacaggtgtaagactcctgtatcatgaaaactgaatccttttgaaataccactatatgaagagagagatgaaatttagtgaacagaattgaaaaggtgctcataatttcactatgcaaacttaccccagtctctaaaaaagtaatttagatttaaagttctttgatgtatttgattttctaaatctttatggttatgatttggaataaaatgtgcctaatcctgtgttacattctgttcttaaatctgaatgccttctcatttaattctgaggaaatatcacacaagtgtcttcattgaccttgaagaaatgtatatacagttgccttataaaacaacataaatttagaccataacttttatagagaaagggttttgtcaaatgttttctgaaaatctgagtaattcaaagcatgcctctgcccctttaatatttttaataacctgcattgttgctgtctgccaaatattaaattgaaatcttcatttcaattttattatctggaaagggcactggattgctctgcaaccaaagaaagcaatatggaatgaaaaaactcattcacttttgtcttattttcttttaaggtgtattggcatgtaatttgcatagagaaggtcctctggttagtctctcaaattgaggctgtttagggaaatccttattcagttggtggcagtggttggtttaaagtagaaggaaataagatcgccttaataccagaaatgattagaagtgctgatttagattcaacaaataccatatgtccttatcattttttgtaagaagaaattggttaagtcctaactttcaatgtgtacccaaatacttgtatttatgcttttgataaaatgtattttcagcattaatacacatccgattatgccttatttatatatgaagaataaagttaccatgttatactgttatgtcctaaaattcaaatcactatttgagaaaccctcaaattggtgctttcattatataatgatacatttagacaaaaccccaaactaagccatttgaaacaagattctctccattgcagtttgtagcaatgttatttctgtgtatgtcatgagaaggctaaatatcagtgttaatttcttgtttgaatccgtgaaatcatgcctgtaaagcccaaacatttgtaacaaactccctaataaatttagagaaagtc

SEQ ID NO: 294505 - DNA, 2765 bp, Homo sapiens
gcggccgcggcgtgcgagcgcgcctccgggaggcagcgggagcgcgcacgctccggggccaccgcccctccggggccgggcccgccctccttccctccctccctcccccgctgtcctggcccgccctgcccggcccgccctgcgagtcagttcgctggttccctccctccctgggcgcgctcgggccgccgccgcgctccccgccctcgagcctcggtgccggagccgcccgccgccggaggaggaggtggagggagccggaggggcccgccgaggcggcggcggcggcggcaagatggcggacttcctgccgtcgcggtccgtgctgtccgtgtgcttccccggctgcctgctgacgagtggcgaggccgagcagcaacgcaagtccaaggagatcgacaaatgcctgtctcgggaaaagacctatgtgaagcggctggtgaagatcctgctgctgggcgcgggcgagagcggcaagtccaccttcctgaagcagatgcggatcatccacgggcaggacttcgaccagcgcgcgcgcgaggagttccgccccaccatctacagcaacgtgatcaaaggtatgagggtgctggttgatgctcgagagaagcttcatattccctggggagacaactcaaaccaacaacatggagataagatgatgtcgtttgatacccgggcccccatggcagcccaaggaatggtggaaacaagggttttcttacaatatcttcctgctataagagcattatgggcagacagcggcatacagaatgcctatgaccggcgtcgagaatttcaactgggtgaatctgtaaaatatttcctggataacttggataaacttggagaaccagattatattccatcacaacaagatattctgcttgccagaagacccaccaaaggcatccatgaatacgactttgaaataaaaaatgttcctttcaaaatggttgatgtaggtggtcagagatcagaaaggaaacgttggtttgaatgtttcgacagtgtgacatcaatacttttccttgtttcctcaagtgaatttgaccaggtgcttatggaagatcgactgaccaatcgccttacagagtctctgaacatttttgaaacaatcgtcaataaccgggttttcagcaatgtctccataattctgttcttaaacaagacagacttgcttgaggagaaggtgcaaattgtgagcatcaaagactatttcctagaatttgaaggggatccccactgcttaagagacgtccaaaaattcctggtggaatgtttccggaacaaacgccgggaccagcaacagaagcccttataccaccacttcaccactgctatcaacacggagaacatccgccttgttttccgcgacgtgaaggatactattctgcatgacaacctcaagcagcttatgctacagtgatgtacaaaagacttgctgttttaatatctttttgtgtttttgatgttttctgtttgttttgttttttaaaatagcagtttacaaccagaattagaacaatcttaattctacgtttaacttcttgaaaatcttagtactttttctgcggcctttggtttgtggctgaaagctgttgagtgactcatcgccaagatttgctgtaatgcaggctttgatctgtttcaccatggcttctattcaagtccagttaaaacctcccagctgacctcagactaggcatatttcaggctttaaattattctactttccaaactgaattctcctgcagtgccaagtatcaaaggtgtccttaaatacttgtagggatgaggttaggaatattcagttccaaaacaagatatcttctgtccgccttacatatagcagtgacacttgttgcctaactttatggtgacctcctattttgtaagggctgttagaagttctatctaagaaatggcattctgtaggtttatagaaggtttagccttcatattttaattgcttgtatacacaacagctgttttgcttttagatttctgtgtttctgaaggtaatgttcttcctgttttcaagtttacataaggatctttggtctgatgctgatgaagagttcacaggtggtatgggagagcaaaaggcaagctaatgctgtttaccgtgttttggtcaaacgtaacgagtgaaatagaatttgcctttctcatatttaattatcatgtagtttaatgtaccatatgtgaaacattctggccatagcagcaactaaaaactgcaagcaacttggtaacagaactttctaaataaacttaacctgttccagaatgtcatgtatttgacttttaagccctatctcagttggtcagtaaagaccaatccttactgtaggaaatcattgttgtatcatcacaaacatctatcttttgctgtcctgtccagtcccatcaactccacactgtgccatttgtggcatcgttttgtttatttggagtttgctaagggcagtatttttctgtcaagactattcaagaaggcattatttgagattcctgttcattcttggtgtgtctctaacagatacagtatgtatacatttgtataattgttgttgttgaaagtccagcttttttgaggtatattttaaatgttttaaggatgcttctaaggatcagtagtaatttttttagttcgcacctaaagatgattacattgacctcccccgactgcttaccaaattaaaatgtgtccacgaagtggcatcgataaacaccgttgggtagaggtggcatcgataaac

SEQ ID NO: 294506 - DNA, 1604 bp, Homo sapiens
gcggccgcggcgtgcgagcgcgcctccgggaggcagcgggagcgcgcacgctccggggccaccgcccctccggggccgggcccgccctccttccctccctccctcccccgctgtcctggcccgccctgcccggcccgccctgcgagtcagttcgctggttccctccctccctgggcgcgctcgggccgccgccgcgctccccgccctcgagcctcggtgccggagccgcccgccgccggaggaggaggtggagggagccggaggggcccgccgaggcggcggcggcggcggcaagatggcggacttcctgccgtcgcggtccgtgctgtccgtgtgcttccccggctgcctgctgacgagtggcgaggccgagcagcaacgcaagtccaaggagatcgacaaatgcctgtctcgggaaaagacctatgtgaagcggctggtgaagatcctgctgctgggcgcgggcgagagcggcaagtccaccttcctgaagcagatgcggatcatccacgggcaggacttcgaccagcgcgcgcgcgaggagttccgccccaccatctacagcaacgtgatcaaaggtatgagggtgctggttgatgctcgagagaagcttcatattccctggggagacaactcaaaccaacaacatggagataagatgatgtcgtttgatacccgggcccccatggcagcccaaggaatggtggaaacaagggttttcttacaatatcttcctgctataagagcattatgggcagacagcggcatacagaatgcctatgaccggcgtcgagaatttcaactgggtgaatctgtaaaatatttcctggataacttggataaacttggagaaccagattatattccatcacaacaagatattctgcttgccagaagacccaccaaaggcatccatgaatacgactttgaaataaaaaatgttcctttcaaaatggttgatgtaggtggtcagagatcagaaaggaaacgttggtttgaatgtttcgacagtgtgacatcaatacttttccttgtttcctcaagtgaatttgaccaggtgcttatggaagatcgactgaccaatcgccttacagagtctctgaacatttttgaaacaatcgtcaataaccgggttttcagcaatgtctccataattctgttcttaaacaagacagacttgcttgaggagaaggtgcaaattgtgagcatcaaagactatttcctagaatttgaaggggatccccactgcttaagagacgtccaaaaattcctggtggaatgtttccggaacaaacgccgggaccagcaacagaagcccttataccaccacttcaccactgctatcaacacggagaacatccgccttgttttccgcgacgtgaaggatactattctgcatgacaacctcaagcagcgtggttccactggcatggccatccttacgggtgactttccatcccttgaaccaagggcatgttagcacttggctccagcatgtggtcaccattccaaccagaaatgggcacaaatgctactgtgtcggggtggtagcccaatttccttactgtaagtgctgacttccttaacaattccctcatatctct

SEQ ID NO: 294507 - DNA, 2512 bp, Homo sapiens
gttggaatggtgtgttttacagtctacctagaaaatagatggacaatatttttcaactgaaatcagttggctgtgtttgtaatcttgtcccacatggaccctaacctttagtagacttcagtcttttagtccagtagaagacaatggccctgaatatgtgttttctgctttttggtggaaggtttcctgcaggtggttgggtggtttttgggttattggctactgttcgttcagtgccatttgaagacctgttgtttcttaatcctttttcttggtgtgactggccaggaaaaagtccattgagtcctttttttctccctggtgtcttaccccttctgtagaataatccatattttaaaatttgtttcacatctttatagcaaacctgccacagacttgcaagcagtgattttatctttccttcctgagaaggtgatctcacttttgatgtttgggtcacctgtggacacctgtgctcttttgagtctcaaggcttatagctttcacattggcttgggaacaacagacttgtgtgtggttctagagtgaaatgggcagtgttctgctggtcctcagtctttgagaggtcttaggcaacatccttagtatagtggaatttctgaggtcaaatttaacatttaatatattctccttttagttcattgaatctgaggttctaaatctgtagcttcattttgagcacaagtctgcattgtcattttttaagagattggcaggcatatccttttgtgatacttaggaaaagactatggatggcagcaaatgaaagtaaaggttctcaactgtgaatgaaatttagaaagataattcttcagcagttggttgattagatgggttagtgcttttggaatatataacagtagacttgtattctttatgcactatacatatgatacgcactgacagaaaagcacagaagacatactgctaagagtttctttgtgcatttcactactgttctaggggactgctgtctctttggttccttttaggtttgtgttaggatgttgcacaagtaatcatttaatgttaaatgcaagtgtccaaagaaatgagtcttaaagttctttggtcatatttcactttagagttaggacaggagacagctaacctgacttccattttacaaatattagaaactttttcttcagtaacaaaaacagggaaggacaataaaaccatgaactattttgctttatgtctgtttttaaaaaataattgttttgaagtttgcttattagcttaataccttatagtacttttaaaaaatcatccttggtaattattgacttatcctagatccatgtacaattcagacttttatctgttagctttaataaaaatttaaaaccatctcatttcagaataaaataaacggaattacagttcatgcattagcatttttaagtgaagttctcttaataagattgccttttgtctaaccgaaatagggcatacagattagtttggatgggaaagtggtaagacttgagtttttaatactgtgcctatttccaaaagaagacttgatgtggctttttacattatgctttaaagatgttaatggaggatacatagtcttaaaacaatttgtttgggagtaagttttagtcggaaaaaggtgaagatatttatgctgagttatgttaagcaaattattttgagaccttttgctggtagacaaaaactgaggaaatgtttcactaaatatattatggtcaatgaaaaaaccagactttagagtaaatgtgataaccaagtagatttgtgaactttatttctttagtaattatttttatcttatgtgaaatgattcaacctttaatttttgcctagattatagcaatgttttgttttaccttatagggcattttaatgcttggagaaagactataagtgaatctacttcaagggattctgttcatggtggtatacagttcttggtgctcttttggaaattgtcaaacatttactgatagcagaaaaggaaccccaaaacacctgtagtgttcaccttgttataagaacagaaacatttggaacaggtttcattctgtttctagatttatgttgttgtagttgaacagcaactgtttttttccctcagtgttaacgaaaggataaagactacctgtattgttgggtatgactatcaaaggatttccggtgattcatgtttgtgaattggagtttaaatgtttgcaggattactgtacttccaaagacccactagaatgtcagctgtactctgtactctccactgagaaaatgaacaaaatcctatgtcttaacagttatgctctaactttttgaaagctttttgatgtaaataataggttagaaactaaaagccttttaatcttacaaaatacaatttgaacgatggaaggttgttcagatactggctttctgtaaaaacatcattgtgttagattgtttgtaatgtactatcaataaaattggctgcttgggcggttttagttaccacctt

SEQ ID NO: 294508 - DNA, 2735 bp, Homo sapiens
ttgacttccaccagctgagtacaaacaagtgtaaagaaaaactatgataaagtatggaggtcttgagaattgttcataatgaaatctttaatctgggttatcagagtaatgaaatcaccaataaaaacattccatttatcttggatcttctgtggttagcagaggagtatggtctagctatgttagcagcttgaaggcacaacgtaaaaggaatgagctttcacaaggtgcttacgttagctgggtagtattggtcaaaggtactctgaagagtgaatgcagaaatcagttggctgtgtttgtaatcttgtcccacatggaccctaacctttagtagacttcagtcttttagtccagtagaagacaatggccctgaatatgtgttttctgctttttggtggaaggtttcctgcaggtggttgggtggtttttgggttattggctactgttcgttcagtgccatttgaagacctgttgtttcttaatcctttttcttggtgtgactggccaggaaaaagtccattgagtcctttttttctccctggtgtcttaccccttctgtagaataatccatattttaaaatttgtttcacatctttatagcaaacctgccacagacttgcaagcagtgattttatctttccttcctgagaaggtgatctcacttttgatgtttgggtcacctgtggacacctgtgctcttttgagtctcaaggcttatagctttcacattggcttgggaacaacagacttgtgtgtggttctagagtgaaatgggcagtgttctgctggtcctcagtctttgagaggtcttaggcaacatccttagtatagtggaatttctgaggtcaaatttaacatttaatatattctccttttagttcattgaatctgaggttctaaatctgtagcttcattttgagcacaagtctgcattgtcattttttaagagattggcaggcatatccttttgtgatacttaggaaaagactatggatggcagcaaatgaaagtaaaggttctcaactgtgaatgaaatttagaaagataattcttcagcagttggttgattagatgggttagtgcttttggaatatataacagtagacttgtattctttatgcactatacatatgatacgcactgacagaaaagcacagaagacatactgctaagagtttctttgtgcatttcactactgttctaggggactgctgtctctttggttccttttaggtttgtgttaggatgttgcacaagtaatcatttaatgttaaatgcaagtgtccaaagaaatgagtcttaaagttctttggtcatatttcactttagagttaggacaggagacagctaacctgacttccattttacaaatattagaaactttttcttcagtaacaaaaacagggaaggacaataaaaccatgaactattttgctttatgtctgtttttaaaaaataattgttttgaagtttgcttattagcttaataccttatagtacttttaaaaaatcatccttggtaattattgacttatcctagatccatgtacaattcagacttttatctgttagctttaataaaaatttaaaaccatctcatttcagaataaaataaacggaattacagttcatgcattagcatttttaagtgaagttctcttaataagattgccttttgtctaaccgaaatagggcatacagattagtttggatgggaaagtggtaagacttgagtttttaatactgtgcctatttccaaaagaagacttgatgtggctttttacattatgctttaaagatgttaatggaggatacatagtcttaaaacaatttgtttgggagtaagttttagtcggaaaaaggtgaagatatttatgctgagttatgttaagcaaattattttgagaccttttgctggtagacaaaaactgaggaaatgtttcactaaatatattatggtcaatgaaaaaaccagactttagagtaaatgtgataaccaagtagatttgtgaactttatttctttagtaattatttttatcttatgtgaaatgattcaacctttaatttttgcctagattatagcaatgttttgttttaccttatagggcattttaatgcttggagaaagactataagtgaatctacttcaagggattctgttcatggtggtatacagttcttggtgctcttttggaaattgtcaaacatttactgatagcagaaaaggaaccccaaaacacctgtagtgttcaccttgttataagaacagaaacatttggaacaggtttcattctgtttctagatttatgttgttgtagttgaacagcaactgtttttttccctcagtgttaacgaaaggataaagactacctgtattgttgggtatgactatcaaaggatttccggtgattcatgtttgtgaattggagtttaaatgtttgcaggattactgtacttccaaagacccactagaatgtcagctgtactctgtactctccactgagaaaatgaacaaaatcctatgtcttaacagttatgctctaactttttgaaagctttttgatgtaaataataggttagaaactaaaagccttttaatcttacaaaatacaatttgaacgatggaaggttgttcagatactggctttctgtaaaaacatcattgtgttagattgtttgtaatgtactatcaataaaattggctgcttgggcggttttagttaccacctt

SEQ ID NO: 294509 - DNA, 2913 bp, Homo sapiens
ttgacttccaccagctgagtacaaacaagtgtaaagaaaaactatgataaagtatggaggtcttgagaattgttcataatgaaatctttaatctgggttatcagagtaatgaaatcaccaataaaaacattccatttatcttggatcttctgtggttagcagaggagtatggtctagctatgttagcagcttgaaggcacaacgtaaaaggaatgagctttcacaaggtgcttacgttagctgggtagtattggtcaaaggtactctgaagagtgaatgcagaaatcagttggctgtgtttgtaatcttgtcccacatggaccctaacctttagtagacttcagtcttttagtccagtagaagacaatggccctgaatatgtgttttctgctttttggtggaaggtttcctgcaggtggttgggtggtttttgggttattggctactgttcgttcagtgccatttgaagacctgttgtttcttaatcctttttcttggtgtgactggccaggaaaaagtccattgagtcctttttttctccctggtgtcttaccccttctgtagaataatccatattttaaaatttgtttcacatctttatagcaaacctgccacagacttgcaagcagtgattttatctttccttcctgagaaggtgatctcacttttgatgtttgggtcacctgtggacacctgtgctcttttgagtctcaaggcttatagctttcacattggcttgggaacaacagacttgtgtgtggttctagagtgaaatgggcagtgttctgctggtcctcagtctttgagaggtcttaggcaacatccttagtatagtggaatttctgaggtcaaatttaacatttaatatattctccttttagttcattgaatctgaggttctaaatctgtagcttcattttgagcacaagtctgcattgtcattttttaagagattggcaggcatatccttttgtgatacttaggaaaagactatggatggcagcaaatgaaagtaaaggttctcaactgtgaatgaaatttagaaagataattcttcagcagttggttgattagatgggttagtgcttttggaatatataacagtagacttgtattctttatgcactatacatatgatacgcactgacagaaaagcacagaagacatactgctaagagtttctttgtgcatttcactactgttctaggggactgctgtctctttggttccttttaggtttgtgttaggatgttgcacaagtaatcatttaatgttaaatgcaagtgtccaaagaaatgagtcttaaagttctttggtcatatttcactttagagttaggacaggagacagctaacctgacttccattttacaaatattagaaactttttcttcagtaacaaaaacagggaaggacaataaaaccatgaactattttgctttatgtctgtttttaaaaaataattgttttgaagtttgcttattagcttaataccttatagtacttttaaaaaatcatccttggtaattattgacttatcctagatccatgtacaattcagacttttatctgttagctttaataaaaatttaaaaccatctcatttcagaataaaataaacggaattacagttcatgcattagcatttttaagtgaagttctcttaataagattgccttttgtctaaccgaaatagggcatacagattagtttggatgggaaagtggtaagacttgagtttttaatactgtgcctatttccaaaagaagacttgatgtggctttttacattatgctttaaagatgttaatggaggatacatagtcttaaaacaatttgtttgggagtaagttttagtcggaaaaaggtgaagatatttatgctgagttatgttaagcaaattattttgagaccttttgctggtagacaaaaactgaggaaatgtttcactaaatatattatggtcaatgaaaaaaccagactttagagtaaatgtgataaccaagtagatttgtgaactttatttctttagtaattatttttatcttatgtgaaatgattcaacctttaatttttgcctagattatagcaatgttttgttttaccttatagggcattttaatgcttggagaaagactataagtgaatctacttcaagggattctgttcatggtggtatacagttcttggtgctcttttggaaattgtcaaacatttactgatagcagaaaaggaaccccaaaacacctgtagtgttcaccttgttataagaacagaaacatttggaacaggtttcattctgtttctagatttatgttgttgtagttgaacagcaactgtttttttccctcagtgttaacgaaaggataaagactacctgtattgttgggtatgactatcaaaggatttccggtgattcatgtttgtgaattggagtttaaatgtttgcaggattactgtacttccaaagacccactagaatgtcagctgtactctgtactctccactgagaaaatgaacaaaatcctatgtcttaacagttatgctctaactttttgaaagctttttgatgtaaataataggttagaaactaaaagccttttaatcttacaaaatacaatttgaacgatggaaggttgttcagatactggctttctgtaaaaacatcattgtgttagattgtttgtaatgtactatcaataaaattggctgcttgggcggttttagttaccacctttaaaaaaaaaaacagacagaacgaaaagacaacaaaagtgtagggagcctagggccacaccgaaaagaggttaagaacatagcgaagggccgcgggcccacaagaggataaggagacgggggacaacgtggaccaagaagacaccggggagaaaaagagacgggaactcgacgaaaaa

SEQ ID NO: 294510 - DNA, 2616 bp, Homo sapiens
ttgacttccaccagctgagtacaaacaagtgtaaagaaaaactatgataaagtatggaggtcttgagaattgttcataatgaaatctttaatctgggttatcagagtaatgaaatcaccaataaaaacattccatttatcttggatcttctgtggttagcagaggagtatggtctagctatgttagcagcttgaaggcacaacgtaaaaggaatgagctttcacaaggtgcttacgttagctgggtagtattggtcaaaggtactctgaagagtgaatgcagaaatcagttggctgtgtttgtaatcttgtcccacatggaccctaacctttagtagacttcagtcttttagtccagtagaagacaatggccctgaatatgtgttttctgctttttggtggaaggtttcctgcaggtggttgggtggtttttgggttattggctactgttcgttcagtgccatttgaagacctgttgtttcttaatcctttttcttggtgtgactggccaggaaaaagtccattgagtcctttttttctccctggtgtcttaccccttctgtagaataatccatattttaaaatttgtttcacatctttatagcaaacctgccacagacttgcaagcagtgattttatctttccttcctgagaaggtgatctcacttttgatgtttgggtcacctgtggacacctgtgctcttttgagtctcaaggcttatagctttcacattggcttgggaacaacagacttgtgtgtggttctagagtgaaatgggcagtgttctgctggtcctcagtctttgagaggtcttaggcaacatccttagtatagtggaatttctgaggtcaaatttaacatttaatatattctccttttagttcattgaatctgaggttctaaatctgtagcttcattttgagcacaagtctgcattgtcattttttaagagattggcaggcatatccttttgtgatacttaggaaaagactatggatggcagcaaatgaaagtaaaggttctcaactgtgaatgaaatttagaaagataattcttcagcagttggttgattagatgggttagtgcttttggaatatataacagtagacttgtattctttatgcactatacatatgatacgcactgacagaaaagcacagaagacatactgctaagagtttctttgtgcatttcactactgttctaggggactgctgtctctttggttccttttaggtttgtgttaggatgttgcacaagtaatcatttaatgttaaatgcaagtgtccaaagaaatgagtcttaaagttctttggtcatatttcactttagagttaggacaggagacagctaacctgacttccattttacaaatattagaaactttttcttcagtaacaaaaacagggaaggacaataaaaccatgaactattttgctttatgtctgtttttaaaaaataattgttttgaagtttgcttattagcttaataccttatagtacttttaaaaaatcatccttggtaattattgacttatcctagatccatgtacaattcagacttttatctgttagctttaataaaaatttaaaaccatctcatttcagaataaaataaacggaattacagttcatgcattagcatttttaagtgaagttctcttaataagattgccttttgtctaaccgaaatagggcatacagattagtttggatgggaaagtggtaagacttgagtttttaatactgtgcctatttccaaaagaagacttgatgtggctttttacattatgctttaaagatgttaatggaggatacatagtcttaaaacaatttgtttgggagtaagttttagtcggaaaaaggtgaagatatttatgctgagttatgttaagcaaattattttgagaccttttgctggtagacaaaaactgaggaaatgtttcactaaatatattatggtcaatgaaaaaaccagactttagagtaaatgtgataaccaagtagatttgtgaactttatttctttagtaattatttttatcttatgtgaaatgattcaacctttaatttttgcctagattatagcaatgttttgttttaccttatagggcattttaatgcttggagaaagactataagtgaatctacttcaagggattctgttcatggtggtatacagttcttggtgctcttttggaaattgtcaaacatttatgtttttttccctcagtgttaacgaaaggataaagactacctgtattgttgggtatgactatcaaaggatttccggtgattcatgtttgtgaattggagtttaaatgtttgcaggattactgtacttccaaagacccactagaatgtcagctgtactctgtactctccactgagaaaatgaacaaaatcctatgtcttaacagttatgctctaactttttgaaagctttttgatgtaaataataggttagaaactaaaagccttttaatcttacaaaatacaatttgaacgatggaaggttgttcagatactggctttctgtaaaaacatcattgtgttagattgtttgtaatgtactatcaataaaattggctgcttgggcggttttagttaccacctt

SEQ ID NO: 294511 - DNA, 461 bp, Homo sapiens
gactacctgtattgttgggtatgactatcaaaggatttccggtgattcatgtttgtgaattggagtttaaatgtttgcaggattactgtacttccaaagacccactagaatgtcagctgtactctgtactctccactgagaaaatgaacaaaatcctatgtcttaacagttatgctctaactttttgaaagctttttgatgtaaataataggttagaaactaaaagccttttaatcttacaaaatacaatttgaacgatggaaggttgttcagatactggctttctgtaaaaacatcattgtgttagattgtttgtaatgtactatcaataaaattggctgcttgggcggttttagttaccaccttagcctggttttctgctactgttatttatcatcgtaggttctgagttgctcattgtggttgctctttggaccaataaaaatggcaagtatgagatg

SEQ ID NO: 294512 - DNA, 298 bp, Homo sapiens
agttttagtcggaaaaaggtgaagatatttatgctgagttatgttaagcaaattattttgagaccttttgctggtagacaaaaactgaggaaatgtttcactaaatatattatggtcaatgaaaaaaccagactttagagtaaatgtgataaccaagtagatttgtgaactttatttctttagtaattatttttatcttatgtgaaatgattcaacctttaatttttgcctagattatagcaatgttttgttttaccttatagggcattttaatgcttggagaaagactataagtgaa

SEQ ID NO: 294513 - DNA, 479 bp, Homo sapiens
aagtttcattggttcttctcatgttcatagttgtcttggatgcctgtgaatcagtaccaggtgcaaccacccccctgataagagattctgccactccttggtcctgaccaccctcctagacctggggtctggggctgctgccctgagtcagccactctttcctcacaggttatagatgtggctcccgagcttctgcgtatctgcagcctcattctggctgacaacaagatcccaccaggtgagggtaggagtcataggcagggttagaagggaggctactcacctctgggctgggtggggctggcagacgcagctcctccgggggggtcacctctgcaacaacacccaaggggctctgtcccataagccccttaccccttgcagatgccagggcaagaaactgcagggtcctccctttagcaagttgggatataaagcccttgtctgcagcagtatccaggtactcccagaaaagcccc

SEQ ID NO: 294514 - DNA, 3926 bp, Homo sapiens
tcacataaggattatatatttgaactttttaagttgcctttagttttggtcctgatttttctttttacaattaccaaaataaaatttattaagaaaaaggctcatgcagttggaggttttggtctggatataggaactcgagccctgctgttaagggcacggtcctttataaagccgagctggccactgaatgcccgaagctcgagttctccaacccagcttgggaactcccggcgtggggaacctacattgccagagtcgggtttccgcgattcagccggtgctcagcctaacggaagtggaggagccggacctctttgtgggaagcgaattgaatcaccttggcaacccgcggggcgtgcagcaacgccctttcctccggaagtgggtgtcagaacctccacgtgctgtccctccccctccccttttcggcccagtagcggcggctcagttgctgccatggagtcagccgggctagagcagctcctacgggagctgctgctaccggacaccgagcgcatccgtcgggccacggaacagctccagatcgttcttcgggcccccgccgctttgccggctctctgcgacctgctagcctcggcggccgacccccagatccgccagtttgcggccgtgctgacccgcagacgactgaacacccgctggcgacggctggcggcggagcaacgggagagcctcaagtccctgatcctgacggccctgcagagagaaacagagcactgtgtgagcctcagcctggcccagctctcagccaccatttttcgaaaggaaggcttggaggcctggccacagcttttgcagctgcttcagcacagtacccacagcccccacagcccagagagagagatggggcttttgctgctaagtgtggtggtgacctcccggcccgaggccttccaaccccaccaccgggagcttcttcggcttctgaatgagactcttggtgaggtgggctctcctgggctgctcttctactccctgcgcactctgaccaccatggctccctacctcagcactgaagatgtgcctctcgctcggatgttggtgcccaagctgatcatggccatgcagactctgatccccatagatgaggcaaaggcctgtgaggcccttgaggctttggatgaactgttggagtcagaggtgccggtcatcaccccctacctctctgaagtcctcacattctgcctggaggtagctagaaatgtggccctgggcaatgcgatacgcatacgtattctctgctgcctcactttcttggtcaaagtcaagagcaaggccttactgaagaatcgtctcctgccacccttgctgcacacccttttccccattgtggctgctgagcccccaccaggccagttggatcccgaggaccaggattcagaagaggaagagttggagattgagctgatgggggagactcccaagcatttcgctgtacaagttgtggacatgctggcactacacctgccccccgagaagctctgtccccagctgatgcccatgttggaagaggctttgcggagcgagagcccataccagcgcaaagctggactcctggtgctggccgtgctgtctgacggagctggcgaccacatcaggcagagactgctgcccccactgctgcagattgtgtgcaagggcctggaggacccctcgcaagttgtacgcaatgctgcgctgtttgccctgggccagttctcagaaaacctacagccccatatcagcagctattcaagggaggtaatgccactgctcctcgcctacttgaagtcggtgcctcttggacacacacaccacctagccaaggcctgctatgccctggagaattttgtggagaacctagggcccaaggtgcagccctaccttccggagcttatggaatgcatgctgcagcttctgaggaaccccagcagtccccgggccaaggagctggctgtgagcgccctgggagccattgctacggctgcccaggcctcgctgctgccctacttccctgccatcatggagcacctgcgggaattcctgttaacaggccgtgaggaccttcagcctgtgcagatccagagcctggagacactgggggtgctggcacgagcagtgggggagcccatgaggccgctggctgaggaatgctgccagctgggtctgggcctctgcgaccaggtagacgacgctgacttgcggcgctgcacgtacagcctatttgcagccttatcgggtctgatgggtgagggcctggcgccccacttggaacagatcaccacgctcatgctgctgtcactgcgttccaccgagggcattgtgcctcagtatgacgggagcagctccttccttctgtttgacgatgagagtgatggggaagaagaggaggagctcatggatgaggatgtggaagaagaggatgactcagagatctcagggtacagcgtggagaatgccttcttcgatgagaaggaagacacctgtgctgccgtgggggagatctctgtgaacaccagtgtggccttccttccatacatggaaagtgtctttgaagaagtatttaaactgctggagtgccctcacctgaatgtgcggaaggcagcccatgaggctctgggtcagttttgctgtgcactgcacaaggcctgtcaaagctgcccctcggaacccaacactgctgctttgcaggctgccctggcccgagtcgtgccatcctacatgcaggcagtgaacagggagcgggaacgccaggtggtgatggccgtgctggaggccctgacaggggtgctccgcagctgtgggaccctcacactgaagccccctgggcgcctcgctgagctctgtggcgtgctcaaggctgtgctgcagaggaagacagcctgtcaggatactgacgaggaggaggaagaggaagatgatgatcaggctgaatacgacgccatgttgctggagcacgctggagaggccatccctgccctggcagccgcggctgggggagactcctttgccccattctttgccggtttcctgccattattggtgtgcaagacaaaacagggctgcacagtggcagagaagtcctttgcagtggggaccttggcagagactattcagggcctgggtgctgcctcagcccagtttgtgtctcggctgctccctgtgctgttgagcaccgcccaagaggcagaccccgaggtgcgaagcaatgccatcttcgggatgggcgtgctggcagagcatgggggccaccctgcccaggaacacttccccaagctgctggggctcctttttcccctcctggcgcgggagcgacatgatcgtgtccgtgacaacatctgtggggcacttgcccgcctgttgatggccagtcccaccaggaaaccagagccccaggtgctggctgccctactgcatgccctgccactgaaggaggacttggaggagtgggtcaccattgggcgcctcttcagcttcctgtaccagagcagccctgaccaggttatagatgtggctcccgagcttctgcgtatctgcagcctcattctggctgacaacaagatcccaccagacaccaaggccgcactgttgctgctcctgacgttcctggccaaacagcacaccgacagctttcaagcagctctgggctcactgcctgttgacaaggctcaggagctccaggctgtactgggcctctcctagactgcaggctgcagccagtccagagagaatagagcctgcccaggccttaagaccacctctcagcccagttcagttctgccttaccaaagattctgagactcatacccatttggagccagccccacttgctgccttacagggctgtccctgaggctggatctgttacaaatgagtcatgacatcatactgtaataaaagcagcttgttttctgcttgaacaa

SEQ ID NO: 294515 - DNA, 3510 bp, Homo sapiens
ggctaggtagaggcgcgtggtgaatcggccgagggttgctgccatggagtcagccgggctagagcagctcctacgggagctgctgctaccggacaccgagcgcatccgtcgggccacggaacagctccagatcgttcttcgggcccccgccgctttgccggctctctgcgacctgctagcctcggcggccgacccccagatccgccagtttgcggccgtgctgacccgcagacgactgaacacccgctggcgacggctggcggcggagcaacgggagagcctcaagtccctgatcctgacggccctgcagagagaaacagagcactgtgtgagcctcagcctggcccagctctcagccaccatttttcgaaaggaaggcttggaggcctggccacagcttttgcagctgcttcagcacagtacccacagcccccacagcccagagagagagatggggcttttgctgctaagtgtggtggtgacctcccggcccgaggccttccaaccccaccaccgggagcttcttcggcttctgaatgagactcttggtgaggtgggctctcctgggctgctcttctactccctgcgcactctgaccaccatggctccctacctcagcactgaagatgtgcctctcgctcggatgttggtgcccaagctgatcatggccatgcagactctgatccccatagatgaggcaaaggcctgtgaggcccttgaggctttggatgaactgttggagtcagaggtgccggtcatcaccccctacctctctgaagtcctcacattctgcctggaggtagctagaaatgtggccctgggcaatgcgatacgcatacgtattctctgctgcctcactttcttggtcaaagtcaagagcaaggccttactgaagaatcgtctcctgccacccttgctgcacacccttttccccattgtggctgctgagcccccaccaggccagttggatcccgaggaccaggattcagaagaggaagagttggagattgagctgatgggggagactcccaagcatttcgctgtacaagttgtggacatgctggcactacacctgccccccgagaagctctgtccccagctgatgcccatgttggaagaggctttgcggagcgagagcccataccagcgcaaagctggactcctggtgctggccgtgctgtctgacggagctggcgaccacatcaggcagagactgctgcccccactgctgcagattgtgtgcaagggcctggaggacccctcgcaagttgtacgcaatgctgcgctgtttgccctgggccagttctcagaaaacctacagccccatatcagcagctattcaagggaggtaatgccactgctcctcgcctacttgaagtcggtgcctcttggacacacacaccacctagccaaggcctgctatgccctggagaattttgtggagaacctagggcccaaggtgcagccctaccttccggagcttatggaatgcatgctgcagcttctgaggaaccccagcagtccccgggccaaggagctggctgtgagcgccctgggagccattgctacggctgcccaggcctcgctgctgccctacttccctgccatcatggagcacctgcgggaattcctgttaacaggccgtgaggaccttcagcctgtgcagatccagagcctggagacactgggggtgctggcacgagcagtgggggagcccatgaggccgctggctgaggaatgctgccagctgggtctgggcctctgcgaccaggtagacgacgctgacttgcggcgctgcacgtacagcctatttgcagccttatcgggtctgatgggtgagggcctggcgccccacttggaacagatcaccacgctcatgctgctgtcactgcgttccaccgagggcattgtgcctcagtatgacgggagcagctccttccttctgtttgacgatgagagtgatggggaagaagaggaggagctcatggatgaggatgtggaagaagaggatgactcagagatctcagggtacagcgtggagaatgccttcttcgatgagaaggaagacacctgtgctgccgtgggggagatctctgtgaacaccagtgtggccttccttccatacatggaaagtgtctttgaagaagtatttaaactgctggagtgccctcacctgaatgtgcggaaggcagcccatgaggctctgggtcagttttgctgtgcactgcacaaggcctgtcaaagctgcccctcggaacccaacactgctgctttgcaggctgccctggcccgagtcgtgccatcctacatgcaggcagtgaacagggagcgggaacgccaggtggtgatggccgtgctggaggccctgacaggggtgctccgcagctgtgggaccctcacactgaagccccctgggcgcctcgctgagctctgtggcgtgctcaaggctgtgctgcagaggaagacagcctgtcaggatactgacgaggaggaggaagaggaagatgatgatcaggctgaatacgacgccatgttgctggagcacgctggagaggccatccctgccctggcagccgcggctgggggagactcctttgccccattctttgccggtttcctgccattattggtgtgcaagacaaaacagggctgcacagtggcagagaagtcctttgcagtggggaccttggcagagactattcagggcctgggtgctgcctcagcccagtttgtgtctcggctgctccctgtgctgttgagcaccgcccaagaggcagaccccgaggtgcgaagcaatgccatcttcgggatgggcgtgctggcagagcatgggggccaccctgcccaggaacacttccccaagctgctggggctcctttttcccctcctggcgcgggagcgacatgatcgtgtccgtgacaacatctgtggggcacttgcccgcctgttgatggccagtcccaccaggaaaccagagccccaggtgctggctgccctactgcatgccctgccactgaaggaggacttggaggagtgggtcaccattgggcgcctcttcagcttcctgtaccagagcagccctgaccaggttatagatgtggctcccgagcttctgcgtatctgcagcctcattctggctgacaacaagatcccaccagacaccaaggccgcactgttgctgctcctgacgttcctggccaaacagcacaccgacagctttcaagcagctctgggctcactgcctgttgacaaggctcaggagctccaggctgtactgggcctctcctagactgcaggctgcagccagtccagagagaatagagcctgcccaggccttaagaccacctctcagcccagttcagttctgccttaccaaagattctgagactcatacccatttggagccagccccacttgctgccttacagggctgtccctgaggctggatctgttacaaatgagtcatgacatcatactgtaataaaagcagcttgttttctgcttgaacaa

SEQ ID NO: 294516 - DNA, 3520 bp, Homo sapiens
atctgagtacaacgcacgagggcttggcatgctccaatgggagggtatccaagacacgcgggagctaaggcacgcagctcctacgggagctgctgctaccggacaccgagcgcatccgtcgggccacggaacagctccagatcgttcttcgggcccccgccgctttgccggctctctgcgacctgctagcctcggcggccgacccccagatccgccagtttgcggccgtgctgacccgcagacgactgaacacccgctggcgacggctggcggcggagcaacgggagagcctcaagtccctgatcctgacggccctgcagagagaaacagagcactgtgtgagcctcagcctggcccagctctcagccaccatttttcgaaaggaaggcttggaggcctggccacagcttttgcagctgcttcagcacagtacccacagcccccacagcccagagagagagatggggcttttgctgctaagtgtggtggtgacctcccggcccgaggccttccaaccccaccaccgggagcttcttcggcttctgaatgagactcttggtgaggtgggctctcctgggctgctcttctactccctgcgcactctgaccaccatggctccctacctcagcactgaagatgtgcctctcgctcggatgttggtgcccaagctgatcatggccatgcagactctgatccccatagatgaggcaaaggcctgtgaggcccttgaggctttggatgaactgttggagtcagaggtgccggtcatcaccccctacctctctgaagtcctcacattctgcctggaggtagctagaaatgtggccctgggcaatgcgatacgcatacgtattctctgctgcctcactttcttggtcaaagtcaagagcaaggccttactgaagaatcgtctcctgccacccttgctgcacacccttttccccattgtggctgctgagcccccaccaggccagttggatcccgaggaccaggattcagaagaggaagagttggagattgagctgatgggggagactcccaagcatttcgctgtacaagttgtggacatgctggcactacacctgccccccgagaagctctgtccccagctgatgcccatgttggaagaggctttgcggagcgagagcccataccagcgcaaagctggactcctggtgctggccgtgctgtctgacggagctggcgaccacatcaggcagagactgctgcccccactgctgcagattgtgtgcaagggcctggaggacccctcgcaagttgtacgcaatgctgcgctgtttgccctgggccagttctcagaaaacctacagccccatatcagcagctattcaagggaggtaatgccactgctcctcgcctacttgaagtcggtgcctcttggacacacacaccacctagccaaggcctgctatgccctggagaattttgtggagaacctagggcccaaggtgcagccctaccttccggagcttatggaatgcatgctgcagcttctgaggaaccccagcagtccccgggccaaggagctggctgtgagcgccctgggagccattgctacggctgcccaggcctcgctgctgccctacttccctgccatcatggagcacctgcgggaattcctgttaacaggccgtgaggaccttcagcctgtgcagatccagagcctggagacactgggggtgctggcacgagcagtgggggagcccatgaggccgctggctgaggaatgctgccagctgggtctgggcctctgcgaccaggtagacgacgctgacttgcggcgctgcacgtacagcctatttgcagccttatcgggtctgatgggtgagggcctggcgccccacttggaacagatcaccacgctcatgctgctgtcactgcgttccaccgagggcattgtgcctcagtatgacgggagcagctccttccttctgtttgacgatgagagtgatggggaagaagaggaggagctcatggatgaggatgtggaagaagaggatgactcagagatctcagggtacagcgtggagaatgccttcttcgatgagaaggaagacacctgtgctgccgtgggggagatctctgtgaacaccagtgtggccttccttccatacatggaaagtgtctttgaagaagtatttaaactgctggagtgccctcacctgaatgtgcggaaggcagcccatgaggctctgggtcagttttgctgtgcactgcacaaggcctgtcaaagctgcccctcggaacccaacactgctgctttgcaggctgccctggcccgagtcgtgccatcctacatgcaggcagtgaacagggagcgggaacgccaggtggtgatggccgtgctggaggccctgacaggggtgctccgcagctgtgggaccctcacactgaagccccctgggcgcctcgctgagctctgtggcgtgctcaaggctgtgctgcagaggaagacagcctgtcaggatactgacgaggaggaggaagaggaagatgatgatcaggctgaatacgacgccatgttgctggagcacgctggagaggccatccctgccctggcagccgcggctgggggagactcctttgccccattctttgccggtttcctgccattattggtgtgcaagacaaaacagggctgcacagtggcagagaagtcctttgcagtggggaccttggcagagactattcagggcctgggtgctgcctcagcccagtttgtgtctcggctgctccctgtgctgttgagcaccgcccaagaggcagaccccgaggtgcgaagcaatgccatcttcgggatgggcgtgctggcagagcatgggggccaccctgcccaggaacacttccccaagctgctggggctcctttttcccctcctggcgcgggagcgacatgatcgtgtccgtgacaacatctgtggggcacttgcccgcctgttgatggccagtcccaccaggaaaccagagccccaggtgctggctgccctactgcatgccctgccactgaaggaggacttggaggagtgggtcaccattgggcgcctcttcagcttcctgtaccagagcagccctgaccaggttatagatgtggctcccgagcttctgcgtatctgcagcctcattctggctgacaacaagatcccaccagacaccaaggccgcactgttgctgctcctgacgttcctggccaaacagcacaccgacagctttcaagcagctctgggctcactgcctgttgacaaggctcaggagctccaggctgtactgggcctctcctagactgcaggctgcagccagtccagagagaatagagcctgcccaggccttaagaccacctctcagcccagttcagttctgccttaccaaagattctgagactcatacccatttggagccagccccacttgctgccttacagggctgtccctgaggctggatctgttacaaatgagtcatgacatcatactgtaataaaagcagcttgttttctgcttgaacaa

SEQ ID NO: 294517 - DNA, 2856 bp, Homo sapiens
caggctaggagaggcgggtttaaatcggacgaggatagatgaggcaaaggcctgtgaggcccttgaggctttggatgaactgttggagtcagaggtgccggtcatcaccccctacctctctgaagtcctcacattctgcctggaggtagctagaaatgtggccctgggcaatgcgatacgcatacgtattctctgctgcctcactttcttggtcaaagtcaagagcaaggccttactgaagaatcgtctcctgccacccttgctgcacacccttttccccattgtggctgctgagcccccaccaggccagttggatcccgaggaccaggattcagaagaggaagagttggagattgagctgatgggggagactcccaagcatttcgctgtacaagttgtggacatgctggcactacacctgccccccgagaagctctgtccccagctgatgcccatgttggaagaggctttgcggagcgagagcccataccagcgcaaagctggactcctggtgctggccgtgctgtctgacggagctggcgaccacatcaggcagagactgctgcccccactgctgcagattgtgtgcaagggcctggaggacccctcgcaagttgtacgcaatgctgcgctgtttgccctgggccagttctcagaaaacctacagccccatatcagcagctattcaagggaggtaatgccactgctcctcgcctacttgaagtcggtgcctcttggacacacacaccacctagccaaggcctgctatgccctggagaattttgtggagaacctagggcccaaggtgcagccctaccttccggagcttatggaatgcatgctgcagcttctgaggaaccccagcagtccccgggccaaggagctggctgtgagcgccctgggagccattgctacggctgcccaggcctcgctgctgccctacttccctgccatcatggagcacctgcgggaattcctgttaacaggccgtgaggaccttcagcctgtgcagatccagagcctggagacactgggggtgctggcacgagcagtgggggagcccatgaggccgctggctgaggaatgctgccagctgggtctgggcctctgcgaccaggtagacgacgctgacttgcggcgctgcacgtacagcctatttgcagccttatcgggtctgatgggtgagggcctggcgccccacttggaacagatcaccacgctcatgctgctgtcactgcgttccaccgagggcattgtgcctcagtatgacgggagcagctccttccttctgtttgacgatgagagtgatggggaagaagaggaggagctcatggatgaggatgtggaagaagaggatgactcagagatctcagggtacagcgtggagaatgccttcttcgatgagaaggaagacacctgtgctgccgtgggggagatctctgtgaacaccagtgtggccttccttccatacatggaaagtgtctttgaagaagtatttaaactgctggagtgccctcacctgaatgtgcggaaggcagcccatgaggctctgggtcagttttgctgtgcactgcacaaggcctgtcaaagctgcccctcggaacccaacactgctgctttgcaggctgccctggcccgagtcgtgccatcctacatgcaggcagtgaacagggagcgggaacgccaggtggtgatggccgtgctggaggccctgacaggggtgctccgcagctgtgggaccctcacactgaagccccctgggcgcctcgctgagctctgtggcgtgctcaaggctgtgctgcagaggaagacagcctgtcaggatactgacgaggaggaggaagaggaagatgatgatcaggctgaatacgacgccatgttgctggagcacgctggagaggccatccctgccctggcagccgcggctgggggagactcctttgccccattctttgccggtttcctgccattattggtgtgcaagacaaaacagggctgcacagtggcagagaagtcctttgcagtggggaccttggcagagactattcagggcctgggtgctgcctcagcccagtttgtgtctcggctgctccctgtgctgttgagcaccgcccaagaggcagaccccgaggtgcgaagcaatgccatcttcgggatgggcgtgctggcagagcatgggggccaccctgcccaggaacacttccccaagctgctggggctcctttttcccctcctggcgcgggagcgacatgatcgtgtccgtgacaacatctgtggggcacttgcccgcctgttgatggccagtcccaccaggaaaccagagccccaggtgctggctgccctactgcatgccctgccactgaaggaggacttggaggagtgggtcaccattgggcgcctcttcagcttcctgtaccagagcagccctgaccaggttatagatgtggctcccgagcttctgcgtatctgcagcctcattctggctgacaacaagatcccaccagacaccaaggccgcactgttgctgctcctgacgttcctggccaaacagcacaccgacagctttcaagcagctctgggctcactgcctgttgacaaggctcaggagctccaggctgtactgggcctctcctagactgcaggctgcagccagtccagagagaatagagcctgcccaggccttaagaccacctctcagcccagttcagttctgccttaccaaagattctgagactcatacccatttggagccagccccacttgctgccttacagggctgtccctgaggctggatctgttacaaatgagtcatgacatcatactgtaataaaagcagcttgttttctgcttgaacaa

SEQ ID NO: 294518 - DNA, 4014 bp, Homo sapiens
tcacataaggattatatatttgaactttttaagttgcctttagttttggtcctgatttttctttttacaattaccaaaataaaatttattaagaaaaaggctcatgcagttggaggttttggtctggatataggaactcgagccctgctgttaagggcacggtcctttataaagccgagctggccactgaatgcccgaagctcgagttctccaacccagcttgggaactcccggcgtggggaacctacattgccagagtcgggtttccgcgattcagccggtgctcagcctaacggaagtggaggagccggacctctttgtgggaagcgaattgaatcaccttggcaacccgcggggcgtgcagcaacgccctttcctccggaagtgggtgtcagaacctccacgtgctgtccctccccctccccttttcggcccagtagcggcggctcagttgctgccatggagtcagccgggctagagcagctcctacgggagctgctgctaccggacaccgagcgcatccgtcgggccacggaacagctccagatcgttcttcgggcccccgccgctttgccggctctctgcgacctgctagcctcggcggccgacccccagatccgccagtttgcggccgtgctgacccgcagacgactgaacacccgctggcgacggctggcggcggagcaacgggagagcctcaagtccctgatcctgacggccctgcagagagaaacagagcactgtgtgagcctcagcctggcccagctctcagccaccatttttcgaaaggaaggcttggaggcctggccacagcttttgcagctgcttcagcacagtacccacagcccccacagcccagagagagagatggggcttttgctgctaagtgtggtggtgacctcccggcccgaggccttccaaccccaccaccgggagcttcttcggcttctgaatgagactcttggtgaggtgggctctcctgggctgctcttctactccctgcgcactctgaccaccatggctccctacctcagcactgaagatgtgcctctcgctcggatgttggtgcccaagctgatcatggccatgcagactctgatccccatagatgaggcaaaggcctgtgaggcccttgaggctttggatgaactgttggagtcagaggtgccggtcatcaccccctacctctctgaagtcctcacattctgcctggaggtagctagaaatgtggccctgggcaatgcgatacgcatacgtattctctgctgcctcactttcttggtcaaagtcaagagcaaggccttactgaagaatcgtctcctgccacccttgctgcacacccttttccccattgtggctgctgagcccccaccaggccagttggatcccgaggaccaggattcagaagaggaagagttggagattgagctgatgggggagactcccaagcatttcgctgtacaagttgtggacatgctggcactacacctgccccccgagaagctctgtccccagctgatgcccatgttggaagaggctttgcggagcgagagcccataccagcgcaaagctggactcctggtgctggccgtgctgtctgacggagctggcgaccacatcaggcagagactgctgcccccactgctgcagattgtgtgcaagggcctggaggacccctcgcaagttgtacgcaatgctgcgctgtttgccctgggccagttctcagaaaacctacagccccatatcagcagctattcaagggaggtaatgccactgctcctcgcctacttgaagtcggtgcctcttggacacacacaccacctagccaaggcctgctatgccctggagaattttgtggagaacctagggcccaaggtgcagccctaccttccggagcttatggaatgcatgctgcagcttctgaggaaccccagcagtccccgggccaaggagctggctgtgagcgccctgggagccattgctacggctgcccaggcctcgctgctgccctacttccctgccatcatggagcacctgcgggaattcctgttaacaggccgtgaggaccttcagcctgtgcagatccagagcctggagacactgggggtgctggcacgagcagtgggggagcccatgaggccgctggctgaggaatgctgccagctgggtctgggcctctgcgaccaggtagacgacgctgacttgcggcgctgcacgtacagcctatttgcagccttatcgggtctgatgggtgagggcctggcgccccacttggaacagatcaccacgctcatgctgctgtcactgcgttccaccgagggcattgtgcctcagtatgacgggagcagctccttccttctgtttgacgatgagagtgatggggaagaagaggaggagctcatggatgaggatgtggaagaagaggatgactcagagatctcagggtacagcgtggagaatgccttcttcgatgagaaggaagacacctgtgctgccgtgggggagatctctgtgaacaccagtgtggccttccttccatacatggaaagtgtctttgaagaagtatttaaactgctggagtgccctcacctgaatgtgcggaaggcagcccatgaggctctgggtcagttttgctgtgcactgcacaaggcctgtcaaagctgcccctcggaacccaacactgctgctttgcaggctgccctggcccgagtcgtgccatcctacatgcaggcagtgaacagggagcgggaacgccaggtggtgatggccgtgctggaggccctgacaggggtgctccgcagctgtgggaccctcacactgaagccccctgggcgcctcgctgagctctgtggcgtgctcaaggctgtgctgcagaggaagacagcctgtcaggatactgacgaggaggaggaagaggaagatgatgatcaggctgaatacgacgccatgttgctggagcacgctggagaggccatccctgccctggcagccgcggctgggggagactcctttgccccattctttgccggtttcctgccattattggtgtgcaagacaaaacagggctgcacagtggcagagaagtcctttgcagtggggaccttggcagagactattcagggcctgggtgctgcctcagcccagtttgtgtctcggctgctccctgtgctgttgagcaccgcccaagaggcagaccccgaggtgcgaagcaatgccatcttcgggatgggcgtgctggcagagcatgggggccaccctgcccaggaacacttccccaagctgctggggctcctttttcccctcctggcgcgggagcgacatgatcgtgtccgtgacaacatctgtggggcacttgcccgcctgttgatggccagtcccaccaggaaaccagagccccaggtgctggctgccctactgcatgccctgccactgaaggaggacttggaggagtgggtcaccattgggcgcctcttcagcttcctgtaccagagcagccctgaccaggttatagatgtggctcccgagcttctgcgtatctgcagcctcattctggctgacaacaagatcccaccagacaccaaggccgcactgttgctgctcctgacgttcctggccaaacagcacaccgacagctttcaagcagctctgggctcactgcctgttgacaaggctcaggagctccaggctgtactgggcctctcctagactgcaggctgcagccagtccagagagaatagagcctgcccaggccttaagaccacctctcagcccagttcagttctgccttaccaaagattctgagactcatacccatttggagccagccccacttgctgccttacagggctgtccctgaggctggatctgttacaaatgagtcatgacatcatactgtaataaaagcagcttgttttctgcttgaacaatagctctgagagcaagaaggctggaaatgcacattcagaaatgaggtaagcaggacccagtgaggcacgacgtggtttactagaagtg

SEQ ID NO: 294519 - DNA, 4006 bp, Homo sapiens
tcacataaggattatatatttgaactttttaagttgcctttagttttggtcctgatttttctttttacaattaccaaaataaaatttattaagaaaaaggctcatgcagttggaggttttggtctggatataggaactcgagccctgctgttaagggcacggtcctttataaagccgagctggccactgaatgcccgaagctcgagttctccaacccagcttgggaactcccggcgtggggaacctacattgccagagtcgggtttccgcgattcagccggtgctcagcctaacggaagtggaggagccggacctctttgtgggaagcgaattgaatcaccttggcaacccgcggggcgtgcagcaacgccctttcctccggaagtgggtgtcagaacctccacgtgctgtccctccccctccccttttcggcccagtagcggcggctcagttgctgccatggagtcagccgggctagagcagctcctacgggagctgctgctaccggacaccgagcgcatccgtcgggccacggaacagctccagatcgttcttcgggcccccgccgctttgccggctctctgcgacctgctagcctcggcggccgacccccagatccgccagtttgcggccgtgctgacccgcagacgactgaacacccgctggcgacggctggcggcggagcaacgggagagcctcaagtccctgatcctgacggccctgcagagagaaacagagcactgtgtgagcctcagcctggcccagctctcagccaccatttttcgaaaggaaggcttggaggcctggccacagcttttgcagctgcttcagcacagtacccacagcccccacagcccagagagagagatggggcttttgctgctaagtgtggtggtgacctcccggcccgaggccttccaaccccaccaccgggagcttcttcggcttctgaatgagactcttggtgaggtgggctctcctgggctgctcttctactccctgcgcactctgaccaccatggctccctacctcagcactgaagatgtgcctctcgctcggatgttggtgcccaagctgatcatggccatgcagactctgatccccatagatgaggcaaaggcctgtgaggcccttgaggctttggatgaactgttggagtcagaggtgccggtcatcaccccctacctctctgaagtcctcacattctgcctggaggtagctagaaatgtggccctgggcaatgcgatacgcatacgtattctctgctgcctcactttcttggtcaaagtcaagagcaaggccttactgaagaatcgtctcctgccacccttgctgcacacccttttccccattgtggctgctgagcccccaccaggccagttggatcccgaggaccaggattcagaagaggaagagttggagattgagctgatgggggagactcccaagcatttcgctgtacaagttgtggacatgctggcactacacctgccccccgagaagctctgtccccagctgatgcccatgttggaagaggctttgcggagcgagagcccataccagcgcaaagctggactcctggtgctggccgtgctgtctgacggagctggcgaccacatcaggcagagactgctgcccccactgctgcagattgtgtgcaagggcctggaggacccctcgcaagttgtacgcaatgctgcgctgtttgccctgggccagttctcagaaaacctacagccccatatcagcagctattcaagggaggtaatgccactgctcctcgcctacttgaagtcggtgcctcttggacacacacaccacctagccaaggcctgctatgccctggagaattttgtggagaacctagggcccaaggtgcagccctaccttccggagcttatggaatgcatgctgcagcttctgaggaaccccagcagtccccgggccaaggagctggctgtgagcgccctgggagccattgctacggctgcccaggcctcgctgctgccctacttccctgccatcatggagcacctgcgggaattcctgttaacaggccgtgaggaccttcagcctgtgcagatccagagcctggagacactgggggtgctggcacgagcagtgggggagcccatgaggccgctggctgaggaatgctgccagctgggtctgggcctctgcgaccaggtagacgacgctgacttgcggcgctgcacgtacagcctatttgcagccttatcgggtctgatgggtgagggcctggcgccccacttggaacagatcaccacgctcatgctgctgtcactgcgttccaccgagggcattgtgcctcagtatgacgggagcagctccttccttctgtttgacgatgagagtgatggggaagaagaggaggagctcatggatgaggatgtggaagaagaggatgactcagagatctcagggtacagcgtggagaatgccttcttcgatgagaaggaagacacctgtgctgccgtgggggagatctctgtgaacaccagtgtggccttccttccatacatggaaagtgtctttgaagaagtatttaaactgctggagtgccctcacctgaatgtgcggaaggcagcccatgaggctctgggtcagttttgctgtgcactgcacaaggcctgtcaaagctgcccctcggaacccaacactgctggtgaggagaggctgggccaggctgggggttcttggggaggggcagggcctgactggtgcttcagccaataatgtccccagctttgcaggctgccctggcccgagtcgtgccatcctacatgcaggcagtgaacagggagcgggaacgccaggtggtgatggccgtgctggaggccctgacaggggtgctccgcagctgtgggaccctcacactgaagccccctgggcgcctcgctgagctctgtggcgtgctcaaggctgtgctgcagaggaagacagcctgtcaggatactgacgaggaggaggaagaggaagatgatgatcaggctgaatacgacgccatgttgctggagcacgctggagaggccatccctgccctggcagccgcggctgggggagactcctttgccccattctttgccggtttcctgccattattggtgtgcaagacaaaacagggctgcacagtggcagagaagtcctttgcagtggggaccttggcagagactattcagggcctgggtgctgcctcagcccagtttgtgtctcggctgctccctgtgctgttgagcaccgcccaagaggcagaccccgaggtgcgaagcaatgccatcttcgggatgggcgtgctggcagagcatgggggccaccctgcccaggaacacttccccaagctgctggggctcctttttcccctcctggcgcgggagcgacatgatcgtgtccgtgacaacatctgtggggcacttgcccgcctgttgatggccagtcccaccaggaaaccagagccccaggtgctggctgccctactgcatgccctgccactgaaggaggacttggaggagtgggtcaccattgggcgcctcttcagcttcctgtaccagagcagccctgaccaggttatagatgtggctcccgagcttctgcgtatctgcagcctcattctggctgacaacaagatcccaccagacaccaaggccgcactgttgctgctcctgacgttcctggccaaacagcacaccgacagctttcaagcagctctgggctcactgcctgttgacaaggctcaggagctccaggctgtactgggcctctcctagactgcaggctgcagccagtccagagagaatagagcctgcccaggccttaagaccacctctcagcccagttcagttctgccttaccaaagattctgagactcatacccatttggagccagccccacttgctgccttacagggctgtccctgaggctggatctgttacaaatgagtcatgacatcatactgtaataaaagcagcttgttttctgcttgaacaa

SEQ ID NO: 294520 - DNA, 2619 bp, Homo sapiens
ggacgcgtgggtcgacccacgcgtcggattgagctgatgggggagactcccaagcatttcgctgtacaagttgtggacatgctggcactacacctgccccccgagaagctctgtccccagctgatgcccatgttggaagaggctttgcggagcgagagcccataccagcgcaaagctggactcctggtgctggccgtgctgtctgacggagctggcgaccacatcaggcagagactgctgcccccactgctgcagattgtgtgcaagggcctggaggacccctcgcaagttgtacgcaatgctgcgctgtttgccctgggccagttctcagaaaacctacagccccatatcagcagctattcaagggaggtaatgccactgctcctcgcctacttgaagtcggtgcctcttggacacacacaccacctagccaaggcctgctatgccctggagaattttgtggagaacctagggcccaaggtgcagccctaccttccggagcttatggaatgcatgctgcagcttctgaggaaccccagcagtccccgggccaaggagctggctgtgagcgccctgggagccattgctacggctgcccaggcctcgctgctgccctacttccctgccatcatggagcacctgcgggaattcctgttaacaggccgtgaggaccttcagcctgtgcagatccagagcctggagacactgggggtgctggcacgagcagtgggggagcccatgaggccgctggctgaggaatgctgccagctgggtctgggcctctgcgaccaggtagacgacgctgacttgcggcgctgcacgtacagcctatttgcagccttatcgggtctgatgggtgagggcctggcgccccacttggaacagatcaccacgctcatgctgctgtcactgcgttccaccgagggcattgtgcctcagtatgacgggagcagctccttccttctgtttgacgatgagagtgatggggaagaagaggaggagctcatggatgaggatgtggaagaagaggatgactcagagatctcagggtacagcgtggagaatgccttcttcgatgagaaggaagacacctgtgctgccgtgggggagatctctgtgaacaccagtgtggccttccttccatacatggaaagtgtctttgaagaagtatttaaactgctggagtgccctcacctgaatgtgcggaaggcagcccatgaggctctgggtcagttttgctgtgcactgcacaaggcctgtcaaagctgcccctcggaacccaacactgctgctttgcaggctgccctggcccgagtcgtgccatcctacatgcaggcagtgaacagggagcgggaacgccaggtggtgatggccgtgctggaggccctgacaggggtgctccgcagctgtgggaccctcacactgaagccccctgggcgcctcgctgagctctgtggcgtgctcaaggctgtgctgcagaggaagacagcctgtcaggatactgacgaggaggaggaagaggaagatgatgatcaggctgaatacgacgccatgttgctggagcacgctggagaggccatccctgccctggcagccgcggctgggggagactcctttgccccattctttgccggtttcctgccattattggtgtgcaagacaaaacagggctgcacagtggcagagaagtcctttgcagtggggaccttggcagagactattcagggcctgggtgctgcctcagcccagtttgtgtctcggctgctccctgtgctgttgagcaccgcccaagaggcagaccccgaggtgcgaagcaatgccatcttcgggatgggcgtgctggcagagcatgggggccaccctgcccaggaacacttccccaagctgctggggctcctttttcccctcctggcgcgggagcgacatgatcgtgtccgtgacaacatctgtggggcacttgcccgcctgttgatggccagtcccaccaggaaaccagagccccaggtgctggctgccctactgcatgccctgccactgaaggaggacttggaggagtgggtcaccattgggcgcctcttcagcttcctgtaccagagcagccctgaccaggttatagatgtggctcccgagcttctgcgtatctgcagcctcattctggctgacaacaagatcccaccagacaccaaggccgcactgttgctgctcctgacgttcctggccaaacagcacaccgacagctttcaagcagctctgggctcactgcctgttgacaaggctcaggagctccaggctgtactgggcctctcctagactgcaggctgcagccagtccagagagaatagagcctgcccaggccttaagaccacctctcagcccagttcagttctgccttaccaaagattctgagactcatacccatttggagccagccccacttgctgccttacagggctgtccctgaggctggatctgttacaaatgagtcatgacatcatactgtaataaaagcagcttgttttctgcttgaacaatagctctgagagcaagaaggctggaaatgcacattcagaaatgaggtaagcaggacccagtgaggcacgacgtggtttactagaagtg

SEQ ID NO: 294521 - DNA, 2906 bp, Homo sapiens
tcacataaggattatatatttgaactttttaagttgcctttagttttggtcctgatttttctttttacaattaccaaaataaaatttattaagaaaaaggctcatgcagttggaggttttggtctggatataggaactcgagccctgctgttaagggcacggtcctttataaagccgagctggccactgaatgcccgaagctcgagttctccaacccagcttgggaactcccggcgtggggaacctacattgccagagtcgggtttccgcgattcagccggtgctcagcctaacggaagtggaggagccggacctctttgtgggaagcgaattgaatcaccttggcaacccgcggggcgtgcagcaacgccctttcctccggaagtgggtgtcagaacctccacgtgctgtccctccccctccccttttcggcccagtagcggcggctcagttgctgccatggagtcagccgggctagagcagctcctacgggagctgctgctaccggacaccgagcgcatccgtcgggccacggaacagctccagatcgttcttcgggcccccgccgctttgccggctctctgcgacctgctagcctcggcggccgacccccagatccgccagtttgcggccgtgctgacccgcagacgactgaacacccgctggcgacggctggcggcggagcaacgggagagcctcaagtccctgatcctgacggccctgcagagagaaacagagcactgtgtgagcctcagcctggcccagctctcagccaccatttttcgaaaggaaggcttggaggcctggccacagcttttgcagctgcttcagcacagtacccacagcccccacagcccagagagagagatggggcttttgctgctaagtgtggtggtgacctcccggcccgaggccttccaaccccaccaccgggagcttcttcggcttctgaatgagactcttggtgaggtgggctctcctgggctgctcttctactccctgcgcactctgaccaccatggctccctacctcagcactgaagatgtgcctctcgctcggatgttggtgcccaagctgatcatggccatgcagactctgatccccatagatgaggcaaaggcctgtgaggcccttgaggctttggatgaactgttggagtcagaggtgccggtcatcaccccctacctctctgaagtcctcacattctgcctggaggtagctagaaatgtggccctgggcaatgcgatacgcatacgtattctctgctgcctcactttcttggtcaaagtcaagagcaaggccttactgaagaatcgtctcctgccacccttgctgcacacccttttccccattgtggctgctgagcccccaccaggccagttggatcccgaggaccaggattcagaagaggaagagttggagattgagctgatgggggagactcccaagcatttcgctgtacaagttgtggacatgctggcactacacctgccccccgagaagctctgtccccagctgatgcccatgttggaagaggctttgcggagcgagagcccataccagcgcaaagctggactcctggtgctggccgtgctgtctgacggagctggcgaccacatcaggcagagactgctgcccccactgctgcagattgtgtgcaagggcctggaggacccctcgcaagttgtacgcaatgctgcgctgtttgccctgggccagttctcagaaaacctacagccccatatcagcagctattcaagggaggtaatgccactgctcctcgcctacttgaagtcggtgcctcttggacacacacaccacctagccaaggcctgctatgccctggagaattttgtggagaacctagggcccaaggtgcagccctaccttccggagcttatggaatgcatgctgcagcttctgaggaaccccagcagtccccgggccaaggagctggctgtgagcgccctgggagccattgctacggctgcccaggcctcgctgctgccctacttccctgccatcatggagcacctgcgggaattcctgttaacaggccgtgaggaccttcagcctgtgcagatccagagcctggagacactgggggtgctggcacgagcagtgggggagcccatgaggccgctggctgaggaatgctgccagctgggtctgggcctctgcgaccaggtagacgacgctgacttgcggcgctgcacgtacagcctatttgcagccttatcgggtctgatgggtgagggcctggcgccccacttggaacagatcaccacgctcatgctgctgtcactgcgttccaccgagggcattgtgcctcagtatgacgggagcagctccttccttctgtttgacgatgagagtgatggggaagaagaggaggagctcatggatgaggatgtggaagaagaggatgactcagagatctcagggtacagcgtggagaatgccttcttcgatgagaaggaagacacctgtgctgccgtgggggagatctctgtgaacaccagtgtggccttccttccatacatggaaagtgtctttgaagaagtatttaaactgctggagctgacgttcctggccaaacagcacaccgacagctttcaagcagctctgggctcactgcctgttgacaaggctcaggagctccaggctgtactgggcctctcctagactgcaggctgcagccagtccagagagaatagagcctgcccaggccttaagaccacctctcagcccagttcagttctgccttaccaaagattctgagactcatacccatttggagccagccccacttgctgccttacagggctgtccctgaggctggatctgttacaaatgagtcatgacatcatactgtaataaaagcagcttgttttctgcttgaacaa

SEQ ID NO: 294522 - DNA, 507 bp, Homo sapiens
cctcaagtccctgatcctgacggccctgcagagagaaacagagtaagtacctacccacttctctcgggatcttgacgactttgtctaggtttctgccttccttttcggctccaggctgggacttgtggggcagggacttcagttctagacgcaaggtggagtgaggattttaaggctgttttgaagactaaagttcttgaggaagggtgatgatgatctgccaaacccaagtcagaagaataagactgaaattcaggctaagttagactgaacttaccagattacatgcccacagtgctgttgggctccctctgagctgctgtctcatgtgtcccaacttggcaaagaccctgtgcccacacctcctgaaagtttctgtcctggctgccccattgagcctggccactgtgtgcagaggaaggtattgaagggtgattggaggagatctctcctgtttgcaggcactgtgtgagcctcagcctggcccagctctcagccaccattttt

SEQ ID NO: 294523 - DNA, 2204 bp, Homo sapiens
  misc_feature (1)..(1): n is a, c, g, or t
  misc_feature (5)..(5): n is a, c, g, or t
  misc_feature (8)..(8): n is a, c, g, or t
  misc_feature (1045)..(1045): n is a, c, g, or t
ngccncgnaccagacggaagcgatgcgggagggcatgcccaggatgaaaacctgggccacagagcagatgagctggcccaccacggtgaccggaaagagatgcggcttcaggctgcccagcttcacccaggcccccaggcagttgagagccgagccagtgagagcaatggtgcgcaggccgaacttctccagcagccaagccactggcaggagcagagggatgtaagtcagcatgtagcacatggacaaccagtcaatggcaaaggcactgacaccgtagaagtgcatgaagatgttattgatggagccgtactggatccactgaaaggagttgcacatggagtagcagctaaacaccaggaccacggcccaacggcgcctgctcaccttgatcacgctgaggtcctcagggcccgagctactggggtgagccaagccactgggttgggctaaggcactggggtgggccgaactgctggggtggacagagacgctggggttgatggagacgctgggatggaccgagacgctgggatggaccgagacgctggggtccgcttggagtgcggactccggcacaggggtgtcatcgctctcttcctggttgggaccttcattcaccatcgccacagtctcctctggaatcctggagaagtggtgaggactccggcagtcttaagggacagtggcctctgctggtctcttagagttgaaaggacacttgcctattccagaagaaacagactagaggctgcgtaaaagcctcaagtggggcttcctgtgctcacctccaagctcctgctcccacttttgcttggggctctctgttgccacccgcggcgatcgctgtcccaaggccggccgcacacgccgcagccggctccggaccgctcctgccttgggtctccccacgaggcgttccttgtgcaggaaaagttctctccttgcgcagccacttcgcccgcagagtcctctcccgggccagcttggggcctcgcccagtcgggcacacgtgaccgccccgcccccgtcctgcctggcttcntccgcccccaacccccccgccaccactccacccccgacccagtgtctcttgccttctcgagcccggtcctccgggcagagcagttgtttcgccacagcttgcgggatgcattcctcccccacgccccgggcgccatggaaaccgcccggttaacccccaccctttgcactgcccctcatattcatttgccacccgctatcagcggaccctgcaagaagatccgccttcccgaagtaatgcccaaaatagagcctctccggtgcctgtccgcatgccctgcgcgcgtgcaccaaagcccggcgccacctaagtgttctggggaattcaagagggattccccaactttctcccccttggcttaggctcccagccctttgctgaactaaagagagatttgtagatttcccgggctggttgcgctcctgggttaaaggggagttacagaaaactcgctttactcgcttctttccctgcggacgtggttttgtcttggggaggttagatttgaacctgttatgtggggctatttttcctgatggattctgggcgaagaccctagggtgcgggggagggaaaggagagtttgaagaagccgaagaagctgtccgcggttgtgtgatggaacgcttagcacagagctggctccgggcttggtcttggaagcggtctttgaactcaagcagccctagtctgccacctgccggtcctagcccatttcaaagggcaaaccctcgactcgttgcactgacctctgtccttggcgagggatcctgataaggaaactgaggcctggagaggcgggtgtgttactcagcgtcctatagtgaaatagcatcagaacaagcagcaataaaatgggtgctccttccacgtggcctttcccatgagctcttctggggcagcccttcagcttgatttctagctgtctcaggacttgtggatatttttgtatattttggagtgtttagtgagataaactatgtaacacacgctctcaatacgtatctgtagaattgagttgtactgcatatcaccatgaaattttacaaaactggagacaaagaggagatccaacaggatttcagagattttaaaaaatcagaaaaagttaaaaaaaaaaaaccagatacaaaatatcaacacagttgcctcaagcctg

SEQ ID NO: 294524 - DNA, 652 bp, Homo sapiens
gttcctggctctattccaactgacaccttaggaagcttgagggaacgaacctctggcattgaactcaagcttgtgtggcctcttgcagaatgatagttaagtcagcccactggaggctatcagcaactcctggattcaaagccaaaacatcaccctcttatttatagcttactactagccaaacagagctatagatttaagaggtaaggagtttgttgagtgcaggggaaggccaaatttctaacagaatgaatcaggttgggagccggcattattctttcttaaaaatatcaacacttggaatttgtgaaaatgttgcccttacaagttttacatgcataatttatatgtgtgatactacatgctcatcaatattctgtttgccttatctcccccacttccctcagatttctagctgtctcaggacttgtggatatttttgtatattttggagtgtttagtgagataaactatgtaacacacgctctcaatacgtatctgtagaattgagttgtactgcatatcaccatgaaattttacaaaactggagacaaagaggagatccaacaggatttcagagattttaaaaaatcagaaaaagttaaaaaaaaaaaaccagatacaaaatatcaacacagttgcctcaagcctg

SEQ ID NO: 294525 - DNA, 760 bp, Homo sapiens
gatgtcacctggagcgagtagcgcgcggcgtggaacgcgagtcgcgaccccggctcccggcagtggcgcgcactagccctcgcgccgcacgggacacgagggctgggcgggcagcgggatgaggctaaaggttggatttcaaggcgggggctgcttccggaaagacgcgctgtgtttggaaggtggagtgagcgcccggtgggcgagggcacctcattctgcacccctgcgcccgcctcgggaactgcacgcggcacccccacccgcgactcccacgcagacagtagtgcggcctgcagggttcccccggcggacgaggctaatggttcgctccgccccgcccacacagaggccgcccactggctccggctgcgtttcaggactctggaggaagggacttggccttcgccctcagacgctcttaagggtaggcggcgttgtcctcagttctgccccagcactcagacccagactgggtccctgcctccgccctccgccctcggactagtctcttggaagccggcctgtctccgccttcagacctagggagaggtcttaacctctgttctcagactctggaaaaggcttctcaacggcttggcctgacctcagctcctcgcattccctccacatctcaagacaccaacccagggatgcaggacagacacacagacactcagtgagggtcaaatatctttaaataaagtgccaggaacaataaatactgtacaggaagagagtgcacgtgaacgtccagatc

SEQ ID NO: 294526 - DNA, 614 bp, Homo sapiens
ggtggcgactgcagaggtaacagtagctgcagatcctccccatgcatcgtgtagagctgagcctgtccccagccgtgcaccaccccgctcgggcccggccgcgggcagcaccgacggattcgtccctcgctccccaccccaggtccaccccgcagctctgggaaccccgggacaactagacagtgctttgccctgactcctttcccccactctccttcccttgggagttgcagcgcgagagtctccccccagcctggtctgacccatcgcttcccacctccattgatgcccccgcctccaaacctgccaggtgcccacaaccggtccccacccaggctctcccccttttctctaccccttcgttaccatcatcacgcatgcacaccctgggcacccttttctcatcctggccttttcttaaccactagaatttgacctgtgcagctggcagtacctctgcctctctcagggagaactgtggcgatgccgtaaggctggctgggagagtaggagtgttagggagtgcggacgggtcagggtgtagggactttctatccactctatgccaggctttgacttggggccataggagggaaagtgattccagccctcca

SEQ ID NO: 294527 - DNA, 363 bp, Homo sapiens
gcagccaccagtggggcttctctgctgtaaaggagataaaggacatggaaaggaatggctttggagtccaacaggccattgtcctggatttcatgatagactgcagtcctcaagcatttaggacggaagaaatgaacactatcgaggctctttgctcacatcgttatttgtgaagctcatcacaggcaggtaggcgactccgccgtgaacccttcagggaagttcagtgagcctgtggtttccttctatttgtagtaactagcagtgcctggcacatacacatcaatcagtatttggtgatccctatacgtttttattattgcctttatactatttttggagaaaagaaattcccacccgatt

SEQ ID NO: 294528 - DNA, 1607 bp, Homo sapiens
gtgctcagcggcagccactatggaggccgccaggaccgctgtactccgggtgaagcggaagcgcagtgcggagccggcggaggctcttgtgctcgcttgtaaacgcctccggagcgacgcggtcgagtcagcggcacagaagacgtcggaggatttggagagagcggcggagaataatgtcttccacttggtggccactgtgtgctcccaggaggaaccagtccagcctctcctgcgggaagttctgcgcccgtcacgggacagccagcagcgtgtccgccgtaatctccgcgcctcggctcgggaggtccggcaggagggccgctaccgggtgctttccagccgccgatccttggggaccacctcgagcggccaggagtccgagtacacgccggggaacccagaagccgccgggaactcgggctttcagttgttagaccttgtccacgaggagggagaacctgaagccgcctctgcaggctcctgcaaaacatctgacccagatgtgatcctctgcaattctgtagagttgatccgtgagcgattgactgtgtctgaggatggaccaggagtcaggcgccaggaagaacaaaaacacgatgactatgtgtatgacatttactacttggagacggccactccaggctggattgagaacatcctctccgtgcagccctacagccaagaatgggagctggtgaatgatgatcaagaaccagaggacatttacgacgatgaagatgacgagaacagtgagaataactggcgcaatgagtacccagaggaggagagcagtgatggagatgaggattccagaggctctgctgactacaacagcctgagtgaggaggaaagaggcagcagcagacagcggatgtggagcaagtaccctctggatgtgcagaaggagttcggctatgacagcccccacgacctggattcagactgatggtcttgtgatgtccatgaggttctgccacatgcccttgagggctctgagtccagagttaactgccctgctgacatcctgttaggtttcctagcttaacatgtggaaggaaaagcatatcaagcatatcgggcggcaccatcccaccacagtgaaaacttatgttaggggagtgagtcttttccacttacagtaggacccctttgcctcaatcaaaagtgaccctacagtttgaaagaaaaaaaaacgttgaaaaaaggaaggtttctttagctttagcttcttggcccaggaatttttcctggcattcaggttctgtgctgaaaccacaagggagggggaggttcccatttcattagcagtaagcttctgctgtgccataccaccaggctgcctgcctctaggaaaaccctgttccttttgatagaatctaaaaggggtaccagtgggtcccttgtagcaatacagactggatagtaatggccattagggcagaaagtagtctgagcagtgggagattttagttaacagctatttctgcttccaaactctgataacggttgtgaaattactgactgacttcctttggcagtggggccaagaaacaatatatatgaatgtgatacatgtgtttagtaaaatctagctttgaacatgg

SEQ ID NO: 294529 - DNA, 1034 bp, Homo sapiens
gtgctcagcggcagccactatggaggccgccaggaccgctgtactccgggtgaagcggaagcgcagtgcggagccggcggaggctcttgtgctcgcttgtaaacgcctccggagcgacgcggtcgagtcagcggcacagaagacgtcggaggatttggagagagcggcggagaataatgtcttccacttggtggccactgtgtgctcccaggaggaaccagtccagcctctcctgcgggaagttctgcgcccgtcacgggacagccagcagcgtgtccgccgtaatctccgcgcctcggctcgggaggtccggcaggagggccgctaccgggtgctttccagccgccgatccttggggaccacctcgagcggccaggagtccgagtacacgccggggaacccagaagccgccgggaactcgggctttcagttgttagaccttgtccacgaggagggagaacctgaagccgcctctgcaggctcctgcaaaacatctgacccagatgtgatcctctgcaattctgtagagttgatccgtgagcgattgactgtgtctgaggatggaccaggagtcaggcgccaggaagaacaaaaacacgatgactatgtgtatgacatttactacttggagacggccactccaggctggattgagaacatcctctccgtgcagccctacagccaagaatgggagctggtaagggggcccatgagcagacggggcatgaggcatcctaagctcttaatctaatcagaatgctttgcttccctgggctccactcccgaacaacattgtccttagttcttttcctcctgaaaaggaagaatttattctaagtgccttttaggaacctgactttatagtacagggaatttggggaaagatcatcttagattgatcatttttacattaatgaatattttacaaggtttgcaacatcacctttattgttatagctatccattcttaggggggaaatatgtatatggggcttatgataagataaagacgataaaatcagaaattcttaaca

SEQ ID NO: 294530 - DNA, 374 bp, Homo sapiens
tattggtgtctgataacagagaaatgaatcaaacaattgcatattcttttggggaggtttgtcaataacacgttaaaaggagaaaggtacaaaaatatttacaatatgactacaactcttacaacaacaaaaaatcctatacggaggggagaagtgacaaaatactccacggaggggagaagtgacaaaatactccagtgtgaaggaacttggtttagatgataggaaagtgattccttctttaaaaaaaaaagaattctatattcttttttatttattgagcaaggattttgcattacaatcgggaacaaaaacagacctttctgagaagagaaggggctcctgcagtagcctaggaaaatcacatttagaat

SEQ ID NO: 294531 - DNA, 1792 bp, Homo sapiens
gtgctcagcggcagccactatggaggccgccaggaccgctgtactccgggtgaagcggaagcgcagtgcggagccggcggaggctcttgtgctcgcttgtaaacgcctccggagcgacgcggtcgagtcagcggcacagaagacgtcggaggatttggagagagcggcggagaataatgtcttccacttggtggccactgtgtgctcccaggaggaaccagtccagcctctcctgcgggaagttctgcgcccgtcacgggacagccagcagcgtgtccgccgtaatctccgcgcctcggctcgggaggtccggcaggagggccgctaccgggtgctttccagccgccgatccttggggaccacctcgagcggccaggagtccgagtacacgccggggaacccagaagccgccgggaactcgggctttcagttgttagaccttgtccacgaggagggagaacctgaagccgcctctgcaggctcctgcaaaacatctgacccagatgtgatcctctgcaattctgtagagttgatccgtgagcgattgactgtgtctgaggatggaccaggagtcaggcgccaggaagaacaaaaacacgatgactatgtgtatgacatttactacttggagacggccactccaggctggattgagaacatcctctccgtgcagccctacagccaagaatgggagctggtgaatgatgatcaagaaccagaggacatttacgacgatgaagatgacgagaacagtgagaataactggcgcaatgagtacccagaggaggagagcagtgatggagatgaggattccagaggctctgctgactacaacagcctgagtgaggaggaaagaggcagcagcagacagcggatgtggagcaagtaccctctggatgtgcagaaggagttcggctatgacagcccccacgacctggattcagactgatggtcttgtgatgtccatgaggttctgccacatgcccttgagggctctgagtccagagttaactgccctgctgacatcctgttaggtttcctagcttaacatgtggaaggaaaagcatatcaagcatatcgggcggcaccatcccaccacagtgaaaacttatgttaggggagtgagtcttttccacttacagtaggacccctttgcctcaatcaaaagtgaccctacagtttgaaagaaaaaaaaacgttgaaaaaaggaaggtttctttagctttagcttcttggcccaggaatttttcctggcattcaggttctgtgctgaaaccacaagggagggggaggttcccatttcattagcagtaagcttctgctgtgccataccaccaggctgcctgcctctaggaaaaccctgttccttttgatagaatctaaaaggggtaccagtgggtcccttgtagcaatacagactggatagtaatggccattagggcagaaagtagtctgagcagtgggagattttagttaacagctatttctgcttccaaactctgataacggttgtgaaattactgactgacttcctttggcagtggggccaagaaacaatatatatgaatgtgatacatgtgtttagtaaaatctagctttgaacatggaagaaagtaattctttgaaaaccttttaaatctgaatatctaaaacagggagcggtagtgaaatagaaggttcagcattgattataaataccaaggacttaaggcaagggaggaaaaacaaagtaccttctgaacttagctttccactgagtaatgtttactcttcacagcacccaccacaaaaa

SEQ ID NO: 294532 - DNA, 1190 bp, Homo sapiens
gtgctcagcggcagccactatggaggccgccaggaccgctgtactccgggtgaagcggaagcgcagtgcggagccggcggaggctcttgtgctcgcttgtaaacgcctccggagcgacgcggtcgagtcagcggcacagaagacgtcggaggatttggagagagcggcggagaataatgtcttccacttggtggccactgtgtgctcccaggaggaaccagtccagcctctcctgcgggaagttctgcgcccgtcacgggacagccagcagcgtgtccgccgtaatctccgcgcctcggctcgggaggtccggcaggagggccgctaccgggtgctttccagccgccgatccttggggaccacctcgagcggccaggagtccgagtacacgccggggaacccagaagccgccgggaactcgggctttcagttgttagaccttgtccacgaggagggagaacctgaagccgcctctgcaggctcctgcaaaacatctgacccagatgtgatcctctgcaattctgtagagttgatccgtgagcgattgactgtgtctgaggatggaccaggagtcaggcgccaggaagaacaaaaacacgatgactatgtgtatgacatttactacttggagacggccactccaggctggattgagaacatcctctccgtgcagccctacagccaagaatgggagctggtgaatgatgatcaagaaccagaggacatttacgacgatgaagatgacgagaacagtgagaataactggcgcaatgagtacccagaggaggagagcagtgatggagatgaggattccagaggtgggtggcagccccagaccgggagggactggtaggatctgagactgaggtgcaggcatagttgacaggtgcatcttaattgcctttccttctgagcgccagcagcccagccgcaactgagccatgctgtaggagacccaaagaccagtgtttcccagggcctcctgggggtgtaataatccatcaggcctggattcaaatctgtagttgtcattactttgctgtggctcttgggcagttacttcacctcactgagcctcattttctctccaaatgagatggttctgcatgaattttagtggttgagattatgtaaaatatgtagctcattgtctcttcccctgccccagtcaagaaaccaatgaagagaga

SEQ ID NO: 294533 - DNA, 967 bp, Homo sapiens
gtgctcagcggcagccactatggaggccgccaggaccgctgtactccgggtgaagcggaagcgcagtgcggagccggcggaggctcttgtgctcgcttgtaaacgcctccggagcgacgcggtcgagtcagcggcacagaagacgtcggaggatttggagagagcggcggagaataatgtcttccacttggtggccactgtgtgctcccaggaggaaccagtccagcctctcctgcgggaagttctgcgcccgtcacgggacagccagcagcgtgtccgccgtaatctccgcgcctcggctcgggaggtccggcaggagggccgctaccgggtgctttccagccgccgatccttggggaccacctcgagcggccaggagtccgagtacacgccggggaacccagaagccgccgggaactcgggctttcagttgttagaccttgtccacgaggagggagaacctgaagccgcctctgcaggctcctgcaaaacatctgacccagatgtgatcctctgcaattctgtagagttgatccgtgagcgattgactgtgtctgaggatggaccaggagtcaggcgccaggaagaacaaaaacacgatgactatgtgtatgacatttactacttggagacggccactccaggctggattgagaacatcctctccgtgcagccctacagccaagaatgggagctggtgaatgatgatcaagaaccagaggacatttacgacgatgaagatgacgagaacagtgagaataactggcgcaatgagtacccagaggaggagagcagtgatggagatgaggattccagaggtgggtggcagccccagaccgggagggactggtaggatctgagactgaggtgcaggcatagttgacaggtgcatcttaattgcctttccttctctgtcattgagcgccagcagcctggccgcaactggtctttgggtctcctgtcgagc

SEQ ID NO: 294534 - DNA, 3850 bp, Homo sapiens
ctggaggaagagggctccaggcaggggaagcagctagggcagaggccctgaagtgggaccgtgtctggcgcattggaagagcagaaggaagctgatggggctggagcagatcatcaaaatccccgaccagccggacacactgtgcttccagattcgtggagctgccccaccgtacgtctatgctgtggggagaggctctgaggccatggctgcagggctctgtgctggtcagtgcattctgaaggtcaatggcagcaacgtgatgaacgatggtgcccctgaggtcctggagcacttccaggcattccggagtcggcgcgaagaggccctgggcctgtaccagtggatctaccacacccatgaggatgcccaggaagcacgagccagtcaggaggcctccactgaggaccccagtggcgagcaggcccaggaggaagaccaggctgattcagccttcccactgctgtccctgggtccccggctgagcctgtgtgaggacagccccatggtcaccctgactgtggacaacgtgcacctggaacacggcgtggtgtatgagtatgtgagcacggcaggcgtcaggtgccatgtgctggagaagatcgtggagccccgcggctgcttcggcctcaccgccaagatcctcgaggcctttgctgccaatgacagcgtcttcgtggagaactgcaggcggctcatggccctgagcagcgccatcgtgaccatgccccactttgagttccgcaacatctgtgacaccaagctggagagcattggccagaggattgcctgctaccaggagtttgcagcccaactgaagagcagggtcagcccacccttcaaacaagcccccctggagccccacccgctgtgtggcctggacttctgccccaccaattgccacatcaacctcatggaagtgtcctaccccaagaccaccccctcagtgggcaggtccttcagcatccgctttggacgcaaaccctccctcatcggccttgacccggagcaaggccacctgaaccccatgtcgtacacccagcactgcatcaccaccatggctgctccctcctggaagtgcttgcctgctgcagagggtgatccccaaggccagggtctccatgatggcagcttcgggccagccagtgggacccttggtcaggaagaccggggcctcagcttcctactcaagcaggaggaccgtgagatccaggatgcctacctgcagctcttcaccaagctggatgtggccctgaaggagatgaagcaatatgtcacccagatcaacaggctgctgtccaccatcacagagcccacctcgggtgggtcctgcgacgcatccttggctgaggaggcctcctccctgcccctggtcagtgaagagagcgagatggacaggagtgaccatgggggcatcaagaaggtgtgcttcaaggtggccgaggaggaccaggaggactcaggccacgacaccatgagttatcgcgactcctacagcgagtgtaacagcaatcgagactcggtcctgtcctacaccagcgtgagaagtaacagctcctacttgggcagcgacgagatggggtctggagatgagctgccctgtgacatgcggatcccatctgacaagcaggacaagcttcatggctgcctggagcacctctttaaccaggtggactccatcaatgctctcctcaaggggccagtcatgagccgggctttcgaagagaccaagcatttccctatgaaccacagcttacaagagtttaaacagaaagaagagtgtacaatccgtggccggagcctgatccagattagcatccaggaggacccctggaacctccccaactccatcaagaccctggtggacaacattcagagatatgtggaagatgggaagaaccagctgctcctggccttgctgaagtgcacagacacggagctgcagctgcgcagagacgcgatcttctgccaggccctggtggccgccgtgtgcaccttctccgagcagctgctggcggccctgggctaccgctacaacaacaatggcgagtacgaggagagcagccgcgacgccagccgcaagtggctggagcaggtggcggccacgggcgtcctgctgcactgccagtccctgctctcgccagccacagtgaaggaggaacggaccatgctggaggacatctgggtgacgctgtcagagctggacaatgtcaccttctcctttaagcagctggacgagaactatgtggccaacaccaacgtcttctaccacattgagggcagccggcaggcgctgaaggtcatcttctacctcgacagctaccacttctccaagctgccctcccgcctggagggtggggccagcctgaggctgcacacagcgctgttcacgaaagtgctggagaacgtggaggggctgccttctccaggcagccaggccgcggaggatttgcagcaggacatcaacgcgcagtccctggagaaagttcagcagtattaccgcaaactcagggcattttacctggagcggtctaacctgcccacggatgccagcaccacggcggtaaagatagaccagctgatccgccccatcaatgccctggatgagctctgccgcctcatgaagtcctttgtccacccaaagcctggtgctgctgggagtgtgggcgccggcctcatccccatctcctcggagctctgctaccgcctgggggcctgccagatggtcatgtgtggcacaggcatgcagaggagcaccctgagcgtgtccctggagcaggcggccatcttggcacggagccacgggttgctgcccaagtgcatcatgcaggccacggacatcatgcggaagcagggcccaagggtggagattctggccaaaaacctgcgagtcaaggaccagatgccccagggtgctccgcgcctctaccgcctctgccagccgccggtggatggggacctctgaacacccaaatgccccacgctgggccgcggcctctggagctgggatttgggaggacacagcaggcagcgctggccttctccagggatggcccaaggcttccgcagccgcccgttccgggacctgcccagcgtcctccctgcctccttccgggacaagcctggccaccctcgctgtgatgacgagctggctgattggccctgggccggcccattcttcacacgcctgccagaagctggaggggtgctggagacccatagagctgatgggagcagctggtgcctggccttcggctcctgcgtccccagaacccaagggaacgtcatggaggccacatggggccacccggctccctcgggatggctccgcctgcacttttgaaaccccggtttccttcaacgtccacattccaggtgaccacacgtgtctcctcctcctcatcttagcttccaggttcaccctaaccctgtactaacctgcttggtggacttggaaaagacttggctctgtcgggaaaggagagacggggcctccatcacgcctgttaccagaggatccccgagagccacaccagctctggacatcaccgcccctggaactggggccaccagccctgggcacgagatttgctctgactttatttatatggcatgaaatctctggtttattttgggattttttgttgttggtgttgtcaaagtttgttttttctaaagttgtgtgattatatatttgacattttacatttcaaagaaaggtatgttgtctaacaggggaccaacagaaggtagtattgacaactgttcctgcttctactaaaaaaaaaagagcacaaaagaaaaactaaattattgaaaaattaaaaaatgtcattgtttcctgtttgtt

SEQ ID NO: 294535 - DNA, 478 bp, Homo sapiens
gaaacagtagcagtgctttacaatcttgtcatgcgttagtgcctgttgtccattttgcagatgaagaaactgaggctcagagaggtcaggtgatttgccctgtggctcacagccaggacctggtcttcagactccacatcccttgtgggtttggagttctgtagctgtatccccctcttaggaaagtgctggggatggtgtgaggtggggcaggaatgactgatggctgctgcttctacctcctgccaggagatgagctgccctgtgacatgcggatcccatctgacaagcaggacaagcttcatggctgcctggagcacctctttaaccaggtggactccatcaatgctctcctcaaggggccagtcatgagccgggctttcgaagagaccaagcatttccctatgaaccacagcttacaaggtgaggggatagccagtccaaggtgacagcctgcgatggggaagggtgttagaca

SEQ ID NO: 294536 - DNA, 412 bp, Homo sapiens
tgtgtggtgatctagaggatccctcacgccatgtcacaatgtcagcaatgcagccacctgaaccccatgtcgtacacccagcactgcatcaccaccatggctgctccctcctggaagtgcttgcctgctgcagagggtgatccccaaggccagggtctccatgatggcagcttcgggccagccagtgggacccttggtcaggaagaccggggcctcagcttcctactcaagcaggaggaccgtgagatccaggatgcctacctgcagctcttcaccaagctggatgtggccctgaaggagatgaagcaatatgtcacccagatcaacaggtgagcgctggccgggggtgtccggcgtgagcaggggcaggtgttctcaatcctggccttactgacattgtgggtagcatcat

SEQ ID NO: 294537 - DNA, 6558 bp, Homo sapiens
tcgaatcgtaaccgttcgtacgagaatcgctgtcctctccttgcggccgcccgggagtccgagcgccagctgcgcctccgcctctgcgtcctcaacgagatcttgggcaccgagagggactacgtgggcaccttgcgcttcttgcagtcggcattcctgcatcgcatccggcagaacgtggccgactcagtggagaagggcctcacggaggagaatgtcaaggtcctgttctcgaacatcgaagacatcctggaagttcataaggatttcttggccgccttggagtattgtttacacccggagccgcagtctcagcatgaacttgggaatgttttcttaaaattcaaggacaagttctgcgtgtacgaggagtattgcagcaaccatgagaaagccctgaggctgctggtggagctgaacaagatccctaccgtgcgcgccttccttttgagctgcatgcttctgggaggccggaagaccacggacatccctttggaaggctacctgttgtctccgatccagaggatctgcaagtacccgctcctccttaaggagctggccaagaggactcccggcaagcacccagaccaccccgcggtccagagtgccctgcaggccatgaagaccgtttgctccaacatcaatgagaccaagcggcagatggagaagctggaagccctggagcagctgcagtcccacatcgaaggctgggagggttccaacctcacagacatctgcactcagctcctcctgcaagggactttgttaaagatctctgcgggcaacatccaggaaagggccttcttcctcttcgacaaccttctcgtctactgcaagcggaaatccagggtcaccgggagcaagaagtccaccaagaggaccaaatccatcaacggctccctctacatcttcaggggtcgaatcaacactgaagtcatggaggtggagaatgtggaagatgggacagcggattaccatagcaacggctataccgtcaccaacggctggaagatccacaacacggccaagaataagtggtttgtctgcatggccaagacggcagaggagaagcagaagtggctggatgccatcatccgcgagcgggagcagcgcgagagcctgaagctgggcatggagcgtgatgcctacgtcatgattgcggagaagggggagaagctgtaccacatgatgatgaacaagaaggtgaacctcatcaaggaccgccggagaaagctgagcactgtccccaagtgctttcttggcaatgagttcgttgcctggctcctagaaattggtgaaatcagcaagacggaagaaggagtcaacttgggccaagccctgttggagaatggcatcatccaccatgtttccgacaagcaccagttcaagaatgagcaggtgatgtatcgcttccgctacgacgatggcacctacaaggcccgaagtgagctggaggacatcatgtccaagggtgtgaggctttactgccgtcttcacagcctctacaccccggtgatcaaagaccgtgattaccacctgaagacctacaagtcagtgcttcccgggagcaagctggtggactggctgctggctcagggagactgccagactcgggaggaggcagtggcgctcggcgtgggtctgtgcaacaatggcttcatgcaccacgtgctggagaagagcgagttcagggatgagtcccagtacttccgctttcatgctgacgaggagatggaggggaccagcagcaagaacaaacagcttcgcaacgacttcaagctggtggagaacattctggccaagcgcctgctgatcctgccccaggaggaggactatggctttgacatcgaggagaagaacaaggctgtggtggtgaagtccgtccagaggggctcgctggctgaggtggctggcctgcaggtggggaggaagatctactccatcaatgaggacctggtgttcctgcggccgttttcagaggtggagtccatcctcaaccagtccttctgctcccgccgccctctgcgcctcctggtggccacgaaggccaaagagatcatcaaaatccccgaccagccggacacactgtgcttccagattcgtggagctgccccaccgtacgtctatgctgtggggagaggctctgaggccatggctgcagggctctgtgctggtcagtgcattctgaaggtcaatggcagcaacgtgatgaacgatggtgcccctgaggtcctggagcacttccaggcattccggagtcggcgcgaagaggccctgggcctgtaccagtggatctaccacacccatgaggatgcccaggaagcacgagccagtcaggaggcctccactgaggaccccagtggcgagcaggcccaggaggaagaccaggctgattcagccttcccactgctgtccctgggtccccggctgagcctgtgtgaggacagccccatggtcaccctgactgtggacaacgtgcacctggaacacggcgtggtgtatgagtatgtgagcacggcaggcgtcaggtgccatgtgctggagaagatcgtggagccccgcggctgcttcggcctcaccgccaagatcctcgaggcctttgctgccaatgacagcgtcttcgtggagaactgcaggcggctcatggccctgagcagcgccatcgtgaccatgccccactttgagttccgcaacatctgtgacaccaagctggagagcattggccagaggattgcctgctaccaggagtttgcagcccaactgaagagcagggtcagcccacccttcaaacaagcccccctggagccccacccgctgtgtggcctggacttctgccccaccaattgccacatcaacctcatggaagtgtcctaccccaagaccaccccctcagtgggcaggtccttcagcatccgctttggacgcaaaccctccctcatcggccttgacccggagcaaggccacctgaaccccatgtcgtacacccagcactgcatcaccaccatggctgctccctcctggaagtgcttgcctgctgcagagggtgatccccaaggccagggtctccatgatggcagcttcgggccagccagtgggacccttggtcaggaagaccggggcctcagcttcctactcaagcaggaggaccgtgagatccaggatgcctacctgcagctcttcaccaagctggatgtggccctgaaggagatgaagcaatatgtcacccagatcaacaggctgctgtccaccatcacagagcccacctcgggtgggtcctgcgacgcatccttggctgaggaggcctcctccctgcccctggtcagtgaagagagcgagatggacaggagtgaccatgggggcatcaagaaggtgtgcttcaaggtggccgaggaggaccaggaggactcaggccacgacaccatgagttatcgcgactcctacagcgagtgtaacagcaatcgagactcggtcctgtcctacaccagcgtgagaagtaacagctcctacttgggcagcgacgagatggggtctggagatgagctgccctgtgacatgcggatcccatctgacaagcaggacaagcttcatggctgcctggagcacctctttaaccaggtggactccatcaatgctctcctcaaggggccagtcatgagccgggctttcgaagagaccaagcatttccctatgaaccacagcttacaagagtttaaacagaaagaagagtgtacaatccgtggccggagcctgatccagattagcatccaggaggacccctggaacctccccaactccatcaagaccctggtggacaacattcagagatatgtggaagatgggaagaaccagctgctcctggccttgctgaagtgcacagacacggagctgcagctgcgcagagacgcgatcttctgccaggccctggtggccgccgtgtgcaccttctccgagcagctgctggcggccctgggctaccgctacaacaacaatggcgagtacgaggagagcagccgcgacgccagccgcaagtggctggagcaggtggcggccacgggcgtcctgctgcactgccagtccctgctctcgccagccacagtgaaggaggaacggaccatgctggaggacatctgggtgacgctgtcagagctggacaatgtcaccttctcctttaagcagctggacgagaactatgtggccaacaccaacgtcttctaccacattgagggcagccggcaggcgctgaaggtcatcttctacctcgacagctaccacttctccaagctgccctcccgcctggagggtggggccagcctgaggctgcacacagcgctgttcacgaaagtgctggagaacgtggaggggctgccttctccaggcagccaggccgcggaggatttgcagcaggacatcaacgcgcagtccctggagaaagttcagcagtattaccgcaaactcagggcattttacctggagcggtctaacctgcccacggatgccagcaccacggcggtaaagatagaccagctgatccgccccatcaatgccctggatgagctctgccgcctcatgaagtcctttgtccacccaaagcctggtgctgctgggagtgtgggcgccggcctcatccccatctcctcggagctctgctaccgcctgggggcctgccagatggtcatgtgtggcacaggcatgcagaggagcaccctgagcgtgtccctggagcaggcggccatcttggcacggagccacgggttgctgcccaagtgcatcatgcaggccacggacatcatgcggaagcagggcccaagggtggagattctggccaaaaacctgcgagtcaaggaccagatgccccagggtgctccgcgcctctaccgcctctgccagccgccggtggatggggacctctgaacacccaaatgccccacgctgggccgcggcctctggagctgggatttgggaggacacagcaggcagcgctggccttctccagggatggcccaaggcttccgcagccgcccgttccgggacctgcccagcgtcctccctgcctccttccgggacaagcctggccaccctcgctgtgatgacgagctggctgattggccctgggccggcccattcttcacacgcctgccagaagctggaggggtgctggagacccatagagctgatgggagcagctggtgcctggccttcggctcctgcgtccccagaacccaagggaacgtcatggaggccacatggggccacccggctccctcgggatggctccgcctgcacttttgaaaccccggtttccttcaacgtccacattccaggtgaccacacgtgtctcctcctcctcatcttagcttccaggttcaccctaaccctgtactaacctgcttggtggacttggaaaagacttggctctgtcgggaaaggagagacggggcctccatcacgcctgttaccagaggatccccgagagccacaccagctctggacatcaccgcccctggaactggggccaccagccctgggcacgagatttgctctgactttatttatatggcatgaaatctctggtttattttgggattttttgttgttggtgttgtcaaagtttgttttttctaaagttgtgtgattatatatttgacattttacatttcaaagaaaggtatgttgtctaacaggggaccaacagaaggtagtattgacaactgttcctgcttctactaaaaaaaaaagagcacaaaagaaaaactaaattattgaaaaattaaaaaatgtcattgtttcctgtttgttaatattagggttgtaaggtgtcgttttgaggtatcgactgtgattccttcccccaccctccattctccagcggttggccggtgttagaactcgctctctttgagtgactggctacaagggcctgagaggtggccagccagggttggagctggaggggatggagccccacctgaggtgccgtgtcacacgggttagagggtcactgggaaacaccgggcggtggcttctgtgatttattttcttgatggtaacttctcagagcagggcgattgggacatcaccagccagagcacaggaagccaccctgcctgctggggaggagggacccacacaagccccctcggcagtttgtccccccagcttcggtatgccttcagggaaaggtcacagctggggaggaagcggggggacgcctgtcacccctggcaggtggtgagttcaggtgggggctccctgctgcccccaggcctgggagcttgaagccctcccggcatctggcatccgagcctcccgccctccagggtgcgcttccctctcttgccgcagcatacacgagggcaggcagtggccttgtcactgtatcttgcatcagagacaaaggaggacccgctttagccctgctgcgggaaatgggggagggcccagggccagcgcattgtgcactggtttactttaaaatgtacagattcttctcgttaaattcttgatagattttttattattattaaaagtcagtttataatacaaagaaaaaaaatgtga

SEQ ID NO: 294538 - DNA, 6486 bp, Homo sapiens
tcgaatcgtaaccgttcgtacgagaatcgctgtcctctccttgcggccgcccgggagtccgagcgccagctgcgcctccgcctctgcgtcctcaacgagatcttgggcaccgagagggactacgtgggcaccttgcgcttcttgcagtcggtcctgttctcgaacatcgaagacatcctggaagttcataaggatttcttggccgccttggagtattgtttacacccggagccgcagtctcagcatgaacttgggaatgttttcttaaaattcaaggacaagttctgcgtgtacgaggagtattgcagcaaccatgagaaagccctgaggctgctggtggagctgaacaagatccctaccgtgcgcgccttccttttgagctgcatgcttctgggaggccggaagaccacggacatccctttggaaggctacctgttgtctccgatccagaggatctgcaagtacccgctcctccttaaggagctggccaagaggactcccggcaagcacccagaccaccccgcggtccagagtgccctgcaggccatgaagaccgtttgctccaacatcaatgagaccaagcggcagatggagaagctggaagccctggagcagctgcagtcccacatcgaaggctgggagggttccaacctcacagacatctgcactcagctcctcctgcaagggactttgttaaagatctctgcgggcaacatccaggaaagggccttcttcctcttcgacaaccttctcgtctactgcaagcggaaatccagggtcaccgggagcaagaagtccaccaagaggaccaaatccatcaacggctccctctacatcttcaggggtcgaatcaacactgaagtcatggaggtggagaatgtggaagatgggacagcggattaccatagcaacggctataccgtcaccaacggctggaagatccacaacacggccaagaataagtggtttgtctgcatggccaagacggcagaggagaagcagaagtggctggatgccatcatccgcgagcgggagcagcgcgagagcctgaagctgggcatggagcgtgatgcctacgtcatgattgcggagaagggggagaagctgtaccacatgatgatgaacaagaaggtgaacctcatcaaggaccgccggagaaagctgagcactgtccccaagtgctttcttggcaatgagttcgttgcctggctcctagaaattggtgaaatcagcaagacggaagaaggagtcaacttgggccaagccctgttggagaatggcatcatccaccatgtttccgacaagcaccagttcaagaatgagcaggtgatgtatcgcttccgctacgacgatggcacctacaaggcccgaagtgagctggaggacatcatgtccaagggtgtgaggctttactgccgtcttcacagcctctacaccccggtgatcaaagaccgtgattaccacctgaagacctacaagtcagtgcttcccgggagcaagctggtggactggctgctggctcagggagactgccagactcgggaggaggcagtggcgctcggcgtgggtctgtgcaacaatggcttcatgcaccacgtgctggagaagagcgagttcagggatgagtcccagtacttccgctttcatgctgacgaggagatggaggggaccagcagcaagaacaaacagcttcgcaacgacttcaagctggtggagaacattctggccaagcgcctgctgatcctgccccaggaggaggactatggctttgacatcgaggagaagaacaaggctgtggtggtgaagtccgtccagaggggctcgctggctgaggtggctggcctgcaggtggggaggaagatctactccatcaatgaggacctggtgttcctgcggccgttttcagaggtggagtccatcctcaaccagtccttctgctcccgccgccctctgcgcctcctggtggccacgaaggccaaagagatcatcaaaatccccgaccagccggacacactgtgcttccagattcgtggagctgccccaccgtacgtctatgctgtggggagaggctctgaggccatggctgcagggctctgtgctggtcagtgcattctgaaggtcaatggcagcaacgtgatgaacgatggtgcccctgaggtcctggagcacttccaggcattccggagtcggcgcgaagaggccctgggcctgtaccagtggatctaccacacccatgaggatgcccaggaagcacgagccagtcaggaggcctccactgaggaccccagtggcgagcaggcccaggaggaagaccaggctgattcagccttcccactgctgtccctgggtccccggctgagcctgtgtgaggacagccccatggtcaccctgactgtggacaacgtgcacctggaacacggcgtggtgtatgagtatgtgagcacggcaggcgtcaggtgccatgtgctggagaagatcgtggagccccgcggctgcttcggcctcaccgccaagatcctcgaggcctttgctgccaatgacagcgtcttcgtggagaactgcaggcggctcatggccctgagcagcgccatcgtgaccatgccccactttgagttccgcaacatctgtgacaccaagctggagagcattggccagaggattgcctgctaccaggagtttgcagcccaactgaagagcagggtcagcccacccttcaaacaagcccccctggagccccacccgctgtgtggcctggacttctgccccaccaattgccacatcaacctcatggaagtgtcctaccccaagaccaccccctcagtgggcaggtccttcagcatccgctttggacgcaaaccctccctcatcggccttgacccggagcaaggccacctgaaccccatgtcgtacacccagcactgcatcaccaccatggctgctccctcctggaagtgcttgcctgctgcagagggtgatccccaaggccagggtctccatgatggcagcttcgggccagccagtgggacccttggtcaggaagaccggggcctcagcttcctactcaagcaggaggaccgtgagatccaggatgcctacctgcagctcttcaccaagctggatgtggccctgaaggagatgaagcaatatgtcacccagatcaacaggctgctgtccaccatcacagagcccacctcgggtgggtcctgcgacgcatccttggctgaggaggcctcctccctgcccctggtcagtgaagagagcgagatggacaggagtgaccatgggggcatcaagaaggtgtgcttcaaggtggccgaggaggaccaggaggactcaggccacgacaccatgagttatcgcgactcctacagcgagtgtaacagcaatcgagactcggtcctgtcctacaccagcgtgagaagtaacagctcctacttgggcagcgacgagatggggtctggagatgagctgccctgtgacatgcggatcccatctgacaagcaggacaagcttcatggctgcctggagcacctctttaaccaggtggactccatcaatgctctcctcaaggggccagtcatgagccgggctttcgaagagaccaagcatttccctatgaaccacagcttacaagagtttaaacagaaagaagagtgtacaatccgtggccggagcctgatccagattagcatccaggaggacccctggaacctccccaactccatcaagaccctggtggacaacattcagagatatgtggaagatgggaagaaccagctgctcctggccttgctgaagtgcacagacacggagctgcagctgcgcagagacgcgatcttctgccaggccctggtggccgccgtgtgcaccttctccgagcagctgctggcggccctgggctaccgctacaacaacaatggcgagtacgaggagagcagccgcgacgccagccgcaagtggctggagcaggtggcggccacgggcgtcctgctgcactgccagtccctgctctcgccagccacagtgaaggaggaacggaccatgctggaggacatctgggtgacgctgtcagagctggacaatgtcaccttctcctttaagcagctggacgagaactatgtggccaacaccaacgtcttctaccacattgagggcagccggcaggcgctgaaggtcatcttctacctcgacagctaccacttctccaagctgccctcccgcctggagggtggggccagcctgaggctgcacacagcgctgttcacgaaagtgctggagaacgtggaggggctgccttctccaggcagccaggccgcggaggatttgcagcaggacatcaacgcgcagtccctggagaaagttcagcagtattaccgcaaactcagggcattttacctggagcggtctaacctgcccacggatgccagcaccacggcggtaaagatagaccagctgatccgccccatcaatgccctggatgagctctgccgcctcatgaagtcctttgtccacccaaagcctggtgctgctgggagtgtgggcgccggcctcatccccatctcctcggagctctgctaccgcctgggggcctgccagatggtcatgtgtggcacaggcatgcagaggagcaccctgagcgtgtccctggagcaggcggccatcttggcacggagccacgggttgctgcccaagtgcatcatgcaggccacggacatcatgcggaagcagggcccaagggtggagattctggccaaaaacctgcgagtcaaggaccagatgccccagggtgctccgcgcctctaccgcctctgccagccgccggtggatggggacctctgaacacccaaatgccccacgctgggccgcggcctctggagctgggatttgggaggacacagcaggcagcgctggccttctccagggatggcccaaggcttccgcagccgcccgttccgggacctgcccagcgtcctccctgcctccttccgggacaagcctggccaccctcgctgtgatgacgagctggctgattggccctgggccggcccattcttcacacgcctgccagaagctggaggggtgctggagacccatagagctgatgggagcagctggtgcctggccttcggctcctgcgtccccagaacccaagggaacgtcatggaggccacatggggccacccggctccctcgggatggctccgcctgcacttttgaaaccccggtttccttcaacgtccacattccaggtgaccacacgtgtctcctcctcctcatcttagcttccaggttcaccctaaccctgtactaacctgcttggtggacttggaaaagacttggctctgtcgggaaaggagagacggggcctccatcacgcctgttaccagaggatccccgagagccacaccagctctggacatcaccgcccctggaactggggccaccagccctgggcacgagatttgctctgactttatttatatggcatgaaatctctggtttattttgggattttttgttgttggtgttgtcaaagtttgttttttctaaagttgtgtgattatatatttgacattttacatttcaaagaaaggtatgttgtctaacaggggaccaacagaaggtagtattgacaactgttcctgcttctactaaaaaaaaaagagcacaaaagaaaaactaaattattgaaaaattaaaaaatgtcattgtttcctgtttgttaatattagggttgtaaggtgtcgttttgaggtatcgactgtgattccttcccccaccctccattctccagcggttggccggtgttagaactcgctctctttgagtgactggctacaagggcctgagaggtggccagccagggttggagctggaggggatggagccccacctgaggtgccgtgtcacacgggttagagggtcactgggaaacaccgggcggtggcttctgtgatttattttcttgatggtaacttctcagagcagggcgattgggacatcaccagccagagcacaggaagccaccctgcctgctggggaggagggacccacacaagccccctcggcagtttgtccccccagcttcggtatgccttcagggaaaggtcacagctggggaggaagcggggggacgcctgtcacccctggcaggtggtgagttcaggtgggggctccctgctgcccccaggcctgggagcttgaagccctcccggcatctggcatccgagcctcccgccctccagggtgcgcttccctctcttgccgcagcatacacgagggcaggcagtggccttgtcactgtatcttgcatcagagacaaaggaggacccgctttagccctgctgcgggaaatgggggagggcccagggccagcgcattgtgcactggtttactttaaaatgtacagattcttctcgttaaattcttgatagattttttattattattaaaagtcagtttataatacaaagaaaaaaaatgtga

SEQ ID NO: 294539 - DNA, 6622 bp, Homo sapiens
  misc_feature (56)..(56): n is a, c, g, or t
atagggctcaagcgcccgcccgggcaggtccaccatgtaagaagtgcttttcgccntgcacaatgattctgagaaattccccagacatgggaactatattgatggagcagccactctatgctggacactgggaatctagcagtgaacaaaacaaattccctgccccagctgagctaacatcctaggcagggaatcaaacaatacggcctgggtggcattcctgcatcgcatccggcagaacgtggccgactcagtggagaagggcctcacggaggagaatgtcaaggtcctgttctcgaacatcgaagacatcctggaagttcataaggatttcttggccgccttggagtattgtttacacccggagccgcagtctcagcatgaacttgggaatgttttcttaaaattcaaggacaagttctgcgtgtacgaggagtattgcagcaaccatgagaaagccctgaggctgctggtggagctgaacaagatccctaccgtgcgcgccttccttttgagctgcatgcttctgggaggccggaagaccacggacatccctttggaaggctacctgttgtctccgatccagaggatctgcaagtacccgctcctccttaaggagctggccaagaggactcccggcaagcacccagaccaccccgcggtccagagtgccctgcaggccatgaagaccgtttgctccaacatcaatgagaccaagcggcagatggagaagctggaagccctggagcagctgcagtcccacatcgaaggctgggagggttccaacctcacagacatctgcactcagctcctcctgcaagggactttgttaaagatctctgcgggcaacatccaggaaagggccttcttcctcttcgacaaccttctcgtctactgcaagcggaaatccagggtcaccgggagcaagaagtccaccaagaggaccaaatccatcaacggctccctctacatcttcaggggtcgaatcaacactgaagtcatggaggtggagaatgtggaagatgggacagcggattaccatagcaacggctataccgtcaccaacggctggaagatccacaacacggccaagaataagtggtttgtctgcatggccaagacggcagaggagaagcagaagtggctggatgccatcatccgcgagcgggagcagcgcgagagcctgaagctgggcatggagcgtgatgcctacgtcatgattgcggagaagggggagaagctgtaccacatgatgatgaacaagaaggtgaacctcatcaaggaccgccggagaaagctgagcactgtccccaagtgctttcttggcaatgagttcgttgcctggctcctagaaattggtgaaatcagcaagacggaagaaggagtcaacttgggccaagccctgttggagaatggcatcatccaccatgtttccgacaagcaccagttcaagaatgagcaggtgatgtatcgcttccgctacgacgatggcacctacaaggcccgaagtgagctggaggacatcatgtccaagggtgtgaggctttactgccgtcttcacagcctctacaccccggtgatcaaagaccgtgattaccacctgaagacctacaagtcagtgcttcccgggagcaagctggtggactggctgctggctcagggagactgccagactcgggaggaggcagtggcgctcggcgtgggtctgtgcaacaatggcttcatgcaccacgtgctggagaagagcgagttcagggatgagtcccagtacttccgctttcatgctgacgaggagatggaggggaccagcagcaagaacaaacagcttcgcaacgacttcaagctggtggagaacattctggccaagcgcctgctgatcctgccccaggaggaggactatggctttgacatcgaggagaagaacaaggctgtggtggtgaagtccgtccagaggggctcgctggctgaggtggctggcctgcaggtggggaggaagatctactccatcaatgaggacctggtgttcctgcggccgttttcagaggtggagtccatcctcaaccagtccttctgctcccgccgccctctgcgcctcctggtggccacgaaggccaaagagatcatcaaaatccccgaccagccggacacactgtgcttccagattcgtggagctgccccaccgtacgtctatgctgtggggagaggctctgaggccatggctgcagggctctgtgctggtcagtgcattctgaaggtcaatggcagcaacgtgatgaacgatggtgcccctgaggtcctggagcacttccaggcattccggagtcggcgcgaagaggccctgggcctgtaccagtggatctaccacacccatgaggatgcccaggaagcacgagccagtcaggaggcctccactgaggaccccagtggcgagcaggcccaggaggaagaccaggctgattcagccttcccactgctgtccctgggtccccggctgagcctgtgtgaggacagccccatggtcaccctgactgtggacaacgtgcacctggaacacggcgtggtgtatgagtatgtgagcacggcaggcgtcaggtgccatgtgctggagaagatcgtggagccccgcggctgcttcggcctcaccgccaagatcctcgaggcctttgctgccaatgacagcgtcttcgtggagaactgcaggcggctcatggccctgagcagcgccatcgtgaccatgccccactttgagttccgcaacatctgtgacaccaagctggagagcattggccagaggattgcctgctaccaggagtttgcagcccaactgaagagcagggtcagcccacccttcaaacaagcccccctggagccccacccgctgtgtggcctggacttctgccccaccaattgccacatcaacctcatggaagtgtcctaccccaagaccaccccctcagtgggcaggtccttcagcatccgctttggacgcaaaccctccctcatcggccttgacccggagcaaggccacctgaaccccatgtcgtacacccagcactgcatcaccaccatggctgctccctcctggaagtgcttgcctgctgcagagggtgatccccaaggccagggtctccatgatggcagcttcgggccagccagtgggacccttggtcaggaagaccggggcctcagcttcctactcaagcaggaggaccgtgagatccaggatgcctacctgcagctcttcaccaagctggatgtggccctgaaggagatgaagcaatatgtcacccagatcaacaggctgctgtccaccatcacagagcccacctcgggtgggtcctgcgacgcatccttggctgaggaggcctcctccctgcccctggtcagtgaagagagcgagatggacaggagtgaccatgggggcatcaagaaggtgtgcttcaaggtggccgaggaggaccaggaggactcaggccacgacaccatgagttatcgcgactcctacagcgagtgtaacagcaatcgagactcggtcctgtcctacaccagcgtgagaagtaacagctcctacttgggcagcgacgagatggggtctggagatgagctgccctgtgacatgcggatcccatctgacaagcaggacaagcttcatggctgcctggagcacctctttaaccaggtggactccatcaatgctctcctcaaggggccagtcatgagccgggctttcgaagagaccaagcatttccctatgaaccacagcttacaagagtttaaacagaaagaagagtgtacaatccgtggccggagcctgatccagattagcatccaggaggacccctggaacctccccaactccatcaagaccctggtggacaacattcagagatatgtggaagatgggaagaaccagctgctcctggccttgctgaagtgcacagacacggagctgcagctgcgcagagacgcgatcttctgccaggccctggtggccgccgtgtgcaccttctccgagcagctgctggcggccctgggctaccgctacaacaacaatggcgagtacgaggagagcagccgcgacgccagccgcaagtggctggagcaggtggcggccacgggcgtcctgctgcactgccagtccctgctctcgccagccacagtgaaggaggaacggaccatgctggaggacatctgggtgacgctgtcagagctggacaatgtcaccttctcctttaagcagctggacgagaactatgtggccaacaccaacgtcttctaccacattgagggcagccggcaggcgctgaaggtcatcttctacctcgacagctaccacttctccaagctgccctcccgcctggagggtggggccagcctgaggctgcacacagcgctgttcacgaaagtgctggagaacgtggaggggctgccttctccaggcagccaggccgcggaggatttgcagcaggacatcaacgcgcagtccctggagaaagttcagcagtattaccgcaaactcagggcattttacctggagcggtctaacctgcccacggatgccagcaccacggcggtaaagatagaccagctgatccgccccatcaatgccctggatgagctctgccgcctcatgaagtcctttgtccacccaaagcctggtgctgctgggagtgtgggcgccggcctcatccccatctcctcggagctctgctaccgcctgggggcctgccagatggtcatgtgtggcacaggcatgcagaggagcaccctgagcgtgtccctggagcaggcggccatcttggcacggagccacgggttgctgcccaagtgcatcatgcaggccacggacatcatgcggaagcagggcccaagggtggagattctggccaaaaacctgcgagtcaaggaccagatgccccagggtgctccgcgcctctaccgcctctgccagccgccggtggatggggacctctgaacacccaaatgccccacgctgggccgcggcctctggagctgggatttgggaggacacagcaggcagcgctggccttctccagggatggcccaaggcttccgcagccgcccgttccgggacctgcccagcgtcctccctgcctccttccgggacaagcctggccaccctcgctgtgatgacgagctggctgattggccctgggccggcccattcttcacacgcctgccagaagctggaggggtgctggagacccatagagctgatgggagcagctggtgcctggccttcggctcctgcgtccccagaacccaagggaacgtcatggaggccacatggggccacccggctccctcgggatggctccgcctgcacttttgaaaccccggtttccttcaacgtccacattccaggtgaccacacgtgtctcctcctcctcatcttagcttccaggttcaccctaaccctgtactaacctgcttggtggacttggaaaagacttggctctgtcgggaaaggagagacggggcctccatcacgcctgttaccagaggatccccgagagccacaccagctctggacatcaccgcccctggaactggggccaccagccctgggcacgagatttgctctgactttatttatatggcatgaaatctctggtttattttgggattttttgttgttggtgttgtcaaagtttgttttttctaaagttgtgtgattatatatttgacattttacatttcaaagaaaggtatgttgtctaacaggggaccaacagaaggtagtattgacaactgttcctgcttctactaaaaaaaaaagagcacaaaagaaaaactaaattattgaaaaattaaaaaatgtcattgtttcctgtttgttaatattagggttgtaaggtgtcgttttgaggtatcgactgtgattccttcccccaccctccattctccagcggttggccggtgttagaactcgctctctttgagtgactggctacaagggcctgagaggtggccagccagggttggagctggaggggatggagccccacctgaggtgccgtgtcacacgggttagagggtcactgggaaacaccgggcggtggcttctgtgatttattttcttgatggtaacttctcagagcagggcgattgggacatcaccagccagagcacaggaagccaccctgcctgctggggaggagggacccacacaagccccctcggcagtttgtccccccagcttcggtatgccttcagggaaaggtcacagctggggaggaagcggggggacgcctgtcacccctggcaggtggtgagttcaggtgggggctccctgctgcccccaggcctgggagcttgaagccctcccggcatctggcatccgagcctcccgccctccagggtgcgcttccctctcttgccgcagcatacacgagggcaggcagtggccttgtcactgtatcttgcatcagagacaaaggaggacccgctttagccctgctgcgggaaatgggggagggcccagggccagcgcattgtgcactggtttactttaaaatgtacagattcttctcgttaaattcttgatagattttttattattattaaaagtcagtttataatacaaagaaaaaaaatgtga

SEQ ID NO: 294540 - DNA, 6428 bp, Homo sapiens
actcactatagggctcgatcggtactcctatagggctcgatcgccgaccggtcaagtgtcagtgcagacaggcctcacggaggagaatgtcagtcctgttctcgaacatcgaagacatcctggaagttcataaggatttcttggccgccttggagtattgtttacacccggagccgcagtctcagcatgaacttgggaatgttttcttaaaattcaaggacaagttctgcgtgtacgaggagtattgcagcaaccatgagaaagccctgaggctgctggtggagctgaacaagatccctaccgtgcgcgccttccttttgagctgcatgcttctgggaggccggaagaccacggacatccctttggaaggctacctgttgtctccgatccagaggatctgcaagtacccgctcctccttaaggagctggccaagaggactcccggcaagcacccagaccaccccgcggtccagagtgccctgcaggccatgaagaccgtttgctccaacatcaatgagaccaagcggcagatggagaagctggaagccctggagcagctgcagtcccacatcgaaggctgggagggttccaacctcacagacatctgcactcagctcctcctgcaagggactttgttaaagatctctgcgggcaacatccaggaaagggccttcttcctcttcgacaaccttctcgtctactgcaagcggaaatccagggtcaccgggagcaagaagtccaccaagaggaccaaatccatcaacggctccctctacatcttcaggggtcgaatcaacactgaagtcatggaggtggagaatgtggaagatgggacagcggattaccatagcaacggctataccgtcaccaacggctggaagatccacaacacggccaagaataagtggtttgtctgcatggccaagacggcagaggagaagcagaagtggctggatgccatcatccgcgagcgggagcagcgcgagagcctgaagctgggcatggagcgtgatgcctacgtcatgattgcggagaagggggagaagctgtaccacatgatgatgaacaagaaggtgaacctcatcaaggaccgccggagaaagctgagcactgtccccaagtgctttcttggcaatgagttcgttgcctggctcctagaaattggtgaaatcagcaagacggaagaaggagtcaacttgggccaagccctgttggagaatggcatcatccaccatgtttccgacaagcaccagttcaagaatgagcaggtgatgtatcgcttccgctacgacgatggcacctacaaggcccgaagtgagctggaggacatcatgtccaagggtgtgaggctttactgccgtcttcacagcctctacaccccggtgatcaaagaccgtgattaccacctgaagacctacaagtcagtgcttcccgggagcaagctggtggactggctgctggctcagggagactgccagactcgggaggaggcagtggcgctcggcgtgggtctgtgcaacaatggcttcatgcaccacgtgctggagaagagcgagttcagggatgagtcccagtacttccgctttcatgctgacgaggagatggaggggaccagcagcaagaacaaacagcttcgcaacgacttcaagctggtggagaacattctggccaagcgcctgctgatcctgccccaggaggaggactatggctttgacatcgaggagaagaacaaggctgtggtggtgaagtccgtccagaggggctcgctggctgaggtggctggcctgcaggtggggaggaagatctactccatcaatgaggacctggtgttcctgcggccgttttcagaggtggagtccatcctcaaccagtccttctgctcccgccgccctctgcgcctcctggtggccacgaaggccaaagagatcatcaaaatccccgaccagccggacacactgtgcttccagattcgtggagctgccccaccgtacgtctatgctgtggggagaggctctgaggccatggctgcagggctctgtgctggtcagtgcattctgaaggtcaatggcagcaacgtgatgaacgatggtgcccctgaggtcctggagcacttccaggcattccggagtcggcgcgaagaggccctgggcctgtaccagtggatctaccacacccatgaggatgcccaggaagcacgagccagtcaggaggcctccactgaggaccccagtggcgagcaggcccaggaggaagaccaggctgattcagccttcccactgctgtccctgggtccccggctgagcctgtgtgaggacagccccatggtcaccctgactgtggacaacgtgcacctggaacacggcgtggtgtatgagtatgtgagcacggcaggcgtcaggtgccatgtgctggagaagatcgtggagccccgcggctgcttcggcctcaccgccaagatcctcgaggcctttgctgccaatgacagcgtcttcgtggagaactgcaggcggctcatggccctgagcagcgccatcgtgaccatgccccactttgagttccgcaacatctgtgacaccaagctggagagcattggccagaggattgcctgctaccaggagtttgcagcccaactgaagagcagggtcagcccacccttcaaacaagcccccctggagccccacccgctgtgtggcctggacttctgccccaccaattgccacatcaacctcatggaagtgtcctaccccaagaccaccccctcagtgggcaggtccttcagcatccgctttggacgcaaaccctccctcatcggccttgacccggagcaaggccacctgaaccccatgtcgtacacccagcactgcatcaccaccatggctgctccctcctggaagtgcttgcctgctgcagagggtgatccccaaggccagggtctccatgatggcagcttcgggccagccagtgggacccttggtcaggaagaccggggcctcagcttcctactcaagcaggaggaccgtgagatccaggatgcctacctgcagctcttcaccaagctggatgtggccctgaaggagatgaagcaatatgtcacccagatcaacaggctgctgtccaccatcacagagcccacctcgggtgggtcctgcgacgcatccttggctgaggaggcctcctccctgcccctggtcagtgaagagagcgagatggacaggagtgaccatgggggcatcaagaaggtgtgcttcaaggtggccgaggaggaccaggaggactcaggccacgacaccatgagttatcgcgactcctacagcgagtgtaacagcaatcgagactcggtcctgtcctacaccagcgtgagaagtaacagctcctacttgggcagcgacgagatggggtctggagatgagctgccctgtgacatgcggatcccatctgacaagcaggacaagcttcatggctgcctggagcacctctttaaccaggtggactccatcaatgctctcctcaaggggccagtcatgagccgggctttcgaagagaccaagcatttccctatgaaccacagcttacaagagtttaaacagaaagaagagtgtacaatccgtggccggagcctgatccagattagcatccaggaggacccctggaacctccccaactccatcaagaccctggtggacaacattcagagatatgtggaagatgggaagaaccagctgctcctggccttgctgaagtgcacagacacggagctgcagctgcgcagagacgcgatcttctgccaggccctggtggccgccgtgtgcaccttctccgagcagctgctggcggccctgggctaccgctacaacaacaatggcgagtacgaggagagcagccgcgacgccagccgcaagtggctggagcaggtggcggccacgggcgtcctgctgcactgccagtccctgctctcgccagccacagtgaaggaggaacggaccatgctggaggacatctgggtgacgctgtcagagctggacaatgtcaccttctcctttaagcagctggacgagaactatgtggccaacaccaacgtcttctaccacattgagggcagccggcaggcgctgaaggtcatcttctacctcgacagctaccacttctccaagctgccctcccgcctggagggtggggccagcctgaggctgcacacagcgctgttcacgaaagtgctggagaacgtggaggggctgccttctccaggcagccaggccgcggaggatttgcagcaggacatcaacgcgcagtccctggagaaagttcagcagtattaccgcaaactcagggcattttacctggagcggtctaacctgcccacggatgccagcaccacggcggtaaagatagaccagctgatccgccccatcaatgccctggatgagctctgccgcctcatgaagtcctttgtccacccaaagcctggtgctgctgggagtgtgggcgccggcctcatccccatctcctcggagctctgctaccgcctgggggcctgccagatggtcatgtgtggcacaggcatgcagaggagcaccctgagcgtgtccctggagcaggcggccatcttggcacggagccacgggttgctgcccaagtgcatcatgcaggccacggacatcatgcggaagcagggcccaagggtggagattctggccaaaaacctgcgagtcaaggaccagatgccccagggtgctccgcgcctctaccgcctctgccagccgccggtggatggggacctctgaacacccaaatgccccacgctgggccgcggcctctggagctgggatttgggaggacacagcaggcagcgctggccttctccagggatggcccaaggcttccgcagccgcccgttccgggacctgcccagcgtcctccctgcctccttccgggacaagcctggccaccctcgctgtgatgacgagctggctgattggccctgggccggcccattcttcacacgcctgccagaagctggaggggtgctggagacccatagagctgatgggagcagctggtgcctggccttcggctcctgcgtccccagaacccaagggaacgtcatggaggccacatggggccacccggctccctcgggatggctccgcctgcacttttgaaaccccggtttccttcaacgtccacattccaggtgaccacacgtgtctcctcctcctcatcttagcttccaggttcaccctaaccctgtactaacctgcttggtggacttggaaaagacttggctctgtcgggaaaggagagacggggcctccatcacgcctgttaccagaggatccccgagagccacaccagctctggacatcaccgcccctggaactggggccaccagccctgggcacgagatttgctctgactttatttatatggcatgaaatctctggtttattttgggattttttgttgttggtgttgtcaaagtttgttttttctaaagttgtgtgattatatatttgacattttacatttcaaagaaaggtatgttgtctaacaggggaccaacagaaggtagtattgacaactgttcctgcttctactaaaaaaaaaagagcacaaaagaaaaactaaattattgaaaaattaaaaaatgtcattgtttcctgtttgttaatattagggttgtaaggtgtcgttttgaggtatcgactgtgattccttcccccaccctccattctccagcggttggccggtgttagaactcgctctctttgagtgactggctacaagggcctgagaggtggccagccagggttggagctggaggggatggagccccacctgaggtgccgtgtcacacgggttagagggtcactgggaaacaccgggcggtggcttctgtgatttattttcttgatggtaacttctcagagcagggcgattgggacatcaccagccagagcacaggaagccaccctgcctgctggggaggagggacccacacaagccccctcggcagtttgtccccccagcttcggtatgccttcagggaaaggtcacagctggggaggaagcggggggacgcctgtcacccctggcaggtggtgagttcaggtgggggctccctgctgcccccaggcctgggagcttgaagccctcccggcatctggcatccgagcctcccgccctccagggtgcgcttccctctcttgccgcagcatacacgagggcaggcagtggccttgtcactgtatcttgcatcagagacaaaggaggacccgctttagccctgctgcgggaaatgggggagggcccagggccagcgcattgtgcactggtttactttaaaatgtacagattcttctcgttaaattcttgatagattttttattattattaaaagtcagtttataatacaaagaaaaaaaatgtga

SEQ ID NO: 294541 - DNA, 6662 bp, Homo sapiens
tcgaatcgtaaccgttcgtacgagaatcgctgtcctctccttgcggccgcccgggagtccgagcgccagctgcgcctccgcctctgcgtcctcaacgagatcttgggcaccgagagggactacgtgggcaccttgcgcttcttgcagtcggcattcctgcatcgcatccggcagaacgtggccgactcagtggagaagggcctcacggaggagaatgtcaaggtcctgttctcgaacatcgaagacatcctggaagttcataaggatttcttggccgccttggagtattgtttacacccggagccgcagtctcagcatgaacttgggaatgttttcttaaaattcaaggacaagttctgcgtgtacgaggagtattgcagcaaccatgagaaagccctgaggctgctggtggagctgaacaagatccctaccgtgcgcgccttccttttgagctgcatgcttctgggaggccggaagaccacggacatccctttggaaggctacctgttgtctccgatccagaggatctgcaagtacccgctcctccttaaggagctggccaagaggactcccggcaagcacccagaccaccccgcggtccagagtgccctgcaggccatgaagaccgtttgctccaacatcaatgagaccaagcggcagatggagaagctggaagccctggagcagctgcagtcccacatcgaaggctgggagggttccaacctcacagacatctgcactcagctcctcctgcaagggactttgttaaagatctctgcgggcaacatccaggaaagggccttcttcctcttcgacaaccttctcgtctactgcaagcggaaatccagggtcaccgggagcaagaagtccaccaagaggaccaaatccatcaacggctccctctacatcttcaggggtcgaatcaacactgaagtcatggaggtggagaatgtggaagatgggacagcggattaccatagcaacggctataccgtcaccaacggctggaagatccacaacacggccaagaataagtggtttgtctgcatggccaagacggcagaggagaagcagaagtggctggatgccatcatccgcgagcgggagcagcgcgagagcctgaagctgggcatggagcgtgatgcctacgtcatgattgcggagaagggggagaagctgtaccacatgatgatgaacaagaaggtgaacctcatcaaggaccgccggagaaagctgagcactgtccccaagtgctttcttggcaatgagttcgttgcctggctcctagaaattggtgaaatcagcaagacggaagaaggagtcaacttgggccaagccctgttggagaatggcatcatccaccatgtttccgacaagcaccagttcaagaatgagcaggtgatgtatcgcttccgctacgacgatggcacctacaaggcccgaagtgagctggaggacatcatgtccaagggtgtgaggctttactgccgtcttcacagcctctacaccccggtgatcaaagaccgtgattaccacctgaagacctacaagtcagtgcttcccgggagcaagctggtggactggctgctggctcagggagactgccagactcgggaggaggcagtggcgctcggcgtgggtctgtgcaacaatggcttcatgcaccacgtgctggagaagagcgagttcagggatgagtcccagtacttccgctttcatgctgacgaggagatggaggggaccagcagcaagaacaaacagcttcgcaacgacttcaagctggtggagaacattctggccaagcgcctgctgatcctgccccaggaggaggactatggctttgacatcgaggagaagaacaaggctgtggtggtgaagtccgtccagaggggctcgctggctgaggtggctggcctgcaggtggggaggaagatctactccatcaatgaggacctggtgttcctgcggccgttttcagaggtggagtccatcctcaaccagtccttctgctcccgccgccctctgcgcctcctggtggccacgaaggccaaagagatcatcaaaatccccgaccagccggacacactgtgcttccagattcgtggagctgccccaccgtacgtctatgctgtggggagaggctctgaggccatggctgcagggctctgtgctggtcagtgcattctgaaggtcaatggcagcaacgtgatgaacgatggtgcccctgaggtcctggagcacttccaggcattccggagtcggcgcgaagaggccctgggcctgtaccagtggatctaccacacccatgaggatgcccaggaagcacgagccagtcaggaggcctccactgaggaccccagtggcgagcaggcccaggaggaagaccaggctgattcagccttcccactgctgtccctgggtccccggctgagcctgtgtgaggacagccccatggtcaccctgactgtggacaacgtgcacctggaacacggcgtggtgtatgagtatgtgagcacggcaggcgtcaggtgccatgtgctggagaagatcgtggagccccgcggctgcttcggcctcaccgccaagatcctcgaggcctttgctgccaatgacagcgtcttcgtggagaactgcaggcggctcatggccctgagcagcgccatcgtgaccatgccccactttgagttccgcaacatctgtgacaccaagctggagagcattggccagaggattgcctgctaccaggagtttgcagcccaactgaagagcagggtcagcccacccttcaaacaagcccccctggagccccacccgctgtgtggcctggacttctgccccaccaattgccacatcaacctcatggaagtgtcctaccccaagaccaccccctcagtgggcaggtccttcagcatccgctttggacgcaaaccctccctcatcggccttgacccggagcaaggccacctgaaccccatgtcgtacacccagcactgcatcaccaccatggctgctccctcctggaagtgcttgcctgctgcagagggtgatccccaaggccagggtctccatgatggcagcttcgggccagccagtgggacccttggtcaggaagaccggggcctcagcttcctactcaagcaggaggaccgtgagatccaggatgcctacctgcagctcttcaccaagctggatgtggccctgaaggagatgaagcaatatgtcacccagatcaacaggctgctgtccaccatcacagagcccacctcgggtgggtcctgcgacgcatccttggctgaggaggcctcctccctgcccctggtcagtgaagagagcgagatggacaggagtgaccatgggggcatcaagaaggtgtgcttcaaggtggccgaggaggaccaggaggactcaggccacgacaccatgagttatcgcgactcctacagcgagtgtaacagcaatcgagactcggtcctgtcctacaccagcgtgagaagtaacagctcctacttgggcagcgacgagatggggtctggagatgagctgccctgtgacatgcggatcccatctgacaagcaggacaagcttcatggctgcctggagcacctctttaaccaggtggactccatcaatgctctcctcaaggggccagtcatgagccgggctttcgaagagaccaagcatttccctatgaaccacagcttacaagagtttaaacagaaagaagagtgtacaatccgtggccggagcctgatccagattagcatccaggaggacccctggaacctccccaactccatcaagaccctggtggacaacattcagagatatgtggaagatgggaagaaccagctgctcctggccttgctgaagtgcacagacacggagctgcagctgcgcagagacgcgatcttctgccaggccctggtggccgccgtgtgcaccttctccgagcagctgctggcggccctgggctaccgctacaacaacaatggcgagtacgaggagagcagccgcgacgccagccgcaagtggctggagcaggtggcggccacgggcgtcctgctgcactgccagtccctgctctcgccagccacagtgaaggaggaacggaccatgctggaggacatctgggtgacgctgtcagagctggacaatgtcaccttctcctttaagcagctggacgagaactatgtggccaacaccaacgtcttctaccacattgagggcagccggcaggcgctgaaggtcatcttctacctcgacagctaccacttctccaagctgccctcccgcctggagggtggggccagcctgaggctgcacacagcgctgttcacgaaaggtgagcttcaggcctggggcagggaggaccacgggggccgggccaaggccaccaagcacaccggctcccaaccgcctgcccgcccccgacatctcccctcccagtgctggagaacgtggaggggctgccttctccaggcagccaggccgcggaggatttgcagcaggacatcaacgcgcagtccctggagaaagttcagcagtattaccgcaaactcagggcattttacctggagcggtctaacctgcccacggatgccagcaccacggcggtaaagatagaccagctgatccgccccatcaatgccctggatgagctctgccgcctcatgaagtcctttgtccacccaaagcctggtgctgctgggagtgtgggcgccggcctcatccccatctcctcggagctctgctaccgcctgggggcctgccagatggtcatgtgtggcacaggcatgcagaggagcaccctgagcgtgtccctggagcaggcggccatcttggcacggagccacgggttgctgcccaagtgcatcatgcaggccacggacatcatgcggaagcagggcccaagggtggagattctggccaaaaacctgcgagtcaaggaccagatgccccagggtgctccgcgcctctaccgcctctgccagccgccggtggatggggacctctgaacacccaaatgccccacgctgggccgcggcctctggagctgggatttgggaggacacagcaggcagcgctggccttctccagggatggcccaaggcttccgcagccgcccgttccgggacctgcccagcgtcctccctgcctccttccgggacaagcctggccaccctcgctgtgatgacgagctggctgattggccctgggccggcccattcttcacacgcctgccagaagctggaggggtgctggagacccatagagctgatgggagcagctggtgcctggccttcggctcctgcgtccccagaacccaagggaacgtcatggaggccacatggggccacccggctccctcgggatggctccgcctgcacttttgaaaccccggtttccttcaacgtccacattccaggtgaccacacgtgtctcctcctcctcatcttagcttccaggttcaccctaaccctgtactaacctgcttggtggacttggaaaagacttggctctgtcgggaaaggagagacggggcctccatcacgcctgttaccagaggatccccgagagccacaccagctctggacatcaccgcccctggaactggggccaccagccctgggcacgagatttgctctgactttatttatatggcatgaaatctctggtttattttgggattttttgttgttggtgttgtcaaagtttgttttttctaaagttgtgtgattatatatttgacattttacatttcaaagaaaggtatgttgtctaacaggggaccaacagaaggtagtattgacaactgttcctgcttctactaaaaaaaaaagagcacaaaagaaaaactaaattattgaaaaattaaaaaatgtcattgtttcctgtttgttaatattagggttgtaaggtgtcgttttgaggtatcgactgtgattccttcccccaccctccattctccagcggttggccggtgttagaactcgctctctttgagtgactggctacaagggcctgagaggtggccagccagggttggagctggaggggatggagccccacctgaggtgccgtgtcacacgggttagagggtcactgggaaacaccgggcggtggcttctgtgatttattttcttgatggtaacttctcagagcagggcgattgggacatcaccagccagagcacaggaagccaccctgcctgctggggaggagggacccacacaagccccctcggcagtttgtccccccagcttcggtatgccttcagggaaaggtcacagctggggaggaagcggggggacgcctgtcacccctggcaggtggtgagttcaggtgggggctccctgctgcccccaggcctgggagcttgaagccctcccggcatctggcatccgagcctcccgccctccagggtgcgcttccctctcttgccgcagcatacacgagggcaggcagtggccttgtcactgtatcttgcatcagagacaaaggaggacccgctttagccctgctgcgggaaatgggggagggcccagggccagcgcattgtgcactggtttactttaaaatgtacagattcttctcgttaaattcttgatagattttttattattattaaaagtcagtttataatacaaagaaaaaaaatgtga

SEQ ID NO: 294542 - DNA, 6444 bp, Homo sapiens
tcgaatcgtaaccgttcgtacgagaatcgctgtcctctccttgcggccgcccgggagtccgagcgccagctgcgcctccgcctctgcgtcctcaacgagatcttgggcaccgagagggactacgtgggcaccttgcgcttcttgcagtcggcattcctgcatcgcatccggcagaacgtggccgactcagtggagaagggcctcacggaggagaatgtcaaggtcctgttctcgaacatcgaagacatcctggaagttcataaggatttcttggccgccttggagtattgtttacacccggagccgcagtctcagcatgaacttgggaatgttttcttaaaattcaaggacaagttctgcgtgtacgaggagtattgcagcaaccatgagaaagccctgaggctgctggtggagctgaacaagatccctaccgtgcgcgccttccttttgagctgcatgcttctgggaggccggaagaccacggacatccctttggaaggctacctgttgtctccgatccagaggatctgcaagtacccgctcctccttaaggagctggccaagaggactcccggcaagcacccagaccaccccgcggtccagagtgccctgcaggccatgaagaccgtttgctccaacatcaatgagaccaagcggcagatggagaagctggaagccctggagcagctgcagtcccacatcgaaggctgggagggttccaacctcacagacatctgcactcagctcctcctgcaagggactttgttaaagatctctgcgggcaacatccaggaaagggccttcttcctcttcgacaaccttctcgtctactgcaagcggaaatccagggtcaccgggagcaagaagtccaccaagaggaccaaatccatcaacggctccctctacatcttcaggggtcgaatcaacactgaagtcatggaggtggagaatgtggaagatgggacagcggattaccatagcaacggctataccgtcaccaacggctggaagatccacaacacggccaagaataagtggtttgtctgcatggccaagacggcagaggagaagcagaagtggctggatgccatcatccgcgagcgggagcagcgcgagagcctgaagctgggcatggagcgtgatgcctacgtcatgattgcggagaagggggagaagctgtaccacatgatgatgaacaagaaggtgaacctcatcaaggaccgccggagaaagctgagcactgtccccaagtgctttcttggcaatgagttcgttgcctggctcctagaaattggtgaaatcagcaagacggaagaaggagtcaacttgggccaagccctgttggagaatggcatcatccaccatgtttccgacaagcaccagttcaagaatgagcaggtgatgtatcgcttccgctacgacgatggcacctacaaggcccgaagtgagctggaggacatcatgtccaagggtgtgaggctttactgccgtcttcacagcctctacaccccggtgatcaaagaccgtgattaccacctgaagacctacaagtcagtgcttcccgggagcaagctggtggactggctgctggctcagggagactgccagactcgggaggaggcagtggcgctcggcgtgggtctgtgcaacaatggcttcatgcaccacgtgctggagaagagcgagttcagggatgagtcccagtacttccgctttcatgctgacgaggagatggaggggaccagcagcaagaacaaacagcttcgcaacgacttcaagctggtggagaacattctggccaagcgcctgctgatcctgccccaggaggaggactatggctttgacatcgaggagaagaacaaggctgtggtggtgaagtccgtccagaggggctcgctggctgaggtggctggcctgcaggtggggaggaagatctactccatcaatgaggacctggtgttcctgcggccgttttcagaggtggagtccatcctcaaccagtccttctgctcccgccgccctctgcgcctcctggtggccacgaaggccaaagagatcatcaaaatccccgaccagccggacacactgtgcttccagattcgtggagctgccccaccgtacgtctatgctgtggggagaggctctgaggccatggctgcagggctctgtgctggtcagtgcattctgaaggtcaatggcagcaacgtgatgaacgatggtgcccctgaggtcctggagcacttccaggcattccggagtcggcgcgaagaggccctgggcctgtaccagtggatctaccacacccatgaggatgcccaggaagcacgagccagtcaggaggcctccactgaggaccccagtggcgagcaggcccaggaggaagaccaggctgattcagccttcccactgctgtccctgggtccccggctgagcctgtgtgaggacagccccatggtcaccctgactgtggacaacgtgcacctggaacacggcgtggtgtatgagtatgtgagcacggcaggcgtcaggtgccatgtgctggagaagatcgtggagccccgcggctgcttcggcctcaccgccaagatcctcgaggcctttgctgccaatgacagcgtcttcgtggagaactgcaggcggctcatggccctgagcagcgccatcgtgaccatgccccactttgagttccgcaacatctgtgacaccaagctggagagcattggccagaggattgcctgctaccaggagtttgcagcccaactgaagagcagggtcagcccacccttcaaacaagcccccctggagccccacccgctgtgtggcctggacttctgccccaccaattgccacctgaaccccatgtcgtacacccagcactgcatcaccaccatggctgctccctcctggaagtgcttgcctgctgcagagggtgatccccaaggccagggtctccatgatggcagcttcgggccagccagtgggacccttggtcaggaagaccggggcctcagcttcctactcaagcaggaggaccgtgagatccaggatgcctacctgcagctcttcaccaagctggatgtggccctgaaggagatgaagcaatatgtcacccagatcaacaggctgctgtccaccatcacagagcccacctcgggtgggtcctgcgacgcatccttggctgaggaggcctcctccctgcccctggtcagtgaagagagcgagatggacaggagtgaccatgggggcatcaagaaggtgtgcttcaaggtggccgaggaggaccaggaggactcaggccacgacaccatgagttatcgcgactcctacagcgagtgtaacagcaatcgagactcggtcctgtcctacaccagcgtgagaagtaacagctcctacttgggcagcgacgagatggggtctggagatgagctgccctgtgacatgcggatcccatctgacaagcaggacaagcttcatggctgcctggagcacctctttaaccaggtggactccatcaatgctctcctcaaggggccagtcatgagccgggctttcgaagagaccaagcatttccctatgaaccacagcttacaagagtttaaacagaaagaagagtgtacaatccgtggccggagcctgatccagattagcatccaggaggacccctggaacctccccaactccatcaagaccctggtggacaacattcagagatatgtggaagatgggaagaaccagctgctcctggccttgctgaagtgcacagacacggagctgcagctgcgcagagacgcgatcttctgccaggccctggtggccgccgtgtgcaccttctccgagcagctgctggcggccctgggctaccgctacaacaacaatggcgagtacgaggagagcagccgcgacgccagccgcaagtggctggagcaggtggcggccacgggcgtcctgctgcactgccagtccctgctctcgccagccacagtgaaggaggaacggaccatgctggaggacatctgggtgacgctgtcagagctggacaatgtcaccttctcctttaagcagctggacgagaactatgtggccaacaccaacgtcttctaccacattgagggcagccggcaggcgctgaaggtcatcttctacctcgacagctaccacttctccaagctgccctcccgcctggagggtggggccagcctgaggctgcacacagcgctgttcacgaaagtgctggagaacgtggaggggctgccttctccaggcagccaggccgcggaggatttgcagcaggacatcaacgcgcagtccctggagaaagttcagcagtattaccgcaaactcagggcattttacctggagcggtctaacctgcccacggatgccagcaccacggcggtaaagatagaccagctgatccgccccatcaatgccctggatgagctctgccgcctcatgaagtcctttgtccacccaaagcctggtgctgctgggagtgtgggcgccggcctcatccccatctcctcggagctctgctaccgcctgggggcctgccagatggtcatgtgtggcacaggcatgcagaggagcaccctgagcgtgtccctggagcaggcggccatcttggcacggagccacgggttgctgcccaagtgcatcatgcaggccacggacatcatgcggaagcagggcccaagggtggagattctggccaaaaacctgcgagtcaaggaccagatgccccagggtgctccgcgcctctaccgcctctgccagccgccggtggatggggacctctgaacacccaaatgccccacgctgggccgcggcctctggagctgggatttgggaggacacagcaggcagcgctggccttctccagggatggcccaaggcttccgcagccgcccgttccgggacctgcccagcgtcctccctgcctccttccgggacaagcctggccaccctcgctgtgatgacgagctggctgattggccctgggccggcccattcttcacacgcctgccagaagctggaggggtgctggagacccatagagctgatgggagcagctggtgcctggccttcggctcctgcgtccccagaacccaagggaacgtcatggaggccacatggggccacccggctccctcgggatggctccgcctgcacttttgaaaccccggtttccttcaacgtccacattccaggtgaccacacgtgtctcctcctcctcatcttagcttccaggttcaccctaaccctgtactaacctgcttggtggacttggaaaagacttggctctgtcgggaaaggagagacggggcctccatcacgcctgttaccagaggatccccgagagccacaccagctctggacatcaccgcccctggaactggggccaccagccctgggcacgagatttgctctgactttatttatatggcatgaaatctctggtttattttgggattttttgttgttggtgttgtcaaagtttgttttttctaaagttgtgtgattatatatttgacattttacatttcaaagaaaggtatgttgtctaacaggggaccaacagaaggtagtattgacaactgttcctgcttctactaaaaaaaaaagagcacaaaagaaaaactaaattattgaaaaattaaaaaatgtcattgtttcctgtttgttaatattagggttgtaaggtgtcgttttgaggtatcgactgtgattccttcccccaccctccattctccagcggttggccggtgttagaactcgctctctttgagtgactggctacaagggcctgagaggtggccagccagggttggagctggaggggatggagccccacctgaggtgccgtgtcacacgggttagagggtcactgggaaacaccgggcggtggcttctgtgatttattttcttgatggtaacttctcagagcagggcgattgggacatcaccagccagagcacaggaagccaccctgcctgctggggaggagggacccacacaagccccctcggcagtttgtccccccagcttcggtatgccttcagggaaaggtcacagctggggaggaagcggggggacgcctgtcacccctggcaggtggtgagttcaggtgggggctccctgctgcccccaggcctgggagcttgaagccctcccggcatctggcatccgagcctcccgccctccagggtgcgcttccctctcttgccgcagcatacacgagggcaggcagtggccttgtcactgtatcttgcatcagagacaaaggaggacccgctttagccctgctgcgggaaatgggggagggcccagggccagcgcattgtgcactggtttactttaaaatgtacagattcttctcgttaaattcttgatagattttttattattattaaaagtcagtttataatacaaagaaaaaaaatgtga

SEQ ID NO: 294543 - DNA, 6469 bp, Homo sapiens
tcgaatcgtaaccgttcgtacgagaatcgctgtcctctccttgcggccgcccgggagtccgagcgccagctgcgcctccgcctctgcgtcctcaacgagatcttgggcaccgagagggactacgtgggcaccttgcgcttcttgcagtcggcattcctgcatcgcatccggcagaacgtggccgactcagtggagaagggcctcacggaggagaatgtcaaggtcctgttctcgaacatcgaagacatcctggaagttcataaggatttcttggccgccttggagtattgtttacacccggagccgcagtctcagcatgaacttgggaatgttttcttaaaattcaaggacaagttctgcgtgtacgaggagtattgcagcaaccatgagaaagccctgaggctgctggtggagctgaacaagatccctaccgtgcgcgccttccttttgagctgcatgcttctgggaggccggaagaccacggacatccctttggaaggctacctgttgtctccgatccagaggatctgcaagtacccgctcctccttaaggagctggccaagaggactcccggcaagcacccagaccaccccgcggtccagagtgccctgcaggccatgaagaccgtttgctccaacatcaatgagaccaagcggcagatggagaagctggaagccctggagcagctgcagtcccacatcgaaggctgggagggttccaacctcacagacatctgcactcagctcctcctgcaagggactttgttaaagatctctgcgggcaacatccaggaaagggccttcttcctcttcgacaaccttctcgtctactgcaagcggaaatccagggtcaccgggagcaagaagtccaccaagaggaccaaatccatcaacggctccctctacatcttcaggggtcgaatcaacactgaagtcatggaggtggagaatgtggaagatgggacagcggattaccatagcaacggctataccgtcaccaacggctggaagatccacaacacggccaagaataagtggtttgtctgcatggccaagacggcagaggagaagcagaagtggctggatgccatcatccgcgagcgggagcagcgcgagagcctgaagctgggcatggagcgtgatgcctacgtcatgattgcggagaagggggagaagctgtaccacatgatgatgaacaagaaggtgaacctcatcaaggaccgccggagaaagctgagcactgtccccaagtgctttcttggcaatgagttcgttgcctggctcctagaaattggtgaaatcagcaagacggaagaaggagtcaacttgggccaagccctgttggagaatggcatcatccaccatgtttccgacaagcaccagttcaagaatgagcaggtgatgtatcgcttccgctacgacgatggcacctacaaggcccgaagtgagctggaggacatcatgtccaagggtgtgaggctttactgccgtcttcacagcctctacaccccggtgatcaaagaccgtgattaccacctgaagacctacaagtcagtgcttcccgggagcaagctggtggactggctgctggctcagggagactgccagactcgggaggaggcagtggcgctcggcgtgggtctgtgcaacaatggcttcatgcaccacgtgctggagaagagcgagttcagggatgagtcccagtacttccgctttcatgctgacgaggagatggaggggaccagcagcaagaacaaacagcttcgcaacgacttcaagctggtggagaacattctggccaagcgcctgctgatcctgccccaggaggaggactatggctttgacatcgaggagaagaacaaggctgtggtggtgaagtccgtccagaggggctcgctggctgaggtggctggcctgcaggtggggaggaagatctactccatcaatgaggacctggtgttcctgcggccgttttcagaggtggagtccatcctcaaccagtccttctgctcccgccgccctctgcgcctcctggtggccacgaaggccaaagagatcatcaaaatccccgaccagccggacacactgtgcttccagattcgtggagctgccccaccgtacgtctatgctgtggggagaggctctgaggccatggctgcagggctctgtgctggtcagtgcattctgaaggtcaatggcagcaacgtgatgaacgatggtgcccctgaggtcctggagcacttccaggcattccggagtcggcgcgaagaggccctgggcctgtaccagtggatctaccacacccatgaggatgcccaggaagcacgagccagtcaggaggcctccactgaggaccccagtggcgagcaggcccaggaggaagaccaggctgattcagccttcccactgctgtccctgggtccccggctgagcctgtgtgaggacagccccatggtcaccctgactgtggacaacgtgcacctggaacacggcgtggtgtatgagtatgtgagcacggcaggcgtcaggtgccatgtgctggagaagatcgtggagccccgcggctgcttcggcctcaccgccaagatcctcgaggcctttgctgccaatgacagcgtcttcgtggagaactgcaggcggctcatggccctgagcagcgccatcgtgaccatgccccactttgagttccgcaacatctgtgacaccaagctggagagcattggccagaggattgcctgctaccaggagtttgcagcccaactgaagagcagggtcagcccacccttcaaacaagcccccctggagccccacccgctgtgtggcctggacttctgccccaccaattgccacatcaacctcatggaagtgtcctaccccaagaccaccccctcagtgggcaggtccttcagcatccgctttggacgcaaaccctccctcatcggccttgacccggagcaaggccacctgaaccccatgtcgtacacccagcactgcatcaccaccatggctgctccctcctggaagtgcttgcctgctgcagagggtgatccccaaggccagggtctccatgatggcagcttcgggccagccagtgggacccttggtcaggaagaccggggcctcagcttcctactcaagcaggaggaccgtgagatccaggatgcctacctgcagctcttcaccaagctggatgtggccctgaaggagatgaagcaatatgtcacccagatcaacaggctgctgtccaccatcacagagcccacctcgggtgggtcctgcgacgcatccttggctgaggaggcctcctccctgcccctggtcagtgaagagagcgagatggacaggagtgaccatgggggcatcaagaaggtgtgcttcaaggtggccgaggaggaccaggaggactcaggccacgacaccatgagttatcgcgactcctacagcgagtgtaacagcaatcgagactcggtcctgtcctacaccagcgtgagaagtaacagctcctacttgggcagcgacgagatggggtctggagatgagctgccctgtgacatgcggatcccatctgacaagcaggacaagcttcatggctgcctggagcacctctttaaccaggtggactccatcaatgctctcctcaaggggccagtcatgagccgggctttcgaagagaccaagcatttccctatgaaccacagcttacaagagtttaaacagaaagaagagtgtacaatccgtggccggagcctgatccagattagcatccaggaggacccctggaacctccccaactccatcaagaccctggtggacaacattcagagatatgtggaagatgggaagaaccagctgctcctggccttgctgaagtgcacagacacggagctgcagctgcgcagagacgcgatcttctgccaggccctggtggccgccgtgtgcaccttctccgagcagctgctggcggccctgggctaccgctacaacaacaatggcgagtacgaggagagcagccgcgacgccagccgcaagtggctggagcaggtggcggccacgggcgtcctgctgcactgccagtccctgctctcgccagccacagtgaaggaggaacggaccatgctggaggacatctgggtgacgctgtcagagctggacaatgtcaccttctcctttaagcagctggacgagaactatgtggccaacaccaacgtcttctaccacattgagggcagccggcaggcgctgaaggtcatcttctacctcgacagctaccacttctccaagctgccctcccgcctggagggtggggccagcctgaggctgcacacagcgctgttcacgaaagtgctggagaacgtggaggggctgccttctccaggcagccaggccgcggaggatttgcagcaggacatcaacgcgcagtccctggagaaagttcagcagtattaccgcaaactcagggcattttacctggagcggtctaacctgcccacggatgccagcaccacggcggtaaagatagaccagctgatccgccccatcaatgccctggatgagctctgccgcctcatgaagtcctttgtccacccaaagcctggtgctgctgggagtgtgggcgccggcctcatccccatctcctcggagctctgctaccgcctgggggcctgccagatggtcatgtgtggcacaggcatgcagaggagcaccctgagcgtgtccctggagcaggcggccatcttggcacggagccacgggttgctgcccaagtgcatcatgcaggccacggacatcatgcggaagcagggcccaagggtggagattctggccaaaaacctgcgagtcaaggaccagatgccccagggtgctccgcgcctctaccgcctctgccagccgccggtggatggggacctctgaacacccaaatgccccacgctgggccgcggcctctggagctgggatttgggaggacacagcaggcagcgctggccaccctcgctgtgatgacgagctggctgattggccctgggccggcccattcttcacacgcctgccagaagctggaggggtgctggagacccatagagctgatgggagcagctggtgcctggccttcggctcctgcgtccccagaacccaagggaacgtcatggaggccacatggggccacccggctccctcgggatggctccgcctgcacttttgaaaccccggtttccttcaacgtccacattccaggtgaccacacgtgtctcctcctcctcatcttagcttccaggttcaccctaaccctgtactaacctgcttggtggacttggaaaagacttggctctgtcgggaaaggagagacggggcctccatcacgcctgttaccagaggatccccgagagccacaccagctctggacatcaccgcccctggaactggggccaccagccctgggcacgagatttgctctgactttatttatatggcatgaaatctctggtttattttgggattttttgttgttggtgttgtcaaagtttgttttttctaaagttgtgtgattatatatttgacattttacatttcaaagaaaggtatgttgtctaacaggggaccaacagaaggtagtattgacaactgttcctgcttctactaaaaaaaaaagagcacaaaagaaaaactaaattattgaaaaattaaaaaatgtcattgtttcctgtttgttaatattagggttgtaaggtgtcgttttgaggtatcgactgtgattccttcccccaccctccattctccagcggttggccggtgttagaactcgctctctttgagtgactggctacaagggcctgagaggtggccagccagggttggagctggaggggatggagccccacctgaggtgccgtgtcacacgggttagagggtcactgggaaacaccgggcggtggcttctgtgatttattttcttgatggtaacttctcagagcagggcgattgggacatcaccagccagagcacaggaagccaccctgcctgctggggaggagggacccacacaagccccctcggcagtttgtccccccagcttcggtatgccttcagggaaaggtcacagctggggaggaagcggggggacgcctgtcacccctggcaggtggtgagttcaggtgggggctccctgctgcccccaggcctgggagcttgaagccctcccggcatctggcatccgagcctcccgccctccagggtgcgcttccctctcttgccgcagcatacacgagggcaggcagtggccttgtcactgtatcttgcatcagagacaaaggaggacccgctttagccctgctgcgggaaatgggggagggcccagggccagcgcattgtgcactggtttactttaaaatgtacagattcttctcgttaaattcttgatagattttttattattattaaaagtcagtttataatacaaagaaaaaaaatgtga

SEQ ID NO: 294544 - DNA, 6516 bp, Homo sapiens
tcgaatcgtaaccgttcgtacgagaatcgctgtcctctccttgcggccgcccgggagtccgagcgccagctgcgcctccgcctctgcgtcctcaacgagatcttgggcaccgagagggactacgtgggcaccttgcgcttcttgcagtcggcattcctgcatcgcatccggcagaacgtggccgactcagtggagaagggcctcacggaggagaatgtcaaggtcctgttctcgaacatcgaagacatcctggaagttcataaggatttcttggccgccttggagtattgtttacacccggagccgcagtctcagcatgaacttgggaatgttttcttaaaattcaaggacaagttctgcgtgtacgaggagtattgcagcaaccatgagaaagccctgaggctgctggtggagctgaacaagatccctaccgtgcgcgccttccttttgagctgcatgcttctgggaggccggaagaccacggacatccctttggaaggctacctgttgtctccgatccagaggatctgcaagtacccgctcctccttaaggagctggccaagaggactcccggcaagcacccagaccaccccgcggtccagagtgccctgcaggccatgaagaccgtttgctccaacatcaatgagaccaagcggcagatggagaagctggaagccctggagcagctgcagtcccacatcgaaggctgggagggttccaacctcacagacatctgcactcagctcctcctgcaagggactttgttaaagatctctgcgggcaacatccaggaaagggccttcttcctcttcgacaaccttctcgtctactgcaagcggaaatccagggtcaccgggagcaagaagtccaccaagaggaccaaatccatcaacggctccctctacatcttcaggggtcgaatcaacactgaagtcatggaggtggagaatgtggaagatgggacagcggattaccatagcaacggctataccgtcaccaacggctggaagatccacaacacggccaagaataagtggtttgtctgcatggccaagacggcagaggagaagcagaagtggctggatgccatcatccgcgagcgggagcagcgcgagagcctgaagctgggcatggagcgtgatgcctacgtcatgattgcggagaagggggagaagctgtaccacatgatgatgaacaagaaggtgaacctcatcaaggaccgccggagaaagctgagcactgtccccaagtgctttcttggcaatgagttcgttgcctggctcctagaaattggtgaaatcagcaagacggaagaaggagtcaacttgggccaagccctgttggagaatggcatcatccaccatgtttccgacaagcaccagttcaagaatgagcaggtgatgtatcgcttccgctacgacgatggcacctacaaggcccgaagtgagctggaggacatcatgtccaagggtgtgaggctttactgccgtcttcacagcctctacaccccggtgatcaaagaccgtgattaccacctgaagacctacaagtcagtgcttcccgggagcaagctggtggactggctgctggctcagggagactgccagactcgggaggaggcagtggcgctcggcgtgggtctgtgcaacaatggcttcatgcaccacgtgctggagaagagcgagttcagggatgagtcccagtacttccgctttcatgctgacgaggagatggaggggaccagcagcaagaacaaacagcttcgcaacgacttcaagctggtggagaacattctggccaagcgcctgctgatcctgccccaggaggaggactatggctttgacatcgaggagaagaacaaggctgtggtggtgaagtccgtccagaggggctcgctggctgaggtggctggcctgcaggtggggaggaagatctactccatcaatgaggacctggtgttcctgcggccgttttcagaggtggagtccatcctcaaccagtccttctgctcccgccgccctctgcgcctcctggtggccacgaaggccaaagagatcatcaaaatccccgaccagccggacacactgtgcttccagattcgtggagctgccccaccgtacgtctatgctgtggggagaggctctgaggccatggctgcagggctctgtgctggtcagtgcattctgaaggtcaatggcagcaacgtgatgaacgatggtgcccctgaggtcctggagcacttccaggcattccggagtcggcgcgaagaggccctgggcctgtaccagtggatctaccacacccatgaggatgcccaggaagcacgagccagtcaggaggcctccactgaggaccccagtggcgagcaggcccaggaggaagaccaggctgattcagccttcccactgctgtccctgggtccccggctgagcctgtgtgaggacagccccatggtcaccctgactgtggacaacgtgcacctggaacacggcgtggtgtatgagtatgtgagcacggcaggcgtcaggtgccatgtgctggagaagatcgtggagccccgcggctgcttcggcctcaccgccaagatcctcgaggcctttgctgccaatgacagcgtcttcgtggagaactgcaggcggctcatggccctgagcagcgccatcgtgaccatgccccactttgagttccgcaacatctgtgacaccaagctggagagcattggccagaggattgcctgctaccaggagtttgcagcccaactgaagagcagggtcagcccacccttcaaacaagcccccctggagccccacccgctgtgtggcctggacttctgccccaccaattgccacatcaacctcatggaagtgtcctaccccaagaccaccccctcagtgggcaggtccttcagcatccgctttggacgcaaaccctccctcatcggccttgacccggagcaaggccacctgaaccccatgtcgtacacccagcactgcatcaccaccatggctgctccctcctggaagtgcttgcctgctgcagagggtgatccccaaggccagggtctccatgatggcagcttcgggccagccagtgggacccttggtcaggaagaccggggcctcagcttcctactcaagcaggaggaccgtgagatccaggatgcctacctgcagctcttcaccaagctggatgtggccctgaaggagatgaagcaatatgtcacccagatcaacaggctgctgtccaccatcacagagcccacctcgggtgggtcctgcgacgcatccttggctgaggaggcctcctccctgcccctggtcagtgaagagagcgagatggacaggagtgaccatgggggcatcaagaaggtgtgcttcaaggtggccgaggaggaccaggaggactcaggccacgacaccatgagttatcgcgactcctacagcgagtgtaacagcaatcgagactcggtcctgtcctacaccagcgtgagaagtaacagctcctacttgggcagcgacgagatggggtctggagatgagctgccctgtgacatgcggatcccatctgacaagcaggacaagcttcatggctgcctggagcacctctttaaccaggtggactccatcaatgctctcctcaaggggccagtcatgagccgggctttcgaagagaccaagcatttccctatgaaccacagcttacaagagtttaaacagaaagaagagtgtacaatccgtggccggagcctgatccagattagcatccaggaggacccctggaacctccccaactccatcaagaccctggtggacaacattcagagatatgtggaagatgggaagaaccagctgctcctggccttgctgaagtgcacagacacggagctgcagctgcgcagagacgcgatcttctgccaggccctggtggccgccgtgtgcaccttctccgagcagctgctggcggccctgggctaccgctacaacaacaatggcgagtacgaggagagcagccgcgacgccagccgcaagtggctggagcaggtggcggccacgggcgtcctgctgcactgccagtccctgctctcgccagccacagtgaaggaggaacggaccatgctggaggacatctgggtgacgctgtcagagctggacaatgtcaccttctcctttaagcagctggacgagaactatgtggccaacaccaacgtcttctaccacattgagggcagccggcaggcgctgaaggtcatcttctacctcgacagctaccacttctccaagctgccctcccgcctggagggtggggccagcctgaggctgcacacagcgctgttcacgaaagtgctggagaacgtggaggggctgccttctccaggcagccaggccgcggaggatttgcagcaggacatcaacgcgcagtccctggagaaagttcagcagtattaccgcaaactcagcaccacggcggtaaagatagaccagctgatccgccccatcaatgccctggatgagctctgccgcctcatgaagtcctttgtccacccaaagcctggtgctgctgggagtgtgggcgccggcctcatccccatctcctcggagctctgctaccgcctgggggcctgccagatggtcatgtgtggcacaggcatgcagaggagcaccctgagcgtgtccctggagcaggcggccatcttggcacggagccacgggttgctgcccaagtgcatcatgcaggccacggacatcatgcggaagcagggcccaagggtggagattctggccaaaaacctgcgagtcaaggaccagatgccccagggtgctccgcgcctctaccgcctctgccagccgccggtggatggggacctctgaacacccaaatgccccacgctgggccgcggcctctggagctgggatttgggaggacacagcaggcagcgctggccttctccagggatggcccaaggcttccgcagccgcccgttccgggacctgcccagcgtcctccctgcctccttccgggacaagcctggccaccctcgctgtgatgacgagctggctgattggccctgggccggcccattcttcacacgcctgccagaagctggaggggtgctggagacccatagagctgatgggagcagctggtgcctggccttcggctcctgcgtccccagaacccaagggaacgtcatggaggccacatggggccacccggctccctcgggatggctccgcctgcacttttgaaaccccggtttccttcaacgtccacattccaggtgaccacacgtgtctcctcctcctcatcttagcttccaggttcaccctaaccctgtactaacctgcttggtggacttggaaaagacttggctctgtcgggaaaggagagacggggcctccatcacgcctgttaccagaggatccccgagagccacaccagctctggacatcaccgcccctggaactggggccaccagccctgggcacgagatttgctctgactttatttatatggcatgaaatctctggtttattttgggattttttgttgttggtgttgtcaaagtttgttttttctaaagttgtgtgattatatatttgacattttacatttcaaagaaaggtatgttgtctaacaggggaccaacagaaggtagtattgacaactgttcctgcttctactaaaaaaaaaagagcacaaaagaaaaactaaattattgaaaaattaaaaaatgtcattgtttcctgtttgttaatattagggttgtaaggtgtcgttttgaggtatcgactgtgattccttcccccaccctccattctccagcggttggccggtgttagaactcgctctctttgagtgactggctacaagggcctgagaggtggccagccagggttggagctggaggggatggagccccacctgaggtgccgtgtcacacgggttagagggtcactgggaaacaccgggcggtggcttctgtgatttattttcttgatggtaacttctcagagcagggcgattgggacatcaccagccagagcacaggaagccaccctgcctgctggggaggagggacccacacaagccccctcggcagtttgtccccccagcttcggtatgccttcagggaaaggtcacagctggggaggaagcggggggacgcctgtcacccctggcaggtggtgagttcaggtgggggctccctgctgcccccaggcctgggagcttgaagccctcccggcatctggcatccgagcctcccgccctccagggtgcgcttccctctcttgccgcagcatacacgagggcaggcagtggccttgtcactgtatcttgcatcagagacaaaggaggacccgctttagccctgctgcgggaaatgggggagggcccagggccagcgcattgtgcactggtttactttaaaatgtacagattcttctcgttaaattcttgatagattttttattattattaaaagtcagtttataatacaaagaaaaaaaatgtga

SEQ ID NO: 294545 - DNA, 6508 bp, Homo sapiens
tcgaatcgtaaccgttcgtacgagaatcgctgtcctctccttgcggccgcccgggagtccgagcgccagctgcgcctccgcctctgcgtcctcaacgagatcttgggcaccgagagggactacgtgggcaccttgcgcttcttgcagtcggcattcctgcatcgcatccggcagaacgtggccgactcagtggagaagggcctcacggaggagaatgtcaaggtcctgttctcgaacatcgaagacatcctggaagttcataaggatttcttggccgccttggagtattgtttacacccggagccgcagtctcagcatgaacttgggaatgttttcttaaaattcaaggacaagttctgcgtgtacgaggagtattgcagcaaccatgagaaagccctgaggctgctggtggagctgaacaagatccctaccgtgcgcgccttccttttgagctgcatgcttctgggaggccggaagaccacggacatccctttggaaggctacctgttgtctccgatccagaggatctgcaagtacccgctcctccttaaggagctggccaagaggactcccggcaagcacccagaccaccccgcggtccagagtgccctgcaggccatgaagaccgtttgctccaacatcaatgagaccaagcggcagatggagaagctggaagccctggagcagctgcagtcccacatcgaaggctgggagggttccaacctcacagacatctgcactcagctcctcctgcaagggactttgttaaagatctctgcgggcaacatccaggaaagggccttcttcctcttcgacaaccttctcgtctactgcaagcggaaatccagggtcaccgggagcaagaagtccaccaagaggaccaaatccatcaacggctccctctacatcttcaggggtcgaatcaacactgaagtcatggaggtggagaatgtggaagatgggacagcggattaccatagcaacggctataccgtcaccaacggctggaagatccacaacacggccaagaataagtggtttgtctgcatggccaagacggcagaggagaagcagaagtggctggatgccatcatccgcgagcgggagcagcgcgagagcctgaagctgggcatggagcgtgatgcctacgtcatgattgcggagaagggggagaagctgtaccacatgatgatgaacaagaaggtgaacctcatcaaggaccgccggagaaagctgagcactgtccccaagtgctttcttggcaatgagttcgttgcctggctcctagaaattggtgaaatcagcaagacggaagaaggagtcaacttgggccaagccctgttggagaatggcatcatccaccatgtttccgacaagcaccagttcaagaatgagcaggtgatgtatcgcttccgctacgacgatggcacctacaaggcccgaagtgagctggaggacatcatgtccaagggtgtgaggctttactgccgtcttcacagcctctacaccccggtgatcaaagaccgtgattaccacctgaagacctacaagtcagtgcttcccgggagcaagctggtggactggctgctggctcagggagactgccagactcgggaggaggcagtggcgctcggcgtgggtctgtgcaacaatggcttcatgcaccacgtgctggagaagagcgagttcagggatgagtcccagtacttccgctttcatgctgacgaggagatggaggggaccagcagcaagaacaaacagcttcgcaacgacttcaagctggtggagaacattctggccaagcgcctgctgatcctgccccaggaggaggactatggctttgacatcgaggagaagaacaaggctgtggtggtgaagtccgtccagaggggctcgctggctgaggtggctggcctgcaggtggggaggaagatctactccatcaatgaggacctggtgttcctgcggccgttttcagaggtggagtccatcctcaaccagtccttctgctcccgccgccctctgcgcctcctggtggccacgaaggccaaagagatcatcaaaatccccgaccagccggacacactgtgcttccagattcgtggagctgccccaccgtacgtctatgctgtggggagaggctctgaggccatggctgcagggctctgtgctggtcagtgcattctgaaggtcaatggcagcaacgtgatgaacgatggtgcccctgaggtcctggagcacttccaggcattccggagtcggcgcgaagaggccctgggcctgtaccagtggatctaccacacccatgaggatgcccaggaagcacgagccagtcaggaggcctccactgaggaccccagtggcgagcaggcccaggaggaagaccaggctgattcagccttcccactgctgtccctgggtccccggctgagcctgtgtgaggacagccccatggtcaccctgactgtggacaacgtgcacctggaacacggcgtggtgtatgagtatgtgagcacggcaggcgtcaggtgccatgtgctggagaagatcgtggagccccgcggctgcttcggcctcaccgccaagatcctcgaggcctttgctgccaatgacagcgtcttcgtggagaactgcaggcggctcatggccctgagcagcgccatcgtgaccatgccccactttgagttccgcaacatctgtgacaccaagctggagagcattggccagaggattgcctgctaccaggagtttgcagcccaactgaagagcagggtcagcccacccttcaaacaagcccccctggagccccacccgctgtgtggcctggacttctgccccaccaattgccacatcaacctcatggaagtgtcctaccccaagaccaccccctcagtgggcaggtccttcagcatccgctttggacgcaaaccctccctcatcggccttgacccggagcaaggccacctgaaccccatgtcgtacacccagcactgcatcaccaccatggctgctccctcctggaagtgcttgcctgctgcagagggtgatccccaaggccagggtctccatgatggcagcttcgggccagccagtgggacccttggtcaggaagaccggggcctcagcttcctactcaagcaggaggaccgtgagatccaggatgcctacctgcagctcttcaccaagctggatgtggccctgaaggagatgaagcaatatgtcacccagatcaacaggctgctgtccaccatcacagagcccacctcgggtgggtcctgcgacgcatccttggctgaggaggcctcctccctgcccctggtcagtgaagagagcgagatggacaggagtgaccatgggggcatcaagaaggtgtgcttcaaggtggccgaggaggaccaggaggactcaggccacgacaccatgagttatcgcgactcctacagcgagtgtaacagcaatcgagactcggtcctgtcctacaccagcgtgagaagtaacagctcctacttgggcagcgacgagatggggtctggagatgagctgccctgtgacatgcggatcccatctgacaagcaggacaagcttcatggctgcctggagcacctctttaaccaggtggactccatcaatgctctcctcaaggggccagtcatgagccgggctttcgaagagaccaagcatttccctatgaaccacagcttacaagagtttaaacagaaagaagagtgtacaatccgtggccggagcctgatccagattagcatccaggaggacccctggaacctccccaactccatcaagaccctggtggacaacattcagagatatgtggaagatgggaagaaccagctgctcctggccttgctgaagtgcacagacacggagctgcagctgcgcagagacgcgatcttctgccaggccctggtggccgccgtgtgcaccttctccgagcagctgctggcggccctgggctaccgctacaacaacaatggcgagtacgaggagagcagccgcgacgccagccgcaagtggctggagcaggtggcggccacgggcgtcctgctgcactgccagtccctgctctcgccagccacagtgaaggaggaacggaccatgctggaggacatctgggtgacgctgtcagagctggacaatgtcaccttctcctttaagcagctggacgagaactatgtggccaacaccaacgtcttctaccacattgagggcagccggcaggcgctgaaggtcatcttctacctcgacagctaccacttctccaagctgccctcccgcctggagggtggggccagcctgaggctgcacacagcgctgttcacgaaagtgctggagaacgtggaggggctgccttctccaggcagccaggccgcggaggatttgcagcaggacatcaacgcgcagtccctggagaaagttcagcagtattaccgcaaactcagggcattttacctggagcggtctaacctgcccacggatgccagcaccacggcggtaaagatagaccagctgatccgccccatcaatgccctggatgagctctgccgcctcatgaagtcctttgtccacccaaagcctggtgctgctgggagtgtgggcgccggcctcatccccatctcctcggagctctgctaccgcctgggggcctgccagatggtcatgtgtggcacaggcatgcagaggagcaccctgagcgtgtccctggagcaggcggccatcttggcacggagccacgggttgctgcccaagtgcatcatgcaggccacggacatcatgcggaagcagggcccaagggtggagattctggccaaaaacctgcgagtcaaggaccagatgccccagggtgctccgcgcctctaccgcctctgccagccgccggtggatggggacctctgaacacccaaatgccccacgctgggccgcggcctctggagctgggatttgggaggacacagcaggcagcgctggccttctccagggatggcccaaggcttccgcagccgcccgttccgggacctgcccagcgtcctccctgcctccttccgggacaagcctggccaccctcgctgtgatgacgagctggctgattggccctgggccggcccattcttcacacgcctgccagaagctggaggggtgctggagacccatagagctgatgggagcagctggtgcctggccttcggctcctgcgtccccagaacccaagggaacgtcatggaggccacatggggccacccggctccctcgggatggctccgcctgcacttttgaaaccccggtttccttcaacgtccacattccaggtgaccacacgtgtctcctcctcctcatcttagcttccaggttcaccctaaccctgtactaacctgcttggtggacttggaaaagacttggctctgtcgggaaaggagagacggggcctccatcacgcctgttaccagaggatccccgagagccacaccagctctggacatcaccgcccctggaactggggccaccagccctgggcacgagatttgctctgactttatttatatggcatgaaatctctggtttattttgggattttttgttgttggtgttgtcaaagtttgttttttctaaagttgtgtgattatatatttgacattttacatttcaaagaaaggtatgttgtctaacaggggaccaacagaaggtagtattgacaactgttcctgcttctactaaaaaaaaaagagcacaaaagaaaaactaaattattgaaaaattaaaaaatgtcattgtttcctgtttgttaatattagggttgtaaggtgtcgttttgaggtatcgactgtgattccttcccccaccctccattctccagcggttggccggtgttagaactcgctctctttgagtgactggctacaagggcctgagaggtggccagccagggttggagctggaggggatggagccccacctgaggtgccgtgtcacacgggttagagggtcactgggaaacaccgggcggtggcttctgtgatttattttcttgatggtaacttctcagagcagggcgattgggacccacacaagccccctcggcagtttgtccccccagcttcggtatgccttcagggaaaggtcacagctggggaggaagcggggggacgcctgtcacccctggcaggtggtgagttcaggtgggggctccctgctgcccccaggcctgggagcttgaagccctcccggcatctggcatccgagcctcccgccctccagggtgcgcttccctctcttgccgcagcatacacgagggcaggcagtggccttgtcactgtatcttgcatcagagacaaaggaggacccgctttagccctgctgcgggaaatgggggagggcccagggccagcgcattgtgcactggtttactttaaaatgtacagattcttctcgttaaattcttgatagattttttattattattaaaagtcagtttataatacaaagaaaaaaaatgtga

SEQ ID NO: 294546 - DNA, 4612 bp, Homo sapiens
ctggaggaagagggctccaggcaggggaagcagctagggcagaggccctgaagtgggaccgtgtctggcgcattggaagagcagaaggaagctgatggggctggagcagatcatcaaaatccccgaccagccggacacactgtgcttccagattcgtggagctgccccaccgtacgtctatgctgtggggagaggctctgaggccatggctgcagggctctgtgctggtcagtgcattctgaaggtcaatggcagcaacgtgatgaacgatggtgcccctgaggtcctggagcacttccaggcattccggagtcggcgcgaagaggccctgggcctgtaccagtggatctaccacacccatgaggatgcccaggaagcacgagccagtcaggaggcctccactgaggaccccagtggcgagcaggcccaggaggaagaccaggctgattcagccttcccactgctgtccctgggtccccggctgagcctgtgtgaggacagccccatggtcaccctgactgtggacaacgtgcacctggaacacggcgtggtgtatgagtatgtgagcacggcaggcgtcaggtgccatgtgctggagaagatcgtggagccccgcggctgcttcggcctcaccgccaagatcctcgaggcctttgctgccaatgacagcgtcttcgtggagaactgcaggcggctcatggccctgagcagcgccatcgtgaccatgccccactttgagttccgcaacatctgtgacaccaagctggagagcattggccagaggattgcctgctaccaggagtttgcagcccaactgaagagcagggtcagcccacccttcaaacaagcccccctggagccccacccgctgtgtggcctggacttctgccccaccaattgccacatcaacctcatggaagtgtcctaccccaagaccaccccctcagtgggcaggtccttcagcatccgctttggacgcaaaccctccctcatcggccttgacccggagcaaggccacctgaaccccatgtcgtacacccagcactgcatcaccaccatggctgctccctcctggaagtgcttgcctgctgcagagggtgatccccaaggccagggtctccatgatggcagcttcgggccagccagtgggacccttggtcaggaagaccggggcctcagcttcctactcaagcaggaggaccgtgagatccaggatgcctacctgcagctcttcaccaagctggatgtggccctgaaggagatgaagcaatatgtcacccagatcaacaggctgctgtccaccatcacagagcccacctcgggtgggtcctgcgacgcatccttggctgaggaggcctcctccctgcccctggtcagtgaagagagcgagatggacaggagtgaccatgggggcatcaagaaggtgtgcttcaaggtggccgaggaggaccaggaggactcaggccacgacaccatgagttatcgcgactcctacagcgagtgtaacagcaatcgagactcggtcctgtcctacaccagcgtgagaagtaacagctcctacttgggcagcgacgagatggggtctggagatgagctgccctgtgacatgcggatcccatctgacaagcaggacaagcttcatggctgcctggagcacctctttaaccaggtggactccatcaatgctctcctcaaggggccagtcatgagccgggctttcgaagagaccaagcatttccctatgaaccacagcttacaagagtttaaacagaaagaagagtgtacaatccgtggccggagcctgatccagattagcatccaggaggacccctggaacctccccaactccatcaagaccctggtggacaacattcagagatatgtggaagatgggaagaaccagctgctcctggccttgctgaagtgcacagacacggagctgcagctgcgcagagacgcgatcttctgccaggccctggtggccgccgtgtgcaccttctccgagcagctgctggcggccctgggctaccgctacaacaacaatggcgagtacgaggagagcagccgcgacgccagccgcaagtggctggagcaggtggcggccacgggcgtcctgctgcactgccagtccctgctctcgccagccacagtgaaggaggaacggaccatgctggaggacatctgggtgacgctgtcagagctggacaatgtcaccttctcctttaagcagctggacgagaactatgtggccaacaccaacgtcttctaccacattgagggcagccggcaggcgctgaaggtcatcttctacctcgacagctaccacttctccaagctgccctcccgcctggagggtggggccagcctgaggctgcacacagcgctgttcacgaaagtgctggagaacgtggaggggctgccttctccaggcagccaggccgcggaggatttgcagcaggacatcaacgcgcagtccctggagaaagttcagcagtattaccgcaaactcagggcattttacctggagcggtctaacctgcccacggatgccagcaccacggcggtaaagatagaccagctgatccgccccatcaatgccctggatgagctctgccgcctcatgaagtcctttgtccacccaaagcctggtgctgctgggagtgtgggcgccggcctcatccccatctcctcggagctctgctaccgcctgggggcctgccagatggtcatgtgtggcacaggcatgcagaggagcaccctgagcgtgtccctggagcaggcggccatcttggcacggagccacgggttgctgcccaagtgcatcatgcaggccacggacatcatgcggaagcagggcccaagggtggagattctggccaaaaacctgcgagtcaaggaccagatgccccagggtgctccgcgcctctaccgcctctgccagccgccggtggatggggacctctgaacacccaaatgccccacgctgggccgcggcctctggagctgggatttgggaggacacagcaggcagcgctggccttctccagggatggcccaaggcttccgcagccgcccgttccgggacctgcccagcgtcctccctgcctccttccgggacaagcctggccaccctcgctgtgatgacgagctggctgattggccctgggccggcccattcttcacacgcctgccagaagctggaggggtgctggagacccatagagctgatgggagcagctggtgcctggccttcggctcctgcgtccccagaacccaagggaacgtcatggaggccacatggggccacccggctccctcgggatggctccgcctgcacttttgaaaccccggtttccttcaacgtccacattccaggtgaccacacgtgtctcctcctcctcatcttagcttccaggttcaccctaaccctgtactaacctgcttggtggacttggaaaagacttggctctgtcgggaaaggagagacggggcctccatcacgcctgttaccagaggatccccgagagccacaccagctctggacatcaccgcccctggaactggggccaccagccctgggcacgagatttgctctgactttatttatatggcatgaaatctctggtttattttgggattttttgttgttggtgttgtcaaagtttgttttttctaaagttgtgtgattatatatttgacattttacatttcaaagaaaggtatgttgtctaacaggggaccaacagaaggtagtattgacaactgttcctgcttctactaaaaaaaaaagagcacaaaagaaaaactaaattattgaaaaattaaaaaatgtcattgtttcctgtttgttaatattagggttgtaaggtgtcgttttgaggtatcgactgtgattccttcccccaccctccattctccagcggttggccggtgttagaactcgctctctttgagtgactggctacaagggcctgagaggtggccagccagggttggagctggaggggatggagccccacctgaggtgccgtgtcacacgggttagagggtcactgggaaacaccgggcggtggcttctgtgatttattttcttgatggtaacttctcagagcagggcgattgggacatcaccagccagagcacaggaagccaccctgcctgctggggaggagggacccacacaagccccctcggcagtttgtccccccagcttcggtatgccttcagggaaaggtcacagctggggaggaagcggggggacgcctgtcacccctggcaggtggtgagttcaggtgggggctccctgctgcccccaggcctgggagcttgaagccctcccggcatctggcatccgagcctcccgccctccagggtgcgcttccctctcttgccgcagcatacacgagggcaggcagtggccttgtcactgtatcttgcatcagagacaaaggaggacccgctttagccctgctgcgggaaatgggggagggcccagggccagcgcattgtgcactggtttactttaaaatgtacagattcttctcgttaaattcttgatagattttttattattattaaaagtcagtttataatacaaagaaaaaaaatgtga

SEQ ID NO: 294547 - DNA, 4301 bp, Homo sapiens
cttactctggcttctggcagggcctgtaccagtggatctaccacacccatgaggatgcccaggaagcacgagccagtcaggaggcctccactgaggaccccagtggcgagcaggcccaggaggaagaccaggctgattcagccttcccactgctgtccctgggtccccggctgagcctgtgtgaggacagccccatggtcaccctgactgtggacaacgtgcacctggaacacggcgtggtgtatgagtatgtgagcacggcaggcgtcaggtgccatgtgctggagaagatcgtggagccccgcggctgcttcggcctcaccgccaagatcctcgaggcctttgctgccaatgacagcgtcttcgtggagaactgcaggcggctcatggccctgagcagcgccatcgtgaccatgccccactttgagttccgcaacatctgtgacaccaagctggagagcattggccagaggattgcctgctaccaggagtttgcagcccaactgaagagcagggtcagcccacccttcaaacaagcccccctggagccccacccgctgtgtggcctggacttctgccccaccaattgccacatcaacctcatggaagtgtcctaccccaagaccaccccctcagtgggcaggtccttcagcatccgctttggacgcaaaccctccctcatcggccttgacccggagcaaggccacctgaaccccatgtcgtacacccagcactgcatcaccaccatggctgctccctcctggaagtgcttgcctgctgcagagggtgatccccaaggccagggtctccatgatggcagcttcgggccagccagtgggacccttggtcaggaagaccggggcctcagcttcctactcaagcaggaggaccgtgagatccaggatgcctacctgcagctcttcaccaagctggatgtggccctgaaggagatgaagcaatatgtcacccagatcaacaggctgctgtccaccatcacagagcccacctcgggtgggtcctgcgacgcatccttggctgaggaggcctcctccctgcccctggtcagtgaagagagcgagatggacaggagtgaccatgggggcatcaagaaggtgtgcttcaaggtggccgaggaggaccaggaggactcaggccacgacaccatgagttatcgcgactcctacagcgagtgtaacagcaatcgagactcggtcctgtcctacaccagcgtgagaagtaacagctcctacttgggcagcgacgagatggggtctggagatgagctgccctgtgacatgcggatcccatctgacaagcaggacaagcttcatggctgcctggagcacctctttaaccaggtggactccatcaatgctctcctcaaggggccagtcatgagccgggctttcgaagagaccaagcatttccctatgaaccacagcttacaagagtttaaacagaaagaagagtgtacaatccgtggccggagcctgatccagattagcatccaggaggacccctggaacctccccaactccatcaagaccctggtggacaacattcagagatatgtggaagatgggaagaaccagctgctcctggccttgctgaagtgcacagacacggagctgcagctgcgcagagacgcgatcttctgccaggccctggtggccgccgtgtgcaccttctccgagcagctgctggcggccctgggctaccgctacaacaacaatggcgagtacgaggagagcagccgcgacgccagccgcaagtggctggagcaggtggcggccacgggcgtcctgctgcactgccagtccctgctctcgccagccacagtgaaggaggaacggaccatgctggaggacatctgggtgacgctgtcagagctggacaatgtcaccttctcctttaagcagctggacgagaactatgtggccaacaccaacgtcttctaccacattgagggcagccggcaggcgctgaaggtcatcttctacctcgacagctaccacttctccaagctgccctcccgcctggagggtggggccagcctgaggctgcacacagcgctgttcacgaaagtgctggagaacgtggaggggctgccttctccaggcagccaggccgcggaggatttgcagcaggacatcaacgcgcagtccctggagaaagttcagcagtattaccgcaaactcagggcattttacctggagcggtctaacctgcccacggatgccagcaccacggcggtaaagatagaccagctgatccgccccatcaatgccctggatgagctctgccgcctcatgaagtcctttgtccacccaaagcctggtgctgctgggagtgtgggcgccggcctcatccccatctcctcggagctctgctaccgcctgggggcctgccagatggtcatgtgtggcacaggcatgcagaggagcaccctgagcgtgtccctggagcaggcggccatcttggcacggagccacgggttgctgcccaagtgcatcatgcaggccacggacatcatgcggaagcagggcccaagggtggagattctggccaaaaacctgcgagtcaaggaccagatgccccagggtgctccgcgcctctaccgcctctgccagccgccggtggatggggacctctgaacacccaaatgccccacgctgggccgcggcctctggagctgggatttgggaggacacagcaggcagcgctggccttctccagggatggcccaaggcttccgcagccgcccgttccgggacctgcccagcgtcctccctgcctccttccgggacaagcctggccaccctcgctgtgatgacgagctggctgattggccctgggccggcccattcttcacacgcctgccagaagctggaggggtgctggagacccatagagctgatgggagcagctggtgcctggccttcggctcctgcgtccccagaacccaagggaacgtcatggaggccacatggggccacccggctccctcgggatggctccgcctgcacttttgaaaccccggtttccttcaacgtccacattccaggtgaccacacgtgtctcctcctcctcatcttagcttccaggttcaccctaaccctgtactaacctgcttggtggacttggaaaagacttggctctgtcgggaaaggagagacggggcctccatcacgcctgttaccagaggatccccgagagccacaccagctctggacatcaccgcccctggaactggggccaccagccctgggcacgagatttgctctgactttatttatatggcatgaaatctctggtttattttgggattttttgttgttggtgttgtcaaagtttgttttttctaaagttgtgtgattatatatttgacattttacatttcaaagaaaggtatgttgtctaacaggggaccaacagaaggtagtattgacaactgttcctgcttctactaaaaaaaaaagagcacaaaagaaaaactaaattattgaaaaattaaaaaatgtcattgtttcctgtttgttaatattagggttgtaaggtgtcgttttgaggtatcgactgtgattccttcccccaccctccattctccagcggttggccggtgttagaactcgctctctttgagtgactggctacaagggcctgagaggtggccagccagggttggagctggaggggatggagccccacctgaggtgccgtgtcacacgggttagagggtcactgggaaacaccgggcggtggcttctgtgatttattttcttgatggtaacttctcagagcagggcgattgggacatcaccagccagagcacaggaagccaccctgcctgctggggaggagggacccacacaagccccctcggcagtttgtccccccagcttcggtatgccttcagggaaaggtcacagctggggaggaagcggggggacgcctgtcacccctggcaggtggtgagttcaggtgggggctccctgctgcccccaggcctgggagcttgaagccctcccggcatctggcatccgagcctcccgccctccagggtgcgcttccctctcttgccgcagcatacacgagggcaggcagtggccttgtcactgtatcttgcatcagagacaaaggaggacccgctttagccctgctgcgggaaatgggggagggcccagggccagcgcattgtgcactggtttactttaaaatgtacagattcttctcgttaaattcttgatagattttttattattattaaaagtcagtttataatacaaagaaaaaaaatgtga

SEQ ID NO: 294548 - DNA, 5796 bp, Homo sapiens
tcgaatcgtaaccgttcgtacgagaatcgctgtcctctccttgcggccgcccgggagtccgagcgccagctgcgcctccgcctctgcgtcctcaacgagatcttgggcaccgagagggactacgtgggcaccttgcgcttcttgcagtcggcattcctgcatcgcatccggcagaacgtggccgactcagtggagaagggcctcacggaggagaatgtcaaggtcctgttctcgaacatcgaagacatcctggaagttcataaggatttcttggccgccttggagtattgtttacacccggagccgcagtctcagcatgaacttgggaatgttttcttaaaattcaaggacaagttctgcgtgtacgaggagtattgcagcaaccatgagaaagccctgaggctgctggtggagctgaacaagatccctaccgtgcgcgccttccttttgagctgcatgcttctgggaggccggaagaccacggacatccctttggaaggctacctgttgtctccgatccagaggatctgcaagtacccgctcctccttaaggagctggccaagaggactcccggcaagcacccagaccaccccgcggtccagagtgccctgcaggccatgaagaccgtttgctccaacatcaatgagaccaagcggcagatggagaagctggaagccctggagcagctgcagtcccacatcgaaggctgggagggttccaacctcacagacatctgcactcagctcctcctgcaagggactttgttaaagatctctgcgggcaacatccaggaaagggccttcttcctcttcgacaaccttctcgtctactgcaagcggaaatccagggtcaccgggagcaagaagtccaccaagaggaccaaatccatcaacggctccctctacatcttcaggggtcgaatcaacactgaagtcatggaggtggagaatgtggaagatgggacagcggattaccatagcaacggctataccgtcaccaacggctggaagatccacaacacggccaagaataagtggtttgtctgcatggccaagacggcagaggagaagcagaagtggctggatgccatcatccgcgagcgggagcagcgcgagagcctgaagctgggcatggagcgtgatgcctacgtcatgattgcggagaagggggagaagctgtaccacatgatgatgaacaagaaggtgaacctcatcaaggaccgccggagaaagctgagcactgtccccaagtgctttcttggcaatgagttcgttgcctggctcctagaaattggtgaaatcagcaagacggaagaaggagtcaacttgggccaagccctgttggagaatggcatcatccaccatgtttccgacaagcaccagttcaagaatgagcaggtgatgtatcgcttccgctacgacgatggcacctacaaggcccgaagtgagctggaggacatcatgtccaagggtgtgaggctttactgccgtcttcacagcctctacaccccggtgatcaaagaccgtgattaccacctgaagacctacaagtcagtgcttcccgggagcaagctggtggactggctgctggctcagggagactgccagactcgggaggaggcagtggcgctcggcgtgggtctgtgcaacaatggcttcatgcaccacgtgctggagaagagcgagttcagggatgagtcccagtacttccgctttcatgctgacgaggagatggaggggaccagcagcaagaacaaacagcttcgcaacgacttcaagctggtggagaacattctggccaagcgcctgctgatcctgccccaggaggaggactatggctttgacatcgaggagaagaacaaggctgtggtggtgaagtccgtccagaggggctcgctggctgaggtggctggcctgcaggtggggaggaagatctactccatcaatgaggacctggtgttcctgcggccgttttcagaggtggagtccatcctcaaccagtccttctgctcccgccgccctctgcgcctcctggtggccacgaaggccaaagagatcatcaaaatccccgaccagccggacacactgtgcttccagattcgtggagctgccccaccgtacgtctatgctgtggggagaggctctgaggccatggctgcagggctctgtgctggtcagtgcattctgaaggtcaatggcagcaacgtgatgaacgatggtgcccctgaggtcctggagcacttccaggcattccggagtcggcgcgaagaggccctgggcctgtaccagtggatctaccacacccatgaggatgcccaggaagcacgagccagtcaggaggcctccactgaggaccccagtggcgagcaggcccaggaggaagaccaggctgattcagccttcccactgctgtccctgggtccccggctgagcctgtgtgaggacagccccatggtcaccctgactgtggacaacgtgcacctggaacacggcgtggtgtatgagtatgtgagcacggcaggcgtcaggtgccatgtgctggagaagatcgtggagccccgcggctgcttcggcctcaccgccaagatcctcgaggcctttgctgccaatgacagcgtcttcgtggagaactgcaggcggctcatggccctgagcagcgccatcgtgaccatgccccactttgagttccgcaacatctgtgacaccaagctggagagcattggccagaggattgcctgctaccaggagtttgcagcccaactgaagagcagggtcagcccacccttcaaacaagcccccctggagccccacccgctgtgtggcctggacttctgccccaccaattgccacatcaacctcatggaagtgtcctaccccaagaccaccccctcagtgggcaggtccttcagcatccgctttggacgcaaaccctccctcatcggccttgacccggagcaaggccacctgaaccccatgtcgtacacccagcactgcatcaccaccatggctgctccctcctggaagtgcttgcctgctgcagagggtgatccccaaggccagggtctccatgatggcagcttcgggccagccagtgggacccttggtcaggaagaccggggcctcagcttcctactcaagcaggaggaccgtgagatccaggatgcctacctgcagctcttcaccaagctggatgtggccctgaaggagatgaagcaatatgtcacccagatcaacaggctgctgtccaccatcacagagcccacctcgggtgggtcctgcgacgcatccttggctgaggaggcctcctccctgcccctggtcagtgaagagagcgagatggacaggagtgaccatgggggcatcaagaaggtgtgcttcaaggtggccgaggaggaccaggaggactcaggccacgacaccatgagttatcgcgactcctacagcgagtgtaacagcaatcgagactcggtcctgtcctacaccagcgtgagaagtaacagctcctacttgggcagcgacgagatggggtctggagatgagctgccctgtgacatgcggatcccatctgacaagcaggacaagcttcatggctgcctggagcacctctttaaccaggtggactccatcaatgctctcctcaaggggccagtcatgagccgggctttcgaagagaccaagcatttccctatgaaccacagcttacaagagtttaaacagaaagaagagtgtacaatccgtggccggagcctgatccagattagcatccaggaggacccctggaacctccccaactccatcaagaccctggtggacaacattcagagatatgtggaagatgggaagaaccagctgctcctggccttgctgaagtgcacagacacggagctgcagctgcgcagagacgcgatcttctgccaggccctggtggccgccgtgtgcaccttctccgagcagctgctggcggccctgggctaccgctacaacaacaatggcgagtacgaggagagcagccgcgacgccagccgcaagtggctggagcaggtggcggccacgggcgtcctgctgcactgccagtccctgctctcgccagccacagtgaaggaggaacggaccatgctggaggacatctgggtgacgctgtcagagctggacaatgtcaccttctcctttaagcagctggacgagaactatgtggccaacaccaacgtcttctaccacattgagggcagccggcaggcgctgaaggtcatcttctacctcgacagctaccacttctccaagctgccctcccgcctggagggtggggccagcctgaggctgcacacagcgctgttcacgaaagtgctggagaacgtggaggggctgccttctccaggcagccaggccgcggaggatttgcagcaggacatcaacgcgcagtccctggagaaagttcagcagtattaccgcaaactcagggcattttacctggagcggtctaacctgcccacggatgccagcaccacggcggtaaagatagaccagctgatccgccccatcaatgccctggatgagctctgccgcctcatgaagtcctttgtccacccaaagcctggtgctgctgggagtgtgggcgccggcctcatccccatctcctcggagctctgctaccgcctgggggcctgccagatggtcatgtgtggcacaggcatgcagaggagcaccctgagcgtgtccctggagcaggcggccatcttggcacggagccacgggttgctgcccaagtgcatcatgcaggccacggacatcatgcggaagcagggcccaagggtggagattctggccaaaaacctgcgagtcaaggaccagatgccccagggtgctccgcgcctctaccgcctctgccagccgccggtggatggggacctctgaacacccaaatgccccacgctgggccgcggcctctggagctgggatttgggaggacacagcaggcagcgctggccttctccagggatggcccaaggcttccgcagccgcccgttccgggacctgcccagcgtcctccctgcctccttccgggacaagcctggccaccctcgctgtgatgacgagctggctgattggccctgggccggcccattcttcacacgcctgccagaagctggaggggtgctggagacccatagagctgatgggagcagctggtgcctggccttcggctcctgcgtccccagaacccaagggaacgtcatggaggccacatggggccacccggctccctcgggatggctccgcctgcacttttgaaaccccggtttccttcaacgtccacattccaggtgaccacacgtgtctcctcctcctcatcttagcttccaggttcaccctaaccctgtactaacctgcttggtggacttggaaaagacttggctctgtcgggaaaggagagacggggcctccatcacgcctgttaccagaggatccccgagagccacaccagctctggacatcaccgcccctggaactggggccaccagccctgggcacgagatttgctctgactttatttatatggcatgaaatctctggtttattttgggattttttgttgttggtgttgtcaaagtttgttttttctaaagttgtgtgattatatatttgacattttacatttcaaagaaaggtatgttgtctaacaggggaccaacagaaggtagtattgacaactgttcctgcttctactaaaaaaaaaagagcacaaaagaaaaactaaattattgaaaaattaaaaaatgtcattgtttcctgtttgtt

SEQ ID NO: 294549 - DNA, 5310 bp, Homo sapiens
tcgaatcgtaaccgttcgtacgagaatcgctgtcctctccttgcggccgcccgggagtccgagcgccagctgcgcctccgcctctgcgtcctcaacgagatcttgggcaccgagagggactacgtgggcaccttgcgcttcttgcagtcggcattcctgcatcgcatccggcagaacgtggccgactcagtggagaagggcctcacggaggagaatgtcaaggtcctgttctcgaacatcgaagacatcctggaagttcataaggatttcttggccgccttggagtattgtttacacccggagccgcagtctcagcatgaacttgggaatgttttcttaaaattcaaggacaagttctgcgtgtacgaggagtattgcagcaaccatgagaaagccctgaggctgctggtggagctgaacaagatccctaccgtgcgcgccttccttttgagctgcatgcttctgggaggccggaagaccacggacatccctttggaaggctacctgttgtctccgatccagaggatctgcaagtacccgctcctccttaaggagctggccaagaggactcccggcaagcacccagaccaccccgcggtccagagtgccctgcaggccatgaagaccgtttgctccaacatcaatgagaccaagcggcagatggagaagctggaagccctggagcagctgcagtcccacatcgaaggctgggagggttccaacctcacagacatctgcactcagctcctcctgcaagggactttgttaaagatctctgcgggcaacatccaggaaagggccttcttcctcttcgacaaccttctcgtctactgcaagcggaaatccagggtcaccgggagcaagaagtccaccaagaggaccaaatccatcaacggctccctctacatcttcaggggtcgaatcaacactgaagtcatggaggtggagaatgtggaagatgggacagcggattaccatagcaacggctataccgtcaccaacggctggaagatccacaacacggccaagaataagtggtttgtctgcatggccaagacggcagaggagaagcagaagtggctggatgccatcatccgcgagcgggagcagcgcgagagcctgaagctgggcatggagcgtgatgcctacgtcatgattgcggagaagggggagaagctgtaccacatgatgatgaacaagaaggtgaacctcatcaaggaccgccggagaaagctgagcactgtccccaagtgctttcttggcaatgagttcgttgcctggctcctagaaattggtgaaatcagcaagacggaagaaggagtcaacttgggccaagccctgttggagaatggcatcatccaccatgtttccgacaagcaccagttcaagaatgagcaggtgatgtatcgcttccgctacgacgatggcacctacaaggcccgaagtgagctggaggacatcatgtccaagggtgtgaggctttactgccgtcttcacagcctctacaccccggtgatcaaagaccgtgattaccacctgaagacctacaagtcagtgcttcccgggagcaagctggtggactggctgctggctcagggagactgccagactcgggaggaggcagtggcgctcggcgtgggtctgtgcaacaatggcttcatgcaccacgtgctggagaagagcgagttcagggatgagtcccagtacttccgctttcatgctgacgaggagatggaggggaccagcagcaagaacaaacagcttcgcaacgacttcaagctggtggagaacattctggccaagcgcctgctgatcctgccccaggaggaggactatggctttgacatcgaggagaagaacaaggctgtggtggtgaagtccgtccagaggggctcgctggctgaggtggctggcctgcaggtggggaggaagatctactccatcaatgaggacctggtgttcctgcggccgttttcagaggtggagtccatcctcaaccagtccttctgctcccgccgccctctgcgcctcctggtggccacgaaggccaaagagatcatcaaaatccccgaccagccggacacactgtgcttccagattcgtggagctgccccaccgtacgtctatgctgtggggagaggctctgaggccatggctgcagggctctgtgctggtcagtgcattctgaaggtcaatggcagcaacgtgatgaacgatggtgcccctgaggtcctggagcacttccaggcattccggagtcggcgcgaagaggccctgggcctgtaccagtggatctaccacacccatgaggatgcccaggaagcacgagccagtcaggaggcctccactgaggaccccagtggcgagcaggcccaggaggaagaccaggctgattcagccttcccactgctgtccctgggtccccggctgagcctgtgtgaggacagccccatggtcaccctgactgtggacaacgtgcacctggaacacggcgtggtgtatgagtatgtgagcacggcaggcgtcaggtgccatgtgctggagaagatcgtggagccccgcggctgcttcggcctcaccgccaagatcctcgaggcctttgctgccaatgacagcgtcttcgtggagaactgcaggcggctcatggccctgagcagcgccatcgtgaccatgccccactttgagttccgcaacatctgtgacaccaagctggagagcattggccagaggattgcctgctaccaggagtttgcagcccaactgaagagcagggtcagcccacccttcaaacaagcccccctggagccccacccgctgtgtggcctggacttctgccccaccaattgccacatcaacctcatggaagtgtcctaccccaagaccaccccctcagtgggcaggtccttcagcatccgctttggacgcaaaccctccctcatcggccttgacccggagcaaggccacctgaaccccatgtcgtacacccagcactgcatcaccaccatggctgctccctcctggaagtgcttgcctgctgcagagggtgatccccaaggccagggtctccatgatggcagcttcgggccagccagtgggacccttggtcaggaagaccggggcctcagcttcctactcaagcaggaggaccgtgagatccaggatgcctacctgcagctcttcaccaagctggatgtggccctgaaggagatgaagcaatatgtcacccagatcaacaggctgctgtccaccatcacagagcccacctcgggtgggtcctgcgacgcatccttggctgaggaggcctcctccctgcccctggtcagtgaagagagcgagatggacaggagtgaccatgggggcatcaagaaggtgtgcttcaaggtggccgaggaggaccaggaggactcaggccacgacaccatgagttatcgcgactcctacagcgagtgtaacagcaatcgagactcggtcctgtcctacaccagcgtgagaagtaacagctcctacttgggcagcgacgagatggggtctggagatgagctgccctgtgacatgcggatcccatctgacaagcaggacaagcttcatggctgcctggagcacctctttaaccaggtggactccatcaatgctctcctcaaggggccagtcatgagccgggctttcgaagagaccaagcatttccctatgaaccacagcttacaagagtttaaacagaaagaagagtgtacaatccgtggccggagcctgatccagattagcatccaggaggacccctggaacctccccaactccatcaagaccctggtggacaacattcagagatatgtggaagatgggaagaaccagctgctcctggccttgctgaagtgcacagacacggagctgcagctgcgcagagacgcgatcttctgccaggccctggtggccgccgtgtgcaccttctccgagcagctgctggcggccctgggctaccgctacaacaacaatggcgagtacgaggagagcagccgcgacgccagccgcaagtggctggagcaggtggcggccacgggcgtcctgctgcactgccagtccctgctctcgccagccacagtgaaggaggaacggaccatgctggaggacatctgggtgacgctgtcagagctggacaatgtcaccttctcctttaagcagctggacgagaactatgtggccaacaccaacgtcttctaccacattgagggcagccggcaggcgctgaaggtcatcttctacctcgacagctaccacttctccaagctgccctcccgcctggagggtggggccagcctgaggctgcacacagcgctgttcacgaaagtgctggagaacgtggaggggctgccttctccaggcagccaggccgcggaggatttgcagcaggacatcaacgcgcagtccctggagaaagttcagcagtattaccgcaaactcagggcattttacctggagcggtctaacctgcccacggatgccagcaccacggcggtaaagatagaccagctgatccgccccatcaatgccctggatgagctctgccgcctcatgaagtcctttgtccacccaaagcctggtgctgctgggagtgtgggcgccggcctcatccccatctcctcggagctctgctaccgcctgggggcctgccagatggtcatgtgtggcacaggcatgcagaggagcaccctgagcgtgtccctggagcaggcggccatcttggcacggagccacgggttgctgcccaagtgcatcatgcaggccacggacatcatgcggaagcagggcccaagggtggagattctggccaaaaacctgcgagtcaaggaccagatgccccagggtgctccgcgcttccaggttcaccctaaccctgtactaacctgcttggtggacttggaaaagacttggctctgtcgggaaaggagagacggggcctccatcacgcctgttaccagaggatccccgagagccacaccagctctggacatcaccgcccctggaactggggccaccagccctgggcacgagatttgctctgactttatttatatggcatgaaatctctggtttattttgggattttttgttgttggtgttgtcaaagtttgttttttctaaagttgtgtgattatatatttgacattttacatttcaaagaaaggtatgttgtctaacaggggaccaacagaaggtagtattgacaactgttcctgcttctactaaaaaaaaaagagcacaaaagaaaaactaaattattgaaaaattaaaaaatgtcattgtttcctgtttgtt

SEQ ID NO: 294550 - DNA, 4223 bp, Homo sapiens
tcgaatcgtaaccgttcgtacgagaatcgctgtcctctccttgcggccgcccgggagtccgagcgccagctgcgcctccgcctctgcgtcctcaacgagatcttgggcaccgagagggactacgtgggcaccttgcgcttcttgcagtcggcattcctgcatcgcatccggcagaacgtggccgactcagtggagaagggcctcacggaggagaatgtcaaggtcctgttctcgaacatcgaagacatcctggaagttcataaggatttcttggccgccttggagtattgtttacacccggagccgcagtctcagcatgaacttgggaatgttttcttaaaattcaaggacaagttctgcgtgtacgaggagtattgcagcaaccatgagaaagccctgaggctgctggtggagctgaacaagatccctaccgtgcgcgccttccttttgagctgcatgcttctgggaggccggaagaccacggacatccctttggaaggctacctgttgtctccgatccagaggatctgcaagtacccgctcctccttaaggagctggccaagaggactcccggcaagcacccagaccaccccgcggtccagagtgccctgcaggccatgaagaccgtttgctccaacatcaatgagaccaagcggcagatggagaagctggaagccctggagcagctgcagtcccacatcgaaggctgggagggttccaacctcacagacatctgcactcagctcctcctgcaagggactttgttaaagatctctgcgggcaacatccaggaaagggccttcttcctcttcgacaaccttctcgtctactgcaagcggaaatccagggtcaccgggagcaagaagtccaccaagaggaccaaatccatcaacggctccctctacatcttcaggggtcgaatcaacactgaagtcatggaggtggagaatgtggaagatgggacagcggattaccatagcaacggctataccgtcaccaacggctggaagatccacaacacggccaagaataagtggtttgtctgcatggccaagacggcagaggagaagcagaagtggctggatgccatcatccgcgagcgggagcagcgcgagagcctgaagctgggcatggagcgtgatgcctacgtcatgattgcggagaagggggagaagctgtaccacatgatgatgaacaagaaggtgaacctcatcaaggaccgccggagaaagctgagcactgtccccaagtgctttcttggcaatgagttcgttgcctggctcctagaaattggtgaaatcagcaagacggaagaaggagtcaacttgggccaagccctgttggagaatggcatcatccaccatgtttccgacaagcaccagttcaagaatgagcaggtgatgtatcgcttccgctacgacgatggcacctacaaggcccgaagtgagctggaggacatcatgtccaagggtgtgaggctttactgccgtcttcacagcctctacaccccggtgatcaaagaccgtgattaccacctgaagacctacaagtcagtgcttcccgggagcaagctggtggactggctgctggctcagggagactgccagactcgggaggaggcagtggcgctcggcgtgggtctgtgcaacaatggcttcatgcaccacgtgctggagaagagcgagttcagggatgagtcccagtacttccgctttcatgctgacgaggagatggaggggaccagcagcaagaacaaacagcttcgcaacgacttcaagctggtggagaacattctggccaagcgcctgctgatcctgccccaggaggaggactatggctttgacatcgaggagaagaacaaggctgtggtggtgaagtccgtccagaggggctcgctggctgaggtggctggcctgcaggtggggaggaagatctactccatcaatgaggacctggtgttcctgcggccgttttcagaggtggagtccatcctcaaccagtccttctgctcccgccgccctctgcgcctcctggtggccacgaaggccaaagagatcatcaaaatccccgaccagccggacacactgtgcttccagattcgtggagctgccccaccgtacgtctatgctgtggggagaggctctgaggccatggctgcagggctctgtgctggtcagtgcattctgaaggtcaatggcagcaacgtgatgaacgatggtgcccctgaggtcctggagcacttccaggcattccggagtcggcgcgaagaggccctgggcctgtaccagtggatctaccacacccatgaggatgcccaggaagcacgagccagtcaggaggcctccactgaggaccccagtggcgagcaggcccaggaggaagaccaggctgattcagccttcccactgctgtccctgggtccccggctgagcctgtgtgaggacagccccatggtcaccctgactgtggacaacgtgcacctggaacacggcgtggtgtatgagtatgtgagcacggcaggcgtcaggtgccatgtgctggagaagatcgtggagccccgcggctgcttcggcctcaccgccaagatcctcgaggcctttgctgccaatgacagcgtcttcgtggagaactgcaggcggctcatggccctgagcagcgccatcgtgaccatgccccactttgagttccgcaacatctgtgacaccaagctggagagcattggccagaggattgcctgctaccaggagtttgcagcccaactgaagagcagggtcagcccacccttcaaacaagcccccctggagccccacccgctgtgtggcctggacttctgccccaccaattgccacatcaacctcatggaagtgtcctaccccaagaccaccccctcagtgggcaggtccttcagcatccgctttggacgcaaaccctccctcatcggccttgacccggagcaaggccacctgaaccccatgtcgtacacccagcactgcatcaccaccatggctgctccctcctggaagtgcttgcctgctgcagagggtgatccccaaggccagggtctccatgatggcagcttcgggccagccagtgggacccttggtcaggaagaccggggcctcagcttcctactcaagcaggaggaccgtgagatccaggatgcctacctgcagctcttcaccaagctggatgtggccctgaaggagatgaagcaatatgtcacccagatcaacaggctgctgtccaccatcacagagcccacctcgggtgggtcctgcgacgcatccttggctgaggaggcctcctccctgcccctggtcagtgaagagagcgagatggacaggagtgaccatgggggcatcaagaaggtgtgcttcaaggtggccgaggaggaccaggaggactcaggccacgacaccatgagttatcgcgactcctacagcgagtgtaacagcaatcgagactcggtcctgtcctacaccagcgtgagaagtaacagctcctacttgggcagcgacgagatggggtctggagatgagctgccctgtgacatgcggatcccatctgacaagcaggacaagcttcatggctgcctggagcacctctttaaccaggtggactccatcaatgctctcctcaaggggccagtcatgagccgggctttcgaagagaccaagcatttccctatgaaccacagcttacaagagtttaaacagaaagaagagtgtacaatccgtggccggagcctgatccagattagcatccaggaggacccctggaacctccccaactccatcaagaccctggtggacaacattcagagatatgtggaagatgggaagaaccagctgctcctggccttgctgaagtgcacagacacggagctgcagctgcgcagagacgcgatcttctgccaggccctggtggccgccgtgtgcaccttctccgagcagctgctggcggccctgggctaccgctacaacaacaatggcgagtacgaggagagcagccgcgacgccagccgcaagtggctggagcaggtggcggccacgggcgtcctgctgcactgccagtccctgctctcgccagccacagtgaaggaggaacggaccatgctggaggacatctgggtgacgctgtcagagctggacaatgtcaccttctcctttaagcagctggacgagaactatgtggccagtgagtgatttctcccatcccccac

SEQ ID NO: 294551 - DNA, 4800 bp, Homo sapiens
tcgaatcgtaaccgttcgtacgagaatcgctgtcctctccttgcggccgcccgggagtccgagcgccagctgcgcctccgcctctgcgtcctcaacgagatcttgggcaccgagagggactacgtgggcaccttgcgcttcttgcagtcggcattcctgcatcgcatccggcagaacgtggccgactcagtggagaagggcctcacggaggagaatgtcaaggtcctgttctcgaacatcgaagacatcctggaagttcataaggatttcttggccgccttggagtattgtttacacccggagccgcagtctcagcatgaacttgggaatgttttcttaaaattcaaggacaagttctgcgtgtacgaggagtattgcagcaaccatgagaaagccctgaggctgctggtggagctgaacaagatccctaccgtgcgcgccttccttttgagctgcatgcttctgggaggccggaagaccacggacatccctttggaaggctacctgttgtctccgatccagaggatctgcaagtacccgctcctccttaaggagctggccaagaggactcccggcaagcacccagaccaccccgcggtccagagtgccctgcaggccatgaagaccgtttgctccaacatcaatgagaccaagcggcagatggagaagctggaagccctggagcagctgcagtcccacatcgaaggctgggagggttccaacctcacagacatctgcactcagctcctcctgcaagggactttgttaaagatctctgcgggcaacatccaggaaagggccttcttcctcttcgacaaccttctcgtctactgcaagcggaaatccagggtcaccgggagcaagaagtccaccaagaggaccaaatccatcaacggctccctctacatcttcaggggtcgaatcaacactgaagtcatggaggtggagaatgtggaagatgggacagcggattaccatagcaacggctataccgtcaccaacggctggaagatccacaacacggccaagaataagtggtttgtctgcatggccaagacggcagaggagaagcagaagtggctggatgccatcatccgcgagcgggagcagcgcgagagcctgaagctgggcatggagcgtgatgcctacgtcatgattgcggagaagggggagaagctgtaccacatgatgatgaacaagaaggtgaacctcatcaaggaccgccggagaaagctgagcactgtccccaagtgctttcttggcaatgagttcgttgcctggctcctagaaattggtgaaatcagcaagacggaagaaggagtcaacttgggccaagccctgttggagaatggcatcatccaccatgtttccgacaagcaccagttcaagaatgagcaggtgatgtatcgcttccgctacgacgatggcacctacaaggcccgaagtgagctggaggacatcatgtccaagggtgtgaggctttactgccgtcttcacagcctctacaccccggtgatcaaagaccgtgattaccacctgaagacctacaagtcagtgcttcccgggagcaagctggtggactggctgctggctcagggagactgccagactcgggaggaggcagtggcgctcggcgtgggtctgtgcaacaatggcttcatgcaccacgtgctggagaagagcgagttcagggatgagtcccagtacttccgctttcatgctgacgaggagatggaggggaccagcagcaagaacaaacagcttcgcaacgacttcaagctggtggagaacattctggccaagcgcctgctgatcctgccccaggaggaggactatggctttgacatcgaggagaagaacaaggctgtggtggtgaagtccgtccagaggggctcgctggctgaggtggctggcctgcaggtggggaggaagatctactccatcaatgaggacctggtgttcctgcggccgttttcagaggtggagtccatcctcaaccagtccttctgctcccgccgccctctgcgcctcctggtggccacgaaggccaaagagatcatcaaaatccccgaccagccggacacactgtgcttccagattcgtggagctgccccaccgtacgtctatgctgtggggagaggctctgaggccatggctgcagggctctgtgctggtcagtgcattctgaaggtcaatggcagcaacgtgatgaacgatggtgcccctgaggtcctggagcacttccaggcattccggagtcggcgcgaagaggccctgggcctgtaccagtggatctaccacacccatgaggatgcccaggaagcacgagccagtcaggaggcctccactgaggaccccagtggcgagcaggcccaggaggaagaccaggctgattcagccttcccactgctgtccctgggtccccggctgagcctgtgtgaggacagccccatggtcaccctgactgtggacaacgtgcacctggaacacggcgtggtgtatgagtatgtgagcacggcaggcgtcaggtgccatgtgctggagaagatcgtggagccccgcggctgcttcggcctcaccgccaagatcctcgaggcctttgctgccaatgacagcgtcttcgtggagaactgcaggcggctcatggccctgagcagcgccatcgtgaccatgccccactttgagttccgcaacatctgtgacaccaagctggagagcattggccagaggattgcctgctaccaggagtttgcagcccaactgaagagcagggtcagcccacccttcaaacaagcccccctggagccccacccgctgtgtggcctggacttctgccccaccaattgccacatcaacctcatggaagtgtcctaccccaagaccaccccctcagtgggcaggtccttcagcatccgctttggacgcaaaccctccctcatcggccttgacccggagcaaggccacctgaaccccatgtcgtacacccagcactgcatcaccaccatggctgctccctcctggaagtgcttgcctgctgcagagggtgatccccaaggccagggtctccatgatggcagcttcgggccagccagtgggacccttggtcaggaagaccggggcctcagcttcctactcaagcaggaggaccgtgagatccaggatgcctacctgcagctcttcaccaagctggatgtggccctgaaggagatgaagcaatatgtcacccagatcaacaggctgctgtccaccatcacagagcccacctcgggtgggtcctgcgacgcatccttggctgaggaggcctcctccctgcccctggtcagtgaagagagcgagatggacaggagtgaccatgggggcatcaagaaggtgtgcttcaaggtggccgaggaggaccaggaggactcaggccacgacaccatgagttatcgcgactcctacagcgagtgtaacagcaatcgagactcggtcctgtcctacaccagcgtgagaagtaacagctcctacttgggcagcgacgagatggggtctggagatgagctgccctgtgacatgcggatcccatctgacaagcaggacaagcttcatggctgcctggagcacctctttaaccaggtggactccatcaatgctctcctcaaggggccagtcatgagccgggctttcgaagagaccaagcatttccctatgaaccacagcttacaagagtttaaacagaaagaagagtgtacaatccgtggccggagcctgatccagattagcatccaggaggacccctggaacctccccaactccatcaagaccctggtggacaacattcagagatatgtggaaggtcggtgggcagggagggtgcatcatggtggggagggggccatggcttttggtgtggaacctgagagaatcaggaatggatccagttctgtgacccctgtttctccatgaccagggagaggacaagagaagtgatgccctctctcagctgagtgtcctgccctgggcaggatgtgacttgagcccaggagtttgagacctgggcaacatagtgagaccctgtctctatcaaaacaaaaatcagaaacaaaacaaaacaaaacaaagccctgactttggaggttgaaaaggctgaacctgttctttctcagcttccaaagcattggatgtgtgagttcctgttattatcagggtatgagggacaccggctggcagcccactgaccagattcaggcccacagataggtttcgatgctgcagcagcaaaaactgtgactctgcttccagcttgacaaaggttctcacatagaaacttggatttctggctgctcttgaacaacacgaagatctggtgactctaggcccagtctcccatcctcccttggtggagaggagtggcggccgctctgtgtacgtggggccgaggtgctttccagttcaccccagtctccaccactccctgtggcttggcgtctgctccacgcatcttacatcacctgcctggcccttgccggcatttgcgtctgagactcctgcgttagaaggatccggacgagggagatgtttgaccaggacagtgggagattagaggactctgggctgttccctcggggaatggcagcctctgagtcggagtctctgctgcttctgatctgtcctgttctccaaaagtgtaaccagtgaggagcatcgactctgggtccagaccaccagggcttgaatcccagctcacccacttactggctgtgtgatcatggcgagttccttgacgcctctggccttagcttcttcctgtgtcaaatgggc

SEQ ID NO: 294552 - DNA, 2696 bp, Homo sapiens
tcgaatcgtaaccgttcgtacgagaatcgctgtcctctccttgcggccgcccgggagtccgagcgccagctgcgcctccgcctctgcgtcctcaacgagatcttgggcaccgagagggactacgtgggcaccttgcgcttcttgcagtcggcattcctgcatcgcatccggcagaacgtggccgactcagtggagaagggcctcacggaggagaatgtcaaggtcctgttctcgaacatcgaagacatcctggaagttcataaggatttcttggccgccttggagtattgtttacacccggagccgcagtctcagcatgaacttgggaatgttttcttaaaattcaaggacaagttctgcgtgtacgaggagtattgcagcaaccatgagaaagccctgaggctgctggtggagctgaacaagatccctaccgtgcgcgccttccttttgagctgcatgcttctgggaggccggaagaccacggacatccctttggaaggctacctgttgtctccgatccagaggatctgcaagtacccgctcctccttaaggagctggccaagaggactcccggcaagcacccagaccaccccgcggtccagagtgccctgcaggccatgaagaccgtttgctccaacatcaatgagaccaagcggcagatggagaagctggaagccctggagcagctgcagtcccacatcgaaggctgggagggttccaacctcacagacatctgcactcagctcctcctgcaagggactttgttaaagatctctgcgggcaacatccaggaaagggccttcttcctcttcgacaaccttctcgtctactgcaagcggaaatccagggtcaccgggagcaagaagtccaccaagaggaccaaatccatcaacggctccctctacatcttcaggggtcgaatcaacactgaagtcatggaggtggagaatgtggaagatgggacagcggattaccatagcaacggctataccgtcaccaacggctggaagatccacaacacggccaagaataagtggtttgtctgcatggccaagacggcagaggagaagcagaagtggctggatgccatcatccgcgagcgggagcagcgcgagagcctgaagctgggcatggagcgtgatgcctacgtcatgattgcggagaagggggagaagctgtaccacatgatgatgaacaagaaggtgaacctcatcaaggaccgccggagaaagctgagcactgtccccaagtgctttcttggcaatgagttcgttgcctggctcctagaaattggtgaaatcagcaagacggaagaaggagtcaacttgggccaagccctgttggagaatggcatcatccaccatgtttccgacaagcaccagttcaagaatgagcaggtgatgtatcgcttccgctacgacgatggcacctacaaggcccgaagtgagctggaggacatcatgtccaagggtgtgaggctttactgccgtcttcacagcctctacaccccggtgatcaaagaccgtgattaccacctgaagacctacaagtcagtgcttcccgggagcaagctggtggactggctgctggctcagggagactgccagactcgggaggaggcagtggcgctcggcgtgggtctgtgcaacaatggcttcatgcaccacgtgctggagaagagcgagttcagggatgagtcccagtacttccgctttcatgctgacgaggagatggaggggaccagcagcaagaacaaacagcttcgcaacgacttcaagctggtggagaacattctggccaagcgcctgctgatcctgccccaggaggaggactatggctttgacatcgaggagaagaacaaggctgtggtggtgaagtccgtccagaggggctcgctggctgaggtggctggcctgcaggtggggaggaagatctactccatcaatgaggacctggtgttcctgcggccgttttcagaggtggagtccatcctcaaccagtccttctgctcccgccgccctctgcgcctcctggtggccacgaaggccaaagagatcatcaaaatccccgaccagccggacacactgtgcttccagattcgtggagctgccccaccgtacgtctatgctgtggggagaggctctgaggccatggctgcagggctctgtgctggtcagtgcattctgaaggtcaatggcagcaacgtgatgaacgatggtgcccctgaggtcctggagcacttccaggcattccggagtcggcgcgaagaggccctgggcctgtaccagtggatctaccacacccatgaggatgcccaggaagcacgagccagtcaggaggcctccactgaggaccccagtggcgagcaggcccaggaggaagaccaggctgattcagccttcccactgctgtccctgggtccccggctgagcctgtgtgaggacagccccatggtcaccctgactgtggacaacgtgcacctggaacacggcgtggtgtatgagtatgtgagcacggcaggcgtcaggtgccatgtgctggagaagatcgtggagccccgcggctgcttcggcctcaccgccaagcgagtgtaacagcaatcgagactcggtcctgtcctacaccagcgtgagaagtaacagctcctacttgggcagcgacgagatggggtctggtgagtggagtggcagcggcc

SEQ ID NO: 294553 - DNA, 1316 bp, Homo sapiens
tcgaatcgtaaccgttcgtacgagaatcgctgtcctctccttgcggccgcccgggagtccgagcgccagctgcgcctccgcctctgcgtcctcaacgagatcttgggcaccgagagggactacgtgggcaccttgcgcttcttgcagtcggcattcctgcatcgcatccggcagaacgtggccgactcagtggagaagggcctcacggaggagaatgtcaaggtcctgttctcgaacatcgaagacatcctggaagttcataaggatttcttggccgccttggagtattgtttacacccggagccgcagtctcagcatgaacttgggaatgttttcttaaaattcaaggacaagttctgcgtgtacgaggagtattgcagcaaccatgagaaagccctgaggctgctggtggagctgaacaagatccctaccgtgcgcgccttccttttgagctgcatgcttctgggaggccggaagaccacggacatccctttggaaggctacctgttgtctccgatccagaggatctgcaagtacccgctcctccttaaggagctggccaagaggactcccggcaagcacccagaccaccccgcggtccagagtgccctgcaggccatgaagaccgtttgctccaacatcaatgagaccaagcggcagatggagaagctggaagccctggagcagctgcagtcccacatcgaaggctgggagggttccaacctcacagacatctgcactcagctcctcctgcaagggactttgttaaagatctctgcgggcaacatccaggaaagggccttcttcctcttcgacaaccttctcgtctactgcaagcggaaatccagggtcaccgggagcaagaagtccaccaagaggaccaaatccatcaacggctccctctacatcttcaggggtcgaatcaacactgaagtcatggaggtggagaatgtggaagatgggacaggtagcccctcccccagccttgcctgagccctgcctgagccctgcctgctccctggcactctctctgtttcatttaaatatatttttttcttttatcatgagatgtaatctacctacagaaaagtgcccagagcatagatgcatgaagcgaacatctgggtggttagcattcaagttaagaaataaaacactgcaccccaaatccttcctccttgcaatgccttcttccccctagaagtaaccactgtctgaattttgtgatgatcattttcttgctttttaaagacatttttacctcctaagcatttatgactaaacattttaattaaaatttctatttttgagcctta

SEQ ID NO: 294554 - DNA, 579 bp, Homo sapiens
  misc_feature (56)..(56): n is a, c, g, or t
atagggctcaagcgcccgcccgggcaggtccaccatgtaagaagtgcttttcgccntgcacaatgattctgagaaattccccagacatgggaactatattgatggagcagccactctatgctggacactgggaatctagcagtgaacaaaacaaattccctgccccagctgagctaacatcctaggcagggaatcaaacaatacggcctgggtgatgcatctcaactacccttcccccttgctgttccttgaacaagtggacacactcctacctccaagcctttgcacctgctgttcctgctgcccggaacacagattagacgactgaggcccagagaaataacgtgtcttggccaaggttaccctgccagttggatttggactgggatacaaatgcaagcccgcttcattccatggtccattatgttccagccatgttctcccctcgtggtagacagaattaatttaaagatgaggaaacggaggctcagaaaggtaccgtgaacagtttaaagtcacaaagcagagatactccagaggcctttattaggaataaaaatataaataaaaaaccagcta

SEQ ID NO: 294555 - DNA, 246 bp, Homo sapiens
caggaaagggccttcttcctcttcgacaaccttctcgtctactgcaagcggaaatccaggtgagtggccaggaggctgggatggggtctggcctgctgccttctccaggtgatgccttgggcttgtcacttccctctctgggcctccctttcctgtgagttgaggggtttgttctacatcagtgctgtctagtaggaatacaatgcaagccacgtgttatgttaaatgttctagtagccacattta

SEQ ID NO: 294556 - DNA, 597 bp, Homo sapiens
cctccccttttttctttcagggtgtgaggctttactgccgtcttcacagcctctacaccccggtgatcaagtaagttactctttccaagctccaatttcacctctacctcttctcagctgtgtggccttgggctggcaacttaacctctctgagctccagtctccttctccattaaatggggcttgcagtggcacctatcctttagatttgtcattaggattaactgaattaaattgtgggaagcactgcagtgtagtgatgcaggtgtcagttctggagccagacagactgagcttgaacctccctcctagttagcagctgtgtgaccttgggcagagttacttaacctctctgtgcctcaaccgtttcctctgtgaaatggggataataatgggctccaccttagggcctttgtgcctgctgttccctttgcttaggatgcctttcctctgcataccttcatattcgttccctcacttccttcaaacgcctccatatcacaggggtcttccctgcctacctgcataaagtgtcaccaacctggtactttctgtcctctgtattagtctgttttcatgctcctgataaagacatag

SEQ ID NO: 294557 - DNA, 3864 bp, Homo sapiens
  misc_feature (375)..(375): n is a, c, g, or t
  misc_feature (378)..(379): n is a, c, g, or t
  misc_feature (761)..(761): n is a, c, g, or t
  misc_feature (777)..(777): n is a, c, g, or t
  misc_feature (879)..(879): n is a, c, g, or t
  misc_feature (890)..(890): n is a, c, g, or t
taaaaaaagtcatatttgttatttgtctaatcttgtgtggagaaagacagcatgtaggaaagccactgggtgacattctggcaaattccatggttctgtcttgaagtgaagcctagtagtttttcaggaggtcctttgcaccacatcttgcattgtcattaacaattttatgtctctaaaaggtaatacgggttattttttaatgggtatggagtttccatttgggaagatgaaaagttctctaaatgcatgatggtgatggttgtacaaaagtatgaatgtacttatgccacttaattgtacatttaaaaagggttacaatgataaatattatgtatattttaccacaataaaaaagaaaaaaaattttaaaanaannaaaaaaggtaattatttcacctagacctatgtgtgtgagtgttgtcgctttgtgtgattttctgttggagttgaataacatgagctataacagaaaacatactgaggtttgtgaatgtgacataggaaggcagttctagtgtagcagttaaagatggtcaactctggagccagactgcttggcttcatgttctggttccattgctttcttgctgtctgaccttggataagtttcttagcctttcttggcctcagttttccaattgtgaagtagagataatgatcgtacttatttcatggaattactgtgaggattagatgagctattgttaaaaaaaaatacttaaaatggctgggcacagtggctcacgcatgtaatcccngcactttgggagaccnaggtgggcagatcacctgaggtcaggagttagagaccagcctggccaacatggtgaaacccatctctactaaaaatacaaaaattagccaggcgtggtggcnggtgcctgtantcccagctacttgggaggctgaggcaggagaatcacttgaacccaggaggtggaggttgcagtgagctgagactgtgccactgcactccagcctggacaacagagcaaaaatccatctcaaaaaaaaaaaaaaaaaaaaaagcttaaaacatgttctgtcatatggtaagcgctaaatgaatggacccctagacctgggttctaaacagtgttactgatataaatacacttgcgaatgtaaacataaatcggacatttgtttttgctttttttttaaaggtaaaagaaataggagattactttaaacaacaccttttgcagtccaggcacagaggagcatttgaattggcttatactggttttgtgaaactcactgaagtactaaacaggtgcccaaatgtgagtctgcaaaagctgccagaacagtggctatggagtgttttagaggaaattaaatgcagtgatccttcatctaaactctgtgctacaaggcgcagtgctggaattcctttctacatacaggcactgttggcatctgaaccaaagaaaggcagaatggatttgttgaaaataacaatgaaagagttaatctctttggctgggcctacagatgacatacagagtacagtcccccaggttcatgctttaaatatccttagagcattgttcagagatacgcgcctgggagaaaatattattccttatgttgctgatggagctaaggctgcaattctgggttttacatcaccggtctgggcagtgcgaaattcatccacacttctctttagtgccttgatcacaagaatttttggagttaaaagggcaaaggatgaacattccaaaacaaatagaatgacagggagagagtttttctctcgtttcccagaactctatccttttcttctcaaacagttggaaactgtagccaatacagtagacagtgatatgggagaaccaaatcgtcatccaagcatgtttctcttacttttggtgttggagagactctacgcttccccgatggatggtacttcttctgctctcagcatgggaccttttgttcccttcattatgaggtgtggtcactcacctgtctaccactcccgtgaaatggcagctcgtgccttggtcccatttgttatgatagatcacattcctaataccattcgaactctgttgtccacactccccagctgcactgaccagtgtttccggcaaaaccacattcatgggacacttctccaggtttttcatttgttgcaagcctactcagactccaaacacggaacgaattcagacttccagcacgagctgactgacatcactgtttgtaccaaagccaaactctggctggccaagaggcaaaatccatgtttggtgaccagagctgtatatattgatattctcttcctattgacttgctgcctcaacagatctgcaaaggacaaccagccagttctggagagtcttggcttctgggaggaagtcagagggattatctcaggatcagagctgataacgggattcccttgggccttcaaggtgccaggcctgccccagtacctccagagcctcaccagactagccattgctgcagtgtgggccgcggcagccaagagtggagagcgggagacgaatgtccccatctctttctctcagctgttagaatctgccttccctgaagtgcgctcactaacactggaagccctcttggaaaagttcttagcagcagcctctggacttggagagaagggcgtgccacccttgctgtgcaacatgggagagaagttcttattgttggccatgaaggaaaatcacccagaatgcttctgcaagatactgaaaattctccactgcatggaccctggtgagtggcttccccagacggagcactgtgtccatctgaccccaaaggagttcttgatctggacgatggatattgcttccaatgaaagatctgaaattcagagtgtagctctgagacttgcttccaaagtcatttcccaccacatgcagacatgtgtggagaacagggaattgatagctgctgagctgaagcagtgggttcagctggtcatcttgtcatgtgaagaccatcttcctacagagtctaggctggccgtcgttgaagtcctcaccagtactacaccacttttcctcaccaacccccatcctattcttgagttgcaggatacacttgctctctggaagtgtgtccttacccttctgcagagtgaggagcaagctgttagagatgcagccacggaaaccgtgacaactgccatgtcacaagaaaatacctgccagtcaacagagtttgccttctgccaggtggatgcctccatcgctctggccctggccctggccgtcctgtgtgatctgctccagcagtgggaccagttggcccctggactgcccatcctgctgggatggctgttgggagagagtgatgacctcgtggcctgtgtggagagcatgcatcaggtggaagaagactacctgtttgaaaaagcagaagtcaacttttgggccgagaccctgatctttgtgaaatacctctgcaagcacctcttctgtctcctctcaaagtccggctggcgtcccccaagccctgagatgctctgtcaccttcaaaggatggtgtcagagcagtgccacctcctgtctcagttcttcagagagcttccaccagctgctgagtttgtgaagacagtggagttcacaagactacgcattcaagaggaaaggactttggcttgcttgaggctgctggcctttttggaaggaaaggaaggggaagacaccctagttctcagtgtttgggactcttatgcagaatcgaggcagttaactcttccaagaacagaagcggcatgttgaagaaaatctgggggattgggatgggggtatgtgtggatttttcctccactaaatctgcaggaaacatgttgaacataaattcaaaaattttatccca

SEQ ID NO: 294558 - DNA, 814 bp, Homo sapiens
agaatatcagctctttggagggtgggtatttgcctcattcagtgttttatcttcaacacctagagcagtgcctgacatagcagaagctcacatgaaaacggactaatacgcagctataagccaagaaatactgacagccaccagcaggtggaagagatcaagatgggattctgctgtagagtctctagagaatgacagggagagagtttttctctcgtttcccagaactctatccttttcttctcaaacagttggaaactgtagccaatacagtagacagtgatatgggagaaccaaatcgtcatccaagcatgtttctcttacttttggtgttggagagactctacgcttccccgatggatggtacttcttctgctctcagcatgggaccttttgttcccttcattatgaggtgtggtcactcacctgtctaccactcccgtgaaatggcagctcgtgccttggtcccatttgttatgatagatcacattcctaataccattcgaactctgttgtccacactccccagctgcactgaccagtgtttccggcaaaaccacattcatgggacacttctccaggtttttcatttgttgcaagcctactcagactccaaacacggaacgaattcagacttccagcacgagctgactgacatcactgtttgtaccaaagccaaactctggctggccaagaggcaaaatccatgtttggtgaccagagctgtatatattgatattctcttcctattgacttgctgcctcaacagatctgcaaaggacaaccagccaggtatgattcatagttatactgt

SEQ ID NO: 294559 - DNA, 808 bp, Homo sapiens
gcaggaaatgaactgagcaaggcaggggcacttgcttgtgggatggctcagtgccaaggcccgatctccttctgcagagtttgccttctgccaggtggatgcctccatcgctctggccctggccctggccgtcctgtgtgatctgctccagcagtgggaccagttggcccctggactgcccatcctgctgggatggctgttgggagagagtgatgacctcgtggcctgtgtggagagcatgcatcaggtggaagaagactacctgtttgaaaaagcagaagtcaacttttgggccgagaccctgatctttgtgaaatacctctgcaagcacctcttctgtctcctctcaaagtccggctggcgtcccccaagccctgagatgcttttttctgtcaccttttcaaaaaaagggggcggaaaccttgggggggggggggtggggggggtttttcccccaaaaggggggagaaaaaaaggggggccccccaaaaaaggggggtttttgtgggggggggccccccaaaaaaaaacgaaacaccccccattttttttttttcccccccccgcccgggggtgggtggggggttattttccaccccgattttttcccacccaaaacgaggagggggaatattatattatgtctgctaccaccaccccaagtgattttgtgtgtttcgcccccaccacgagcaaacgacggggggggcgcaacaacaaaaacgcagggccggggccaaccaacaaacagcgggacgggggcggcggaacacaccaccactagctatgtctttgttgtcgtctccac

SEQ ID NO: 294560 - DNA, 4033 bp, Homo sapiens
  misc_feature (282)..(282): n is a, c, g, or t
  misc_feature (531)..(531): n is a, c, g, or t
gactctagagatccccttgaaatgggcacagaaattgtttccatggaagaaatgcagtggattcagttctttattacatacaatcttaacagccagtctccaggagtgcggcaacagatctgttctcttcttaaaaagttgttttgtaggatacaggaaagttctcaggtactttataaattggagcagagtaaatccaaacgtgaaccagagaatgagttaaccaaacagcacccttctgtttctttacagcagtataagaatttcatgtcatccatttgnaacagtctttttgaagcattgtttcctggatcttcctactcgactagattttcagctttaaccattttaggttcaatagctgaagtttttcatgtcccagaaggcagaatttatacagtatatcagctgagtcatgatattgatgttggtcgtttccaaacactaatggaatgttttaccagcacttttgaagacgtgaaaattttagcatttgatcttctgatgaagttatcaaaaacagctgtacantttcaggattcggggaaactgcaaggcttatttcaggcagcattggagctcagcacaagcaccaaaccatacgactgtgtgacagcttcctacctgctgaacttcttaatctggcaggatgctctaccgtcatccttgtctgcctacttaactcagcaagttgcatgtgataatggagataggcctgctgctgtggtggaaaggaacacattaatggttatcaaatgcttgatggaaaatcttgaggaagaagtatctcaggctgaaaattctctgcttcaggcagcagcagcatttccaatgtatgggcgagtccactgtataacaggagctttgcagaagttatctctaaacagcctgcagttggtgagcgagtggagacctgtggtagagaagctccttttgatgtcctacaggctttccactgtggtgtctccagtcattcagagctcatcccctgaaggcctcatcccaatggacactgattcagagtcagcaagccgcttacagatgattctgaatgagattcagcctcgagatactaatgattattttaaccaagccaaaatattgaaagaacatgatagctttgatatgaaggacttgaatgctagtgtggtgaatattgatacttctacagaaatcaaaggtaaagaagtaaaaacatgtgatgtaactgcgcagatggtgctggtatgttgttggagaagtatgaaggaagttgctttacttttaggcatgttgtgccagcttctgcccatgcagcctgtgccagaatcttctgatggattattgacggtggagcaggtaaaagaaataggagattactttaaacaacaccttttgcagtccaggcacagaggagcatttgaattggcttatactggttttgtgaaactcactgaagtactaaacaggtgcccaaatgtgagtctgcaaaagctgccagaacagtggctatggagtgttttagaggaaattaaatgcagtgatccttcatctaaactctgtgctacaaggcgcagtgctggaattcctttctacatacaggcactgttggcatctgaaccaaagaaaggcagaatggatttgttgaaaataacaatgaaagagttaatctctttggctgggcctacagatgacatacagagtacagtcccccaggttcatgctttaaatatccttagagcattgttcagagatacgcgcctgggagaaaatattattccttatgttgctgatggagctaaggctgcaattctgggttttacatcaccggtctgggcagtgcgaaattcatccacacttctctttagtgccttgatcacaagaatttttggagttaaaagggcaaaggatgaacattccaaaacaaatagaatgacagggagagagtttttctctcgtttcccagaactctatccttttcttctcaaacagttggaaactgtagccaatacagtagacagtgatatgggagaaccaaatcgtcatccaagcatgtttctcttacttttggtgttggagagactctacgcttccccgatggatggtacttcttctgctctcagcatgggaccttttgttcccttcattatgaggtgtggtcactcacctgtctaccactcccgtgaaatggcagctcgtgccttggtcccatttgttatgatagatcacattcctaataccattcgaactctgttgtccacactccccagctgcactgaccagtgtttccggcaaaaccacattcatgggacacttctccaggtttttcatttgttgcaagcctactcagactccaaacacggaacgaattcagacttccagcacgagctgactgacatcactgtttgtaccaaagccaaactctggctggccaagaggcaaaatccatgtttggtgaccagagctgtatatattgatattctcttcctattgacttgctgcctcaacagatctgcaaaggacaaccagccagttctggagagtcttggcttctgggaggaagtcagagggattatctcaggatcagagctgataacgggattcccttgggccttcaaggtgccaggcctgccccagtacctccagagcctcaccagactagccattgctgcagtgtgggccgcggcagccaagagtggagagcgggagacgaatgtccccatctctttctctcagctgttagaatctgccttccctgaagtgcgctcactaacactggaagccctcttggaaaagttcttagcagcagcctctggacttggagagaagggcgtgccacccttgctgtgcaacatgggagagaagttcttattgttggccatgaaggaaaatcacccagaatgcttctgcaagatactgaaaattctccactgcatggaccctggtgagtggcttccccagacggagcactgtgtccatctgaccccaaaggagttcttgatctggacgatggatattgcttccaatgaaagatctgaaattcagagtgtagctctgagacttgcttccaaagtcatttcccaccacatgcagacatgtgtggagaacagggaattgatagctgctgagctgaagcagtgggttcagctggtcatcttgtcatgtgaagaccatcttcctacagagtctaggctggccgtcgttgaagtcctcaccagtactacaccacttttcctcaccaacccccatcctattcttgagttgcaggatacacttgctctctggaagtgtgtccttacccttctgcagagtgaggagcaagctgttagagatgcagccacggaaaccgtgacaactgccatgtcacaagaaaatacctgccagtcaacagagtttgccttctgccaggtggatgcctccatcgctctggccctggccctggccgtcctgtgtgatctgctccagcagtgggaccagttggcccctggactgcccatcctgctgggatggctgttgggagagagtgatgacctcgtggcctgtgtggagagcatgcatcaggtggaagaagactacctgtttgaaaaagcagaagtcaacttttgggccgagaccctgatctttgtgaaatacctctgcaagcacctcttctgtctcctctcaaagtccggctggcgtcccccaagccctgagatgctctgtcaccttcaaaggatggtgtcagagcagtgccacctcctgtctcagttcttcagagagcttccaccagctgctgagtttgtgaagacagtggagttcacaagactacgcattcaagaggaaaggactttggcttgcttgaggctgctggcctttttggaaggaaaggaaggggaagacaccctagttctcagtgtttgggactcttatgcagaatcgaggcagttaactcttccaagaacagaagcggcatgttgaagaaaatctgggggattgggatgggggtatgtgtggatttttcctccactaaatctgcaggaaacatgttgaacataaattcaaaaattttatccca

SEQ ID NO: 294561 - DNA, 3811 bp, Homo sapiens
  misc_feature (282)..(282): n is a, c, g, or t
  misc_feature (531)..(531): n is a, c, g, or t
gactctagagatccccttgaaatgggcacagaaattgtttccatggaagaaatgcagtggattcagttctttattacatacaatcttaacagccagtctccaggagtgcggcaacagatctgttctcttcttaaaaagttgttttgtaggatacaggaaagttctcaggtactttataaattggagcagagtaaatccaaacgtgaaccagagaatgagttaaccaaacagcacccttctgtttctttacagcagtataagaatttcatgtcatccatttgnaacagtctttttgaagcattgtttcctggatcttcctactcgactagattttcagctttaaccattttaggttcaatagctgaagtttttcatgtcccagaaggcagaatttatacagtatatcagctgagtcatgatattgatgttggtcgtttccaaacactaatggaatgttttaccagcacttttgaagacgtgaaaattttagcatttgatcttctgatgaagttatcaaaaacagctgtacantttcaggattcggggaaactgcaaggcttatttcaggcagcattggagctcagcacaagcaccaaaccatacgactgtgtgacagcttcctacctgctgaacttcttaatctggcaggatgctctaccgtcatccttgtctgcctacttaactcagcaagttgcatgtgataatggagataggcctgctgctgtggtggaaaggaacacattaatggttatcaaatgcttgatggaaaatcttgaggaagaagtatctcaggctgaaaattctctgcttcaggcagcagcagcatttccaatgtatgggcgagtccactgtataacaggagctttgcagaagttatctctaaacagcctgcagttggtgagcgagtggagacctgtggtagagaagctccttttgatgtcctacaggctttccactgtggtgtctccagtcattcagagctcatcccctgaaggcctcatcccaatggacactgattcagagtcagcaagccgcttacagatgattctgaatgagattcagcctcgagatactaatgattattttaaccaagccaaaatattgaaagaacatgatagctttgatatgaaggacttgaatgctagtgtggtgaatattgatacttctacagaaatcaaaggtaaagaagtaaaaacatgtgatgtaactgcgcagatggtgctggtatgttgttggagaagtatgaaggaagttgctttacttttaggcatgttgtgccagcttctgcccatgcagcctgtgccagaatcttctgatggattattgacggtggagcaggtaaaagaaataggagattactttaaacaacaccttttgcagtccaggcacagaggagcatttgaattggcttatactggttttgtgaaactcactgaagtactaaacaggtgcccaaatgtgagtctgcaaaagctgccagaacagtggctatggagtgttttagaggaaattaaatgcagtgatccttcatctaaactctgtgctacaaggcgcagtgctggaattcctttctacatacaggcactgttggcatctgaaccaaagaaaggcagaatggatttgttgaaaataacaatgaaagagttaatctctttggctgggcctacagatgacatacagagtacagtcccccaggttcatgctttaaatatccttagagcattgttcagagatacgcgcctgggagaaaatattattccttatgttgctgatggagctaaggctgcaattctgggttttacatcaccggtctgggcagtgcgaaattcatccacacttctctttagtgccttgatcacaagaatttttggagttaaaagggcaaaggatgaacattccaaaacaaataggtgtggtcactcacctgtctaccactcccgtgaaatggcagctcgtgccttggtcccatttgttatgatagatcacattcctaataccattcgaactctgttgtccacactccccagctgcactgaccagtgtttccggcaaaaccacattcatgggacacttctccaggtttttcatttgttgcaagcctactcagactccaaacacggaacgaattcagacttccagcacgagctgactgacatcactgtttgtaccaaagccaaactctggctggccaagaggcaaaatccatgtttggtgaccagagctgtatatattgatattctcttcctattgacttgctgcctcaacagatctgcaaaggacaaccagccagttctggagagtcttggcttctgggaggaagtcagagggattatctcaggatcagagctgataacgggattcccttgggccttcaaggtgccaggcctgccccagtacctccagagcctcaccagactagccattgctgcagtgtgggccgcggcagccaagagtggagagcgggagacgaatgtccccatctctttctctcagctgttagaatctgccttccctgaagtgcgctcactaacactggaagccctcttggaaaagttcttagcagcagcctctggacttggagagaagggcgtgccacccttgctgtgcaacatgggagagaagttcttattgttggccatgaaggaaaatcacccagaatgcttctgcaagatactgaaaattctccactgcatggaccctggtgagtggcttccccagacggagcactgtgtccatctgaccccaaaggagttcttgatctggacgatggatattgcttccaatgaaagatctgaaattcagagtgtagctctgagacttgcttccaaagtcatttcccaccacatgcagacatgtgtggagaacagggaattgatagctgctgagctgaagcagtgggttcagctggtcatcttgtcatgtgaagaccatcttcctacagagtctaggctggccgtcgttgaagtcctcaccagtactacaccacttttcctcaccaacccccatcctattcttgagttgcaggatacacttgctctctggaagtgtgtccttacccttctgcagagtgaggagcaagctgttagagatgcagccacggaaaccgtgacaactgccatgtcacaagaaaatacctgccagtcaacagagtttgccttctgccaggtggatgcctccatcgctctggccctggccctggccgtcctgtgtgatctgctccagcagtgggaccagttggcccctggactgcccatcctgctgggatggctgttgggagagagtgatgacctcgtggcctgtgtggagagcatgcatcaggtggaagaagactacctgtttgaaaaagcagaagtcaacttttgggccgagaccctgatctttgtgaaatacctctgcaagcacctcttctgtctcctctcaaagtccggctggcgtcccccaagccctgagatgctctgtcaccttcaaaggatggtgtcagagcagtgccacctcctgtctcagttcttcagagagcttccaccagctgctgagtttgtgaagacagtggagttcacaagactacgcattcaagaggaaaggactttggcttgcttgaggctgctggcctttttggaaggaaaggaaggggaagacaccctagttctcagtgtttgggactcttatgcagaatcgaggcagttaactcttccaagaacagaagcggcatgttgaagaaaatctgggggattgggatgggggtatgtgtggatttttcctccactaaatctgcaggaaacatgttgaacataaattcaaaaattttatccca

SEQ ID NO: 294562 - DNA, 2186 bp, Homo sapiens
  misc_feature (50)..(51): n is a, c, g, or t
  misc_feature (59)..(59): n is a, c, g, or t
ctaggacggccagatgtatgggcattgctagatgggctgtgagatgaacnntccaaaanaaataatgacagggagagagtttttctctcgtttcccagaactctatccttttcttctcaaacagttggaaactgtagccaatacagtagacagtgatatgggagaaccaaatcgtcatccaagcatgtttctcttacttttggtgttggagagactctacgcttccccgatggatggtacttcttctgctctcagcatgggaccttttgttcccttcattatgaggtgtggtcactcacctgtctaccactcccgtgaaatggcagctcgtgccttggtcccatttgttatgatagatcacattcctaataccattcgaactctgttgtccacactccccagctgcactgaccagtgtttccggcaaaaccacattcatgggacacttctccaggtttttcatttgttgcaagcctactcagactccaaacacggaacgaattcagacttccagcacgagctgactgacatcactgtttgtaccaaagccaaactctggctggccaagaggcaaaatccatgtttggtgaccagagctgtatatattgatattctcttcctattgacttgctgcctcaacagatctgcaaaggacaaccagccagttctggagagtcttggcttctgggaggaagtcagagggattatctcaggatcagagctgataacgggattcccttgggccttcaaggtgccaggcctgccccagtacctccagagcctcaccagactagccattgctgcagtgtgggccgcggcagccaagagtggagagcgggagacgaatgtccccatctctttctctcagctgttagaatctgccttccctgaagtgcgctcactaacactggaagccctcttggaaaagttcttagcagcagcctctggacttggagagaagggcgtgccacccttgctgtgcaacatgggagagaagttcttattgttggccatgaaggaaaatcacccagaatgcttctgcaagatactgaaaattctccactgcatggaccctggtgagtggcttccccagacggagcactgtgtccatctgaccccaaaggagttcttgatctggacgatggatattgcttccaatgaaagatctgaaattcagagtgtagctctgagacttgcttccaaagtcatttcccaccacatgcagacatgtgtggagaacagggaattgatagctgctgagctgaagcagtgggttcagctggtcatcttgtcatgtgaagaccatcttcctacagagtctaggctggccgtcgttgaagtcctcaccagtactacaccacttttcctcaccaacccccatcctattcttgagttgcaggatacacttgctctctggaagtgtgtccttacccttctgcagagtgaggagcaagctgttagagatgcagccacggaaaccgtgacaactgccatgtcacaagaaaatacctgccagtcaacagagtttgccttctgccaggtggatgcctccatcgctctggccctggccctggccgtcctgtgtgatctgctccagcagtgggaccagttggcccctggactgcccatcctgctgggatggctgttgggagagagtgatgacctcgtggcctgtgtggagagcatgcatcaggtggaagaagactacctgtttgaaaaagcagaagtcaacttttgggccgagaccctgatctttgtgaaatacctctgcaagcacctcttctgtctcctctcaaagtccggctggcgtcccccaagccctgagatgctctgtcaccttcaaaggatggtgtcagagcagtgccacctcctgtctcagttcttcagagagcttccaccagctgctgagtttgtgaagacagtggagttcacaagactacgcattcaagaggaaaggactttggcttgcttgaggctgctggcctttttggaaggaaaggaaggggaagacaccctagttctcagtgtttgggactcttatgcagaatcgaggcagttaactcttccaagaacagaagcggcatgttgaagaaaatctgggggattgggatgggggtatgtgtggatttttcctccactaaatctgcaggaaacatgttgaacataaattcaaaaattttatccca

SEQ ID NO: 294563 - DNA, 1181 bp, Homo sapiens
ggtttcaccatgttggccaggttggtctcaaactcctgacctcaggtgatctgcccgcctcggcctcccaaagtgctgggattacaggcgtgagccactgcgcccggctagatttttatagttattatttgttgtttttttgtttgtttatttttctagatctgaaattcagagtgtagctctgagacttgcttccaaagtcatttcccaccacatgcagacatgtgtggagaacagggaattgatagctgctgagctgaagcagtgggttcagctggtcatcttgtcatgtgaagaccatcttcctacagagtctaggctggccgtcgttgaagtcctcaccagtactacaccacttttcctcaccaacccccatcctattcttgagttgcaggatacacttgctctctggaagtgtgtccttacccttctgcagagtgaggagcaagctgttagagatgcagccacggaaaccgtgacaactgccatgtcacaagaaaatacctgccagtcaacagagtttgccttctgccaggtggatgcctccatcgctctggccctggccctggccgtcctgtgtgatctgctccagcagtgggaccagttggcccctggactgcccatcctgctgggatggctgttgggagagagtgatgacctcgtggcctgtgtggagagcatgcatcaggtggaagaagactacctgtttgaaaaagcagaagtcaacttttgggccgagaccctgatctttgtgaaatacctctgcaagcacctcttctgtctcctctcaaagtccggctggcgtcccccaagccctgagatgctctgtcaccttcaaaggatggtgtcagagcagtgccacctcctgtctcagttcttcagagagcttccaccagctgctgagtttgtgaagacagtggagttcacaagactacgcattcaagaggaaaggactttggcttgcttgaggctgctggcctttttggaaggaaaggaaggggaagacaccctagttctcagtgtttgggactcttatgcagaatcgaggcagttaactcttccaagaacagaagcggcatgttgaagaaaatctgggggattgggatgggggtatgtgtggatttttcctccactaaatctgcaggaaacatgttgaacataaattcaaaaattttatccca

SEQ ID NO: 294564 - DNA, 970 bp, Homo sapiens
cccgggctgcaggaattcggcaacagggaattgatagctgctgagctgaagcagtgggttcagctggtcatcttgtcatgtgaagaccatcttcctacagagtctaggctggccgtcgttgaagtcctcaccagtactacaccacttttcctcaccaacccccatcctattcttgagttgcaggatacacttgctctctggaagtgtgtccttacccttctgcagagtgaggagcaagctgttagagatgcagccacggaaaccgtgacaactgccatgtcacaagaaaatacctgccagtcaacagagtttgccttctgccaggtggatgcctccatcgctctggccctggccctggccgtcctgtgtgatctgctccagcagtgggaccagttggcccctggactgcccatcctgctgggatggctgttgggagagagtgatgacctcgtggcctgtgtggagagcatgcatcaggtggaagaagactacctgtttgaaaaagcagaagtcaacttttgggccgagaccctgatctttgtgaaatacctctgcaagcacctcttctgtctcctctcaaagtccggctggcgtcccccaagccctgagatgctctgtcaccttcaaaggatggtgtcagagcagtgccacctcctgtctcagttcttcagagagcttccaccagctgctgagtttgtgaagacagtggagttcacaagactacgcattcaagaggaaaggactttggcttgcttgaggctgctggcctttttggaaggaaaggaaggggaagacaccctagttctcagtgtttgggactcttatgcagaatcgaggcagttaactcttccaagaacagaagcggcatgttgaagaaaatctgggggattgggatgggggtatgtgtggatttttcctccactaaatctgcaggaaacatgttgaacataaattcaaaaattttatccca

SEQ ID NO: 294565 - DNA, 1319 bp, Homo sapiens
  misc_feature (282)..(282): n is a, c, g, or t
  misc_feature (531)..(531): n is a, c, g, or t
gactctagagatccccttgaaatgggcacagaaattgtttccatggaagaaatgcagtggattcagttctttattacatacaatcttaacagccagtctccaggagtgcggcaacagatctgttctcttcttaaaaagttgttttgtaggatacaggaaagttctcaggtactttataaattggagcagagtaaatccaaacgtgaaccagagaatgagttaaccaaacagcacccttctgtttctttacagcagtataagaatttcatgtcatccatttgnaacagtctttttgaagcattgtttcctggatcttcctactcgactagattttcagctttaaccattttaggttcaatagctgaagtttttcatgtcccagaaggcagaatttatacagtatatcagctgagtcatgatattgatgttggtcgtttccaaacactaatggaatgttttaccagcacttttgaagacgtgaaaattttagcatttgatcttctgatgaagttatcaaaaacagctgtacantttcaggattcggggaaactgcaaggcttatttcaggcagcattggagctcagcacaagcaccaaaccatacgactgtgtgacagcttcctacctgctgaacttcttaatctggcaggatgctctaccgtcatccttgtctgcctacttaactcagcaagttgcatgtgataatggagataggcctgctgctgtggtggaaaggaacacattaatggttatcaaatgcttgatggaaaatcttgaggaagaagtatctcaggctgaaaattctctgcttcaggcagcagcagcatttccaatgtatgggcgagtccactgtataacaggagctttgcagaagttatctctaaacagcctgcagttggtgagcgagtggagacctgtggtagagaagctccttttgatgtcctacaggctttccactgtggtgtctccagtcattcagagctcatcccctgaaggcctcatcccaatggacactgattcagagtcagcaagccgcttacagatgattctgaatgagattcagcctcgagatactaatgattattttaaccaagccaaaatattgaaagaacatgatagctttgatatgaaggacttgaatgctagtgtggtgaatattgatacttctacagaaatcaaaggtaacttgtataaaatggatactgtaattcatgtttaagtaaccagtaaaatgtacagaatgccctttttatatggtaaattagaggttgcaaatctgtgcagaacatttctagaaaataaagttttttaaaaattttg

SEQ ID NO: 294566 - DNA, 2087 bp, Homo sapiens
  misc_feature (282)..(282): n is a, c, g, or t
  misc_feature (531)..(531): n is a, c, g, or t
gactctagagatccccttgaaatgggcacagaaattgtttccatggaagaaatgcagtggattcagttctttattacatacaatcttaacagccagtctccaggagtgcggcaacagatctgttctcttcttaaaaagttgttttgtaggatacaggaaagttctcaggtactttataaattggagcagagtaaatccaaacgtgaaccagagaatgagttaaccaaacagcacccttctgtttctttacagcagtataagaatttcatgtcatccatttgnaacagtctttttgaagcattgtttcctggatcttcctactcgactagattttcagctttaaccattttaggttcaatagctgaagtttttcatgtcccagaaggcagaatttatacagtatatcagctgagtcatgatattgatgttggtcgtttccaaacactaatggaatgttttaccagcacttttgaagacgtgaaaattttagcatttgatcttctgatgaagttatcaaaaacagctgtacantttcaggattcggggaaactgcaaggcttatttcaggcagcattggagctcagcacaagcaccaaaccatacgactgtgtgacagcttcctacctgctgaacttcttaatctggcaggatgctctaccgtcatccttgtctgcctacttaactcagcaagttgcatgtgataatggagataggcctgctgctgtggtggaaaggaacacattaatggttatcaaatgcttgatggaaaatcttgaggaagaagtatctcaggctgaaaattctctgcttcaggcagcagcagcatttccaatgtatgggcgagtccactgtataacaggagctttgcagaagttatctctaaacagcctgcagttggtgagcgagtggagacctgtggtagagaagctccttttgatgtcctacaggctttccactgtggtgtctccagtcattcagagctcatcccctgaaggcctcatcccaatggacactgattcagagtcagcaagccgcttacagatgattctgaatgagattcagcctcgagatactaatgattattttaaccaagccaaaatattgaaagaacatgatagctttgatatgaaggacttgaatgctagtgtggtgaatattgatacttctacagaaatcaaaggtaaagaagtaaaaacatgtgatgtaactgcgcagatggtgctggtatgttgttggagaagtatgaaggaagttgctttacttttaggcatgttgtgccagcttctgcccatgcagcctgtgccagaatcttctgatggattattgacggtggagcaggtaaaagaaataggagattactttaaacaacaccttttgcagtccaggcacagaggagcatttgaattggcttatactggttttgtgaaactcactgaagtactaaacaggtgcccaaatgtgagtctgcaaaagctgccagaacagtggctatggagtgttttagaggaaattaaatgcagtgatccttcatctaaactctgtgctacaaggcgcagtgctggaattcctttctacatacaggcactgttggcatctgaaccaaagaaaggcagaatggatttgttgaaaataacaatgaaagagttaatctctttggctgggcctacagatgacatacagagtacagtcccccaggttcatgctttaaatatccttagagcattgttcagagatacgcgcctgggagaaaatattattccttatgttgctgatggagctaaggctgcaattctgggttttacatcaccggtctgggcagtgcgaaattcatccacacttctctttagtgccttgatcacaagaatttttggagttaaaagggcaaaggatgaacattccaaaacaaataggatccagtttggcccagtggtctttctcttgaggatctagagttatattcaaagccctattcccttcttccctaaaaaagtcattatgcttcatatttaagttttaagctaatgtttattgaaatgcatttttgtgtgatggaactaaatcttaggaattaaaaaaatatgaaatca

SEQ ID NO: 294567 - DNA, 2311 bp, Homo sapiens
  misc_feature (282)..(282): n is a, c, g, or t
  misc_feature (531)..(531): n is a, c, g, or t
gactctagagatccccttgaaatgggcacagaaattgtttccatggaagaaatgcagtggattcagttctttattacatacaatcttaacagccagtctccaggagtgcggcaacagatctgttctcttcttaaaaagttgttttgtaggatacaggaaagttctcaggtactttataaattggagcagagtaaatccaaacgtgaaccagagaatgagttaaccaaacagcacccttctgtttctttacagcagtataagaatttcatgtcatccatttgnaacagtctttttgaagcattgtttcctggatcttcctactcgactagattttcagctttaaccattttaggttcaatagctgaagtttttcatgtcccagaaggcagaatttatacagtatatcagctgagtcatgatattgatgttggtcgtttccaaacactaatggaatgttttaccagcacttttgaagacgtgaaaattttagcatttgatcttctgatgaagttatcaaaaacagctgtacantttcaggattcggggaaactgcaaggcttatttcaggcagcattggagctcagcacaagcaccaaaccatacgactgtgtgacagcttcctacctgctgaacttcttaatctggcaggatgctctaccgtcatccttgtctgcctacttaactcagcaagttgcatgtgataatggagataggcctgctgctgtggtggaaaggaacacattaatggttatcaaatgcttgatggaaaatcttgaggaagaagtatctcaggctgaaaattctctgcttcaggcagcagcagcatttccaatgtatgggcgagtccactgtataacaggagctttgcagaagttatctctaaacagcctgcagttggtgagcgagtggagacctgtggtagagaagctccttttgatgtcctacaggctttccactgtggtgtctccagtcattcagagctcatcccctgaaggcctcatcccaatggacactgattcagagtcagcaagccgcttacagatgattctgaatgagattcagcctcgagatactaatgattattttaaccaagccaaaatattgaaagaacatgatagctttgatatgaaggacttgaatgctagtgtggtgaatattgatacttctacagaaatcaaaggtaaagaagtaaaaacatgtgatgtaactgcgcagatggtgctggtatgttgttggagaagtatgaaggaagttgctttacttttaggcatgttgtgccagcttctgcccatgcagcctgtgccagaatcttctgatggattattgacggtggagcaggtaaaagaaataggagattactttaaacaacaccttttgcagtccaggcacagaggagcatttgaattggcttatactggttttgtgaaactcactgaagtactaaacaggtgcccaaatgtgagtctgcaaaagctgccagaacagtggctatggagtgttttagaggaaattaaatgcagtgatccttcatctaaactctgtgctacaaggcgcagtgctggaattcctttctacatacaggcactgttggcatctgaaccaaagaaaggcagaatggatttgttgaaaataacaatgaaagagttaatctctttggctgggcctacagatgacatacagagtacagtcccccaggttcatgctttaaatatccttagagcattgttcagagatacgcgcctgggagaaaatattattccttatgttgctgatggagctaaggctgcaattctgggttttacatcaccggtctgggcagtgtggtcactcacctgtctaccactcccgtgaaatggcagctcgtgccttggtcccatttgttatgatagatcacattcctaataccattcgaactctgttgtccacactccccagctgcaccccatattggctgcacccgggtgcagccaatatgcagccaagctcaaaccagaaaataaatttattatgtgacaaaaatgaagaagaaatttaaagtgagggagtgaacagaaattgaagctgtgtggctttgcagttgggggattaaggctctaatcatgagtgtgaggtgaattctaggccacagggcacaaatgtgcagagaattagaattgagctacctgcttaaagctgggagtcacaaaggacatctctgtgtgtaaaataggaactagaaagatgtcacccactggctaatgaaaatgttaagaagaatcaggggttacttacaagaagtcagaaccacagtcctgtaccacatgtaggagtg

SEQ ID NO: 294568 - DNA, 1012 bp, Homo sapiens
  misc_feature (282)..(282): n is a, c, g, or t
  misc_feature (531)..(531): n is a, c, g, or t
gactctagagatccccttgaaatgggcacagaaattgtttccatggaagaaatgcagtggattcagttctttattacatacaatcttaacagccagtctccaggagtgcggcaacagatctgttctcttcttaaaaagttgttttgtaggatacaggaaagttctcaggtactttataaattggagcagagtaaatccaaacgtgaaccagagaatgagttaaccaaacagcacccttctgtttctttacagcagtataagaatttcatgtcatccatttgnaacagtctttttgaagcattgtttcctggatcttcctactcgactagattttcagctttaaccattttaggttcaatagctgaagtttttcatgtcccagaaggcagaatttatacagtatatcagctgagtcatgatattgatgttggtcgtttccaaacactaatggaatgttttaccagcacttttgaagacgtgaaaattttagcatttgatcttctgatgaagttatcaaaaacagctgtacantttcaggattcggggaaactgcaaggcttatttcaggcagcattggagctcagcacaagcaccaaaccatacgactgtgtgacagcttcctacctgctgaacttcttaatctggcaggatgctctaccgtcatccttgtctgcctacttaactcagcaagttgcatgtgataatggagataggcctgctgctgtggtggaaaggaacacattaatggttatcaaatgcttgatggaaaatcttgaggaagaagtatctcaggctgaaaattctctgcttcaggcagcagcagcatttccaatgtatgggcgagtccactgtataacaggagctttgcagaagttatctctaaagtaaggatttccacagctgcctcctgtctcagaaatccattcatttctgagctttaacctctggttggaatgtgtcctgggaaaggaatgcagtctattgctttgaataaaattgaaaatcagattta

SEQ ID NO: 294569 - DNA, 1202 bp, Homo sapiens
  misc_feature (282)..(282): n is a, c, g, or t
  misc_feature (531)..(531): n is a, c, g, or t
gactctagagatccccttgaaatgggcacagaaattgtttccatggaagaaatgcagtggattcagttctttattacatacaatcttaacagccagtctccaggagtgcggcaacagatctgttctcttcttaaaaagttgttttgtaggatacaggaaagttctcaggtactttataaattggagcagagtaaatccaaacgtgaaccagagaatgagttaaccaaacagcacccttctgtttctttacagcagtataagaatttcatgtcatccatttgnaacagtctttttgaagcattgtttcctggatcttcctactcgactagattttcagctttaaccattttaggttcaatagctgaagtttttcatgtcccagaaggcagaatttatacagtatatcagctgagtcatgatattgatgttggtcgtttccaaacactaatggaatgttttaccagcacttttgaagacgtgaaaattttagcatttgatcttctgatgaagttatcaaaaacagctgtacantttcaggattcggggaaactgcaaggcttatttcaggcagcattggagctcagcacaagcaccaaaccatacgactgtgtgacagcttcctacctgctgaacttcttaatctggcaggatgctctaccgtcatccttgtctgcctacttaactcagcaagttgcatgtgataatggagataggcctgctgctgtggtggaaaggaacacattaatggttatcaaatgcttgatggaaaatcttgaggaagaagtatctcaggctgaaaattctctgcttcaggcagcagcagcatttccaatgtatgggcgagtccactgtataacaggagctttgcagaagttatctctaaacagcctgcagttggtgagcgagtggagacctgtggtagagaagctccttttgatgtcctacaggctttccactgtggtgtctccagtcattcagagctcatcccctgaaggcctcatcccaatggacactgattcaggttagcaaatgaagaaggccggctagagtgctgtggtttgattattatgtctttacctctttttttttttccccaagtatttctttggggagatataaaagctaagttgaggagaaaataattattattatttgtggtatttctgccttttagcaatagttttaactattaaaaagtagca

SEQ ID NO: 294570 - DNA, 299 bp, Homo sapiens
gactctagagatccccttgaaatgggcacagaaattgtttccatggaagaaatgcagtggattcagttctttattacatacaatcttaacagccagtctccaggagtgcggcaacagatctgttctcttcttaaaaagttgttttgtaggatacaggaaagttctcaggtactttataaattggagcagagtaaatccaaacgtgaaccagagaatgagttaaccaaacagcacccttctgtttctttacagcagtataagaatttctgtgcccatttcaacctaggggatcccctagg

SEQ ID NO: 294571 - DNA, 577 bp, Homo sapiens
gactctagagatccccttgaaatgggcacagaaattgtttccatggaagaaatgcagtggattcagttctttattacatacaatcttaacagccagtctccaggagtgcggcaacagatctgttctcttcttaaaaaggtagaatttcccatcagaaggcatagggaagtggtgaactttgtttgggaaatcgtttttaaaaagagcccagattttgggagcgtgtgggaatggtcatggaattgggctaccacatctgttcatgacggccgttctgtgacctgttctctcattccataaagcttacatttgggattaaaatccagagtgaaaagcacgcacccctccccccaccattttttttcaggagttcagaatcagcctgggcaacacagtcaaaccccatctctactaaaatacaaaaaaattagccggttgtggcagtgtgtgcctgtagtcctagctatttgggaggctgaagcaggagaattgcttgaacctaggagcggaggttgcagtgagccgagattgtaccactgcactccagcctgggcaacagagtgagactcggtctcca

SEQ ID NO: 294572 - DNA, 491 bp, Homo sapiens
caagagatctgctttccaaggaaagggcaaaccagtcaaatccaggcagatgtgcagaggagacactggacagggaagccttcctgatccttctggtgacactggaggagcagaggggagataactctctaatcctgcagatggaactgcttctgtccacactgagttagggggcatggaaacagtgggttcaggcctatgactcattctaacagtataaatagcaggattcagaaggtgattaatcgtctccagtgagcccaccctaccagcttccctgccaggctggtggcagcgattttacctgaggcctttattgttcccagggtcctgcaggctgccctggggtcggccctgagcagtatattcattgctcacctttctcctgtctttgcagagtttgccttctgccaggtggatgcctccatcgctctggccctggccctggccgtcctgtgtgatctgctccagcagtgggaccagttggcccc

SEQ ID NO: 294573 - DNA, 545 bp, Homo sapiens
accacaaacacatctttatccaaggtcatgttaagtctggggaaaaaattcctctctggtggagaaatacagtgagtgaaaatagaaggtgaccttcaaggctgcaagtggtgtgtgtacatggatgttgacaggcaagagtgcaccctctgtcaggtgggggaagggaaacccctcttgcatctggcagggtactgcttggtctggactggggcttgtcaccattccctgtaagactgactttcggctttttcatctgatttaggtggaagaagactacctgtttgaaaaagcagaagtcaacttttgggccgagaccctgatctttgtgaaatacctctgcaagcacctcttctgtctcctctcaaagtccggctggcgtcccccaagccctgagatgctctgtcaccttcaaaggatggtgtcagagcagtgccacctcctgtctcagttcttcagagagcttccaccagctgctgagtttgtgaagacagtggagttcacaagactacgcattcaagaggaaaggactttggcttgcttga

SEQ ID NO: 294574 - DNA, 2641 bp, Homo sapiens
  misc_feature (2254)..(2254): n is a, c, g, or t
agacaaaaaattagggcataagggatagcgaagtgcaccctgagagggggggttttaatatcggacgaggccgctggtgcgcggagcggttcaccgtcttcggagcggttcggcccagcctttcgcccaggcgcccaggcccgctgcgcgcgtgcgtgagcgcgcctgcgccgccagggccgctgcaaggggaggagagcggccgcctcaggaggatcccttttcccccagaaattactcaatgctgaaacctctcaaagtggtattagagacgctgaaagcaccatggacgggttttatgatcagcaagtcccttttatggtcccagggaaatctcgatctgaggaatgcagagggcggcctgtgattgacagaaagaggaagtttttggacacagatctggctcacgattctgaagagctatttcaggatctcagtcaacttcaagaggcttggttagctgaagcacaagttcctgatgatgaacagtttgtcccagattttcagtctgataacctggtgcttcatgccccacctccaaccaagatcaaacgggagctgcacagcccctcctctgagctgtcgtcttgtagccatgagcaggctcttggtgctaactatggagaaaagtgcctctacaactattgtgcctatgataggaagcctccctctgggttcaagccattaacccctcctacaacccccctctcacccacccatcagaatcccctatttcccccacctcaggcaactctgcccacctcagggcatgcccctgcagctggcccagttcaaggtgtgggccccgcccccgccccccattcgcttccagagcctggaccacagcagcaaacatttgcggtcccccgaccaccacatcagcccctgcagatgccaaagatgatgcctgaaaaccagtatccatcagaacagagatttcagagacaactgtctgaaccctgccaccccttccctcctcagccaggagttcctggagataatcgccccagttaccatcggcaaatgtcagaacctattgtccctgcagctcccccgccccctcagggattcaaacaagaataccatgacccactctatgaacatggggtcccgggcatgccagggcccccagcacacgggttccagtcaccaatgggaatcaagcaggagcctcgggattactgcgtcgattcagaagtgcctaactgccagtcatcctacatgagagggggttatttctccagcagccatgaaggtttttcatatgaaaaagatccccgattatactttgacgacacttgtgttgtgcctgagagactggaaggcaaagtcaaacaggagcctaccatgtatcgagaggggcccccttaccagaggcgaggttcccttcagctgtggcagttcctggtcacccttcttgatgacccagccaatgcccacttcattgcctggacaggtcgaggcatggagttcaagctgatagaaccggaagaggttgctcggcgctggggcatccagaagaaccggccagccatgaactatgacaagctgagccgctctctccgctattactatgaaaagggcatcatgcagaaggtggctggagagcgatacgtctacaaatttgtctgtgacccagatgccctcttctccatggctttcccggataaccagcgtccgttcctgaaggcagagtccgagtgccacctcagcgaggaggacaccctgccgctgacccactttgaagacagccccgcttacctcctggacatggaccgctgcagcagcctcccctatgccgaaggctttgcttactaagtttctgagtggcggagtggccaaaccctagagctagcagttcccattcaggcaaacaagggcagtggttttgtttgtgtttttggttgttcctaaagcttgccctttgagtattatctggagaacccaagctgtctctggattggcacccttaaagacagatacattggctggggagtgggaacagggaggggcagaaaaccaccaaaaggccagtgcctcaactcttgattctgatgaggtttctgggaagagatcaaaatggagtctccttaccatggacaatacatgcaaagcaatatcttgttcaggttagtacccgcaaaacgggacatgatgtgacaatctgcatcgatcatggactactaaatgcctttacatagaagggctctgatttgcacaatttgttgaaaaatcacaaacccatagaaaagtnagtaggctaagttggggaggctcaaaccattaagggttaaaaatacatcttaaacattggaaagctcttctagctgaatctgaaatattaccccttgtctagaaaaaggggggcagtcagaacagctgttccccactccgtgttctcaaaatcataaaccatggctactcttgggaaccacccggccatgtggtcgccaagtagagcaagccccctttctcttcccaatcacgtggctgagtgtggatgacttttattttaggagaagggcgattaacacttttgacagtattttgttttgccctgatttgggggattgttttgttttggtggttgttttggaaaaacagtttataaactgatttttgtagttttggtatttaaagc

SEQ ID NO: 294575 - DNA, 2109 bp, Homo sapiens
  misc_feature (3)..(3): n is a, c, g, or t
  misc_feature (26)..(27): n is a, c, g, or t
ggngcgagaagagacgcttggcgganntccgcagttgggaggagggggcgggaagcagtttgaggggaatgtctgagaggcgctgcccccagagcaccgggagggggtaaatgacacaggaggatcccttttcccccagaaattactcaatgctgaaacctctcaaagtggtattagagacgctgaaagcaccatggacgggttttatgatcagcaagtcccttttatggtcccagggaaatctcgatctgaggaatgcagagggcggcctgtgattgacagaaagaggaagtttttggacacagatctggctcacgattctgaagagctatttcaggatctcagtcaacttcaagaggcttggttagctgaagcacaagttcctgatgatgaacagtttgtcccagattttcagtctgataacctggtgcttcatgccccacctccaaccaagatcaaacgggagctgcacagcccctcctctgagctgtcgtcttgtagccatgagcaggctcttggtgctaactatggagaaaagtgcctctacaactattgtgcctatgataggaagcctccctctgggttcaagccattaacccctcctacaacccccctctcacccacccatcagaatcccctatttcccccacctcaggcaactctgcccacctcagggcatgcccctgcagctggcccagttcaaggtgtgggccccgcccccgccccccattcgcttccagagcctggaccacagcagcaaacatttgcggtcccccgaccaccacatcagcccctgcagatgccaaagatgatgcctgaaaaccagtatccatcagaacagagatttcagagacaactgtctgaaccctgccaccccttccctcctcagccaggagttcctggagataatcgccccagttaccatcggcaaatgtcagaacctattgtccctgcagctcccccgccccctcagggattcaaacaagaataccatgacccactctatgaacatggggtcccgggcatgccagggcccccagcacacgggttccagtcaccaatgggaatcaagcaggagcctcgggattactgcgtcgattcagaagtgcctaactgccagtcatcctacatgagagggggttatttctccagcagccatgaaggtttttcatatgaaaaagatccccgattatactttgacgacacttgtgttgtgcctgagagactggaaggcaaagtcaaacaggagcctaccatgtatcgagaggggcccccttaccagaggcgaggttcccttcagctgtggcagttcctggtcacccttcttgatgacccagccaatgcccacttcattgcctggacaggtcgaggcatggagttcaagctgatagaaccggaagaggttgctcggcgctggggcatccagaagaaccggccagccatgaactatgacaagctgagccgctctctccgctattactatgaaaagggcatcatgcagaaggtggctggagagcgatacgtctacaaatttgtctgtgacccagatgccctcttctccatggctttcccggataaccagcgtccgttcctgaaggcagagtccgagtgccacctcagcgaggaggacaccctgccgctgacccactttgaagacagccccgcttacctcctggacatggaccgctgcagcagcctcccctatgccgaaggctttgcttactaagtttctgagtggcggagtggccaaaccctagagctagcagttcccattcaggcaaacaagggcagtggttttgtttgtgtttttggttgttcctaaagcttgccctttgagtattatctggagaacccaagctgtctctggattggcacccttaaagacagatacattggctggggagtgggaacagggaggggcagaaaaccaccaaaaggccagtgcctcaactcttgattctgatgaggtttctgggaagagatcaaaatggagtctccttaccatggacaatacatgcaaagcaatatcttgttcaggttagtacccgcaaaacgggacatgatgtgacaatctgcatcgatcatggactactaaatgcctttacatag

SEQ ID NO: 294576 - DNA, 772 bp, Homo sapiens
gtctttaaaccgtttatttctccccaccagaagttgggtggcagggcctagaacacagcgtgcgcgggttcccgggtggagccagcgcagacagcgtgggtccctgcggctcttaggcgaaggtggagttgttcccgcccacattggccgcgttcatgtcgtaatagttgatgtagaccctgtccgggctgatgcgcaggcgctcggccagcaggccgcacagcagcttgctgtaggagcggttctgcgcgccgccgatcttgccgatgctgtgcaggctgcagagcgcgcacggctcgctggagccgccgaaggccatgagctggtccgggaccacgtgcaccgcgatgtactgggggggcttgccggtggcctgcgccagctgctgggtgagctcggagaggaacccgtccggcacggaggcgcggggcacgttggtgtttacgatgaacatcggcatgatggcagaaggaccagggccgctggtgcgcggagcggttcaccgtcttcggagcggttcggcccagcctttcgcccaggcgcccaggcccgctgcgcgcgtgcgtgagcgcgcctgcgccgccagggccgctgcaaggggaggagagcggccgcctcaggaggatcccttttcccccagaaattactcaatgctgaaacctctcaaagtggtattagagacgctgaaagcaccatggacgggttttatgatcagcaagtcccttttatggtcccagggaaatctcaatcacaggccgccctctgcattccc

SEQ ID NO: 294577 - DNA, 4087 bp, Homo sapiens
  misc_feature (2209)..(2209): n is a, c, g, or t
agcggagctgcggcgcagagtccagccgctggtgcgcggagcggttcaccgtcttcggagcggttcggcccagcctttcgcccaggcgcccaggcccgctgcgcgcgtgcgtgagcgcgcctgcgccgccagggccgctgcaaggggaggagagcggccgcctcaggaggatcccttttcccccagaaattactcaatgctgaaacctctcaaagtggtattagagacgctgaaagcaccatggacgggttttatgatcagcaagtcccttttatggtcccagggaaatctcgatctgaggaatgcagagggcggcctgtgattgacagaaagaggaagtttttggacacagatctggctcacgattctgaagagctatttcaggatctcagtcaacttcaagaggcttggttagctgaagcacaagttcctgatgatgaacagtttgtcccagattttcagtctgataacctggtgcttcatgccccacctccaaccaagatcaaacgggagctgcacagcccctcctctgagctgtcgtcttgtagccatgagcaggctcttggtgctaactatggagaaaagtgcctctacaactattgtgcctatgataggaagcctccctctgggttcaagccattaacccctcctacaacccccctctcacccacccatcagaatcccctatttcccccacctcaggcaactctgcccacctcagggcatgcccctgcagctggcccagttcaaggtgtgggccccgcccccgccccccattcgcttccagagcctggaccacagcagcaaacatttgcggtcccccgaccaccacatcagcccctgcagatgccaaagatgatgcctgaaaaccagtatccatcagaacagagatttcagagacaactgtctgaaccctgccaccccttccctcctcagccaggagttcctggagataatcgccccagttaccatcggcaaatgtcagaacctattgtccctgcagctcccccgccccctcagggattcaaacaagaataccatgacccactctatgaacatggggtcccgggcatgccagggcccccagcacacgggttccagtcaccaatgggaatcaagcaggagcctcgggattactgcgtcgattcagaagtgcctaactgccagtcatcctacatgagagggggttatttctccagcagccatgaaggtttttcatatgaaaaagatccccgattatactttgacgacacttgtgttgtgcctgagagactggaaggcaaagtcaaacaggagcctaccatgtatcgagaggggcccccttaccagaggcgaggttcccttcagctgtggcagttcctggtcacccttcttgatgacccagccaatgcccacttcattgcctggacaggtcgaggcatggagttcaagctgatagaaccggaagaggttgctcggcgctggggcatccagaagaaccggccagccatgaactatgacaagctgagccgctctctccgctattactatgaaaagggcatcatgcagaaggtggctggagagcgatacgtctacaaatttgtctgtgacccagatgccctcttctccatggctttcccggataaccagcgtccgttcctgaaggcagagtccgagtgccacctcagcgaggaggacaccctgccgctgacccactttgaagacagccccgcttacctcctggacatggaccgctgcagcagcctcccctatgccgaaggctttgcttactaagtttctgagtggcggagtggccaaaccctagagctagcagttcccattcaggcaaacaagggcagtggttttgtttgtgtttttggttgttcctaaagcttgccctttgagtattatctggagaacccaagctgtctctggattggcacccttaaagacagatacattggctggggagtgggaacagggaggggcagaaaaccaccaaaaggccagtgcctcaactcttgattctgatgaggtttctgggaagagatcaaaatggagtctccttaccatggacaatacatgcaaagcaatatcttgttcaggttagtacccgcaaaacgggacatgatgtgacaatctgcatcgatcatggactactaaatgcctttacatagaagggctctgatttgcacaatttgttgaaaaatcacaaacccatagaaaagtnagtaggctaagttggggaggctcaaaccattaagggttaaaaatacatcttaaacattggaaagctcttctagctgaatctgaaatattaccccttgtctagaaaaaggggggcagtcagaacagctgttccccactccgtgttctcaaaatcataaaccatggctactcttgggaaccacccggccatgtggtcgccaagtagagcaagccccctttctcttcccaatcacgtggctgagtgtggatgacttttattttaggagaagggcgattaacacttttgacagtattttgttttgccctgatttgggggattgttttgttttggtggttgttttggaaaaacagtttataaactgatttttgtagttttggtatttaaagcaaaaaaacgaaaaacaaaaaacaaaaacaaaccttttggtaatgtgcactgtgtctttagccagggccgtgcaacttatgaagacactgcagcttgagaggggctttgctgaggcttccccttggccatgtgaaagcccgccttgttgcctgctttgtgctttctgcaccagacaacctgatggaacatttgcacctgagttgtacatttttgaagtgtgcagggcagcctggacacaagcttagattctctatgtatagttccccgtgttcactaacatgccctctctggaaagcatatgtatataacatgtgtcatgtcctttggaaacctggtcacctggtgaaaacccttgggattcttccctgggcatgactgatgacaatttccatttcatcagtttgttttgttttcctttttctttaaatcttggactttaaaccctacctgtgtgattcagtagggtttgagacttagctgtgatactgacaggtaagcaacagtgctagcattctagattcctgcctttttttaaaaagaaattattctcattgctgtattatattggaaaagttttaaacaaccaagctaaagctatgtgaaagttgagctcaaagtagaggaaaagttactggtggtaccttgctgcctgctctgctggtagaattctgtgctccccgtgacacttagtacattaagaatgactacactgttcctcgtatgtgaaggaggcagtgctgactccgtgagtgtgagacacgtgctttgaactgcttttctattcatggagcactccatagtctcaaactgtcccccttatgaccaacagcacatttgtgaagaggttcgcagggataaggggtgcactttatagctatggaaacatgagattctcctctattggaagctaattagcccacaaaggtggtaaacctgtagattgggccttaattagcattgtactctaatcaaaggactctttctaaaccatatttatagctttcttaacctacacatagtctatacatagatgcatattttacccccagctggctagagatttatttgttgtaaatgctgtatagatttggttttcctttctttacttaccctggtttggattttttttttttttttttttgaatggatttatgctgtcttagcaatatgacaataatcctctgtagcttgagctacccctcccctgctgtaacttacgtgacctgtgctgtcactgggcataggacagcggcatcacggttgcattcccattggactcatgcacctcccggatggtttttgtttttttcgggggttctttggggtttgtttgtttgcttcttttccagagtgtggaaagtctacagtgcagaaaggcttgaacctgccagctgatttgaaatactttcaccctgcgcagggccgtatgcatcctgccaagctgcgttatattctgtactgtgtacaataaagaagtttgcttttcgttta

SEQ ID NO: 294578 - DNA, 4132 bp, Homo sapiens
  misc_feature (2254)..(2254): n is a, c, g, or t
agacaaaaaattagggcataagggatagcgaagtgcaccctgagagggggggttttaatatcggacgaggccgctggtgcgcggagcggttcaccgtcttcggagcggttcggcccagcctttcgcccaggcgcccaggcccgctgcgcgcgtgcgtgagcgcgcctgcgccgccagggccgctgcaaggggaggagagcggccgcctcaggaggatcccttttcccccagaaattactcaatgctgaaacctctcaaagtggtattagagacgctgaaagcaccatggacgggttttatgatcagcaagtcccttttatggtcccagggaaatctcgatctgaggaatgcagagggcggcctgtgattgacagaaagaggaagtttttggacacagatctggctcacgattctgaagagctatttcaggatctcagtcaacttcaagaggcttggttagctgaagcacaagttcctgatgatgaacagtttgtcccagattttcagtctgataacctggtgcttcatgccccacctccaaccaagatcaaacgggagctgcacagcccctcctctgagctgtcgtcttgtagccatgagcaggctcttggtgctaactatggagaaaagtgcctctacaactattgtgcctatgataggaagcctccctctgggttcaagccattaacccctcctacaacccccctctcacccacccatcagaatcccctatttcccccacctcaggcaactctgcccacctcagggcatgcccctgcagctggcccagttcaaggtgtgggccccgcccccgccccccattcgcttccagagcctggaccacagcagcaaacatttgcggtcccccgaccaccacatcagcccctgcagatgccaaagatgatgcctgaaaaccagtatccatcagaacagagatttcagagacaactgtctgaaccctgccaccccttccctcctcagccaggagttcctggagataatcgccccagttaccatcggcaaatgtcagaacctattgtccctgcagctcccccgccccctcagggattcaaacaagaataccatgacccactctatgaacatggggtcccgggcatgccagggcccccagcacacgggttccagtcaccaatgggaatcaagcaggagcctcgggattactgcgtcgattcagaagtgcctaactgccagtcatcctacatgagagggggttatttctccagcagccatgaaggtttttcatatgaaaaagatccccgattatactttgacgacacttgtgttgtgcctgagagactggaaggcaaagtcaaacaggagcctaccatgtatcgagaggggcccccttaccagaggcgaggttcccttcagctgtggcagttcctggtcacccttcttgatgacccagccaatgcccacttcattgcctggacaggtcgaggcatggagttcaagctgatagaaccggaagaggttgctcggcgctggggcatccagaagaaccggccagccatgaactatgacaagctgagccgctctctccgctattactatgaaaagggcatcatgcagaaggtggctggagagcgatacgtctacaaatttgtctgtgacccagatgccctcttctccatggctttcccggataaccagcgtccgttcctgaaggcagagtccgagtgccacctcagcgaggaggacaccctgccgctgacccactttgaagacagccccgcttacctcctggacatggaccgctgcagcagcctcccctatgccgaaggctttgcttactaagtttctgagtggcggagtggccaaaccctagagctagcagttcccattcaggcaaacaagggcagtggttttgtttgtgtttttggttgttcctaaagcttgccctttgagtattatctggagaacccaagctgtctctggattggcacccttaaagacagatacattggctggggagtgggaacagggaggggcagaaaaccaccaaaaggccagtgcctcaactcttgattctgatgaggtttctgggaagagatcaaaatggagtctccttaccatggacaatacatgcaaagcaatatcttgttcaggttagtacccgcaaaacgggacatgatgtgacaatctgcatcgatcatggactactaaatgcctttacatagaagggctctgatttgcacaatttgttgaaaaatcacaaacccatagaaaagtnagtaggctaagttggggaggctcaaaccattaagggttaaaaatacatcttaaacattggaaagctcttctagctgaatctgaaatattaccccttgtctagaaaaaggggggcagtcagaacagctgttccccactccgtgttctcaaaatcataaaccatggctactcttgggaaccacccggccatgtggtcgccaagtagagcaagccccctttctcttcccaatcacgtggctgagtgtggatgacttttattttaggagaagggcgattaacacttttgacagtattttgttttgccctgatttgggggattgttttgttttggtggttgttttggaaaaacagtttataaactgatttttgtagttttggtatttaaagcaaaaaaacgaaaaacaaaaaacaaaaacaaaccttttggtaatgtgcactgtgtctttagccagggccgtgcaacttatgaagacactgcagcttgagaggggctttgctgaggcttccccttggccatgtgaaagcccgccttgttgcctgctttgtgctttctgcaccagacaacctgatggaacatttgcacctgagttgtacatttttgaagtgtgcagggcagcctggacacaagcttagattctctatgtatagttccccgtgttcactaacatgccctctctggaaagcatatgtatataacatgtgtcatgtcctttggaaacctggtcacctggtgaaaacccttgggattcttccctgggcatgactgatgacaatttccatttcatcagtttgttttgttttcctttttctttaaatcttggactttaaaccctacctgtgtgattcagtagggtttgagacttagctgtgatactgacaggtaagcaacagtgctagcattctagattcctgcctttttttaaaaagaaattattctcattgctgtattatattggaaaagttttaaacaaccaagctaaagctatgtgaaagttgagctcaaagtagaggaaaagttactggtggtaccttgctgcctgctctgctggtagaattctgtgctccccgtgacacttagtacattaagaatgactacactgttcctcgtatgtgaaggaggcagtgctgactccgtgagtgtgagacacgtgctttgaactgcttttctattcatggagcactccatagtctcaaactgtcccccttatgaccaacagcacatttgtgaagaggttcgcagggataaggggtgcactttatagctatggaaacatgagattctcctctattggaagctaattagcccacaaaggtggtaaacctgtagattgggccttaattagcattgtactctaatcaaaggactctttctaaaccatatttatagctttcttaacctacacatagtctatacatagatgcatattttacccccagctggctagagatttatttgttgtaaatgctgtatagatttggttttcctttctttacttaccctggtttggattttttttttttttttttttgaatggatttatgctgtcttagcaatatgacaataatcctctgtagcttgagctacccctcccctgctgtaacttacgtgacctgtgctgtcactgggcataggacagcggcatcacggttgcattcccattggactcatgcacctcccggatggtttttgtttttttcgggggttctttggggtttgtttgtttgcttcttttccagagtgtggaaagtctacagtgcagaaaggcttgaacctgccagctgatttgaaatactttcaccctgcgcagggccgtatgcatcctgccaagctgcgttatattctgtactgtgtacaataaagaagtttgcttttcgttta

SEQ ID NO: 294579 - DNA, 812 bp, Homo sapiens
agcggagctgcggcgcagagtccagccgctggtgcgcggagcggttcaccgtcttcggagcggttcggcccagcctttcgcccaggcgcccaggcccgctgcgcgcgtgcgtgagcgcgcctgcgccgccagggccgctgcaaggggaggagagcggccgcctcaggaggatcccttttcccccagaaattactcaatgctgaaacctctcaaagtggtattagagacgctgaaagcaccatggacgggttttatgatcagcaagtcccttttatggtcccagggaaatctcgatctgaggaatgcagagggcggcctgtgattgacagaaagaggaagtttttggacacagatctggctcacgattctgaagagctatttcaggatctcagtcaacttcaagaggcttggttagctgaagcacaagttcctgatgatgaacagtttgtcccagattttcagtctgataacctggtgcttcatgccccacctccaaccaagatcaaacgggagctgcacagcccctcctctgagctgtcgtcttgtagccatgagcaggctcttggtgctaactatggagaaaagtgcctctacaactattgtgcctatgataggaagcctccctctgggttcaagccattaacccctcctacaaagcctcgcgcgtctcaaggccaggccaatcatgaaattcccgtaattcttccgcccaacatacagggccaactctagcccaaactcaaggggcgatgcccgctgcagcggggccaagttccaggcgcgtcgcgggagccggcggtcgccccgcgcgg

SEQ ID NO: 294580 - DNA, 4382 bp, Homo sapiens
  misc_feature (166)..(166): n is a, c, g, or t
  misc_feature (2504)..(2504): n is a, c, g, or t
gaacgggtgatgcggttgtcacggttcagtttgaaggcatgcataagaatgaagccataagccaacagcttcatgttttacggaaggaagtgaagcagttgcaagcgagaagcgtgctaaacgcaccactcacttacatattggtggaagcgtgctgtacatgcangcaaacttgatcacggcgcttagtgaatgcctacaagttgcagcctacacctgggattcagaaagttggcattagccttttctttactattgtggattacgtcagcgatgagacgcagcgtcatcccccaacaaggcagttctttacttcatgtattgagatcatggggcagatctacaccggcctgaagagtgcaggcaggaggctggcccagtgcgcctctgtcaccatcaggacaaacaagctgctgccaatgcaagtggatggagaaccctggatgcagccatgttgcacggaggatcccttttcccccagaaattactcaatgctgaaacctctcaaagtggtattagagacgctgaaagcaccatggacgggttttatgatcagcaagtcccttttatggtcccagggaaatctcgatctgaggaatgcagagggcggcctgtgattgacagaaagaggaagtttttggacacagatctggctcacgattctgaagagctatttcaggatctcagtcaacttcaagaggcttggttagctgaagcacaagttcctgatgatgaacagtttgtcccagattttcagtctgataacctggtgcttcatgccccacctccaaccaagatcaaacgggagctgcacagcccctcctctgagctgtcgtcttgtagccatgagcaggctcttggtgctaactatggagaaaagtgcctctacaactattgtgcctatgataggaagcctccctctgggttcaagccattaacccctcctacaacccccctctcacccacccatcagaatcccctatttcccccacctcaggcaactctgcccacctcagggcatgcccctgcagctggcccagttcaaggtgtgggccccgcccccgccccccattcgcttccagagcctggaccacagcagcaaacatttgcggtcccccgaccaccacatcagcccctgcagatgccaaagatgatgcctgaaaaccagtatccatcagaacagagatttcagagacaactgtctgaaccctgccaccccttccctcctcagccaggagttcctggagataatcgccccagttaccatcggcaaatgtcagaacctattgtccctgcagctcccccgccccctcagggattcaaacaagaataccatgacccactctatgaacatggggtcccgggcatgccagggcccccagcacacgggttccagtcaccaatgggaatcaagcaggagcctcgggattactgcgtcgattcagaagtgcctaactgccagtcatcctacatgagagggggttatttctccagcagccatgaaggtttttcatatgaaaaagatccccgattatactttgacgacacttgtgttgtgcctgagagactggaaggcaaagtcaaacaggagcctaccatgtatcgagaggggcccccttaccagaggcgaggttcccttcagctgtggcagttcctggtcacccttcttgatgacccagccaatgcccacttcattgcctggacaggtcgaggcatggagttcaagctgatagaaccggaagaggttgctcggcgctggggcatccagaagaaccggccagccatgaactatgacaagctgagccgctctctccgctattactatgaaaagggcatcatgcagaaggtggctggagagcgatacgtctacaaatttgtctgtgacccagatgccctcttctccatggctttcccggataaccagcgtccgttcctgaaggcagagtccgagtgccacctcagcgaggaggacaccctgccgctgacccactttgaagacagccccgcttacctcctggacatggaccgctgcagcagcctcccctatgccgaaggctttgcttactaagtttctgagtggcggagtggccaaaccctagagctagcagttcccattcaggcaaacaagggcagtggttttgtttgtgtttttggttgttcctaaagcttgccctttgagtattatctggagaacccaagctgtctctggattggcacccttaaagacagatacattggctggggagtgggaacagggaggggcagaaaaccaccaaaaggccagtgcctcaactcttgattctgatgaggtttctgggaagagatcaaaatggagtctccttaccatggacaatacatgcaaagcaatatcttgttcaggttagtacccgcaaaacgggacatgatgtgacaatctgcatcgatcatggactactaaatgcctttacatagaagggctctgatttgcacaatttgttgaaaaatcacaaacccatagaaaagtnagtaggctaagttggggaggctcaaaccattaagggttaaaaatacatcttaaacattggaaagctcttctagctgaatctgaaatattaccccttgtctagaaaaaggggggcagtcagaacagctgttccccactccgtgttctcaaaatcataaaccatggctactcttgggaaccacccggccatgtggtcgccaagtagagcaagccccctttctcttcccaatcacgtggctgagtgtggatgacttttattttaggagaagggcgattaacacttttgacagtattttgttttgccctgatttgggggattgttttgttttggtggttgttttggaaaaacagtttataaactgatttttgtagttttggtatttaaagcaaaaaaacgaaaaacaaaaaacaaaaacaaaccttttggtaatgtgcactgtgtctttagccagggccgtgcaacttatgaagacactgcagcttgagaggggctttgctgaggcttccccttggccatgtgaaagcccgccttgttgcctgctttgtgctttctgcaccagacaacctgatggaacatttgcacctgagttgtacatttttgaagtgtgcagggcagcctggacacaagcttagattctctatgtatagttccccgtgttcactaacatgccctctctggaaagcatatgtatataacatgtgtcatgtcctttggaaacctggtcacctggtgaaaacccttgggattcttccctgggcatgactgatgacaatttccatttcatcagtttgttttgttttcctttttctttaaatcttggactttaaaccctacctgtgtgattcagtagggtttgagacttagctgtgatactgacaggtaagcaacagtgctagcattctagattcctgcctttttttaaaaagaaattattctcattgctgtattatattggaaaagttttaaacaaccaagctaaagctatgtgaaagttgagctcaaagtagaggaaaagttactggtggtaccttgctgcctgctctgctggtagaattctgtgctccccgtgacacttagtacattaagaatgactacactgttcctcgtatgtgaaggaggcagtgctgactccgtgagtgtgagacacgtgctttgaactgcttttctattcatggagcactccatagtctcaaactgtcccccttatgaccaacagcacatttgtgaagaggttcgcagggataaggggtgcactttatagctatggaaacatgagattctcctctattggaagctaattagcccacaaaggtggtaaacctgtagattgggccttaattagcattgtactctaatcaaaggactctttctaaaccatatttatagctttcttaacctacacatagtctatacatagatgcatattttacccccagctggctagagatttatttgttgtaaatgctgtatagatttggttttcctttctttacttaccctggtttggattttttttttttttttttttgaatggatttatgctgtcttagcaatatgacaataatcctctgtagcttgagctacccctcccctgctgtaacttacgtgacctgtgctgtcactgggcataggacagcggcatcacggttgcattcccattggactcatgcacctcccggatggtttttgtttttttcgggggttctttggggtttgtttgtttgcttcttttccagagtgtggaaagtctacagtgcagaaaggcttgaacctgccagctgatttgaaatactttcaccctgcgcagggccgtatgcatcctgccaagctgcgttatattctgtactgtgtacaataaagaagtttgcttttcgttta

SEQ ID NO: 294581 - DNA, 936 bp, Homo sapiens
agacaaaaaattagggcataagggatagcgaagtgcaccctgagagggggggttttaatatcggacgaggccgctggtgcgcggagcggttcaccgtcttcggagcggttcggcccagcctttcgcccaggcgcccaggcccgctgcgcgcgtgcgtgagcgcgcctgcgccgccagggccgctgcaaggggaggagagcggccgcctcaggaggatcccttttcccccagaaattactcaatgctgaaacctctcaaagtggtattagagacgctgaaagcaccatggacgggttttatgatcagcaagtcccttttatggtcccagggaaatctcgatctgaggaatgcagagggcggcctgtgattgacagaaagaggaagtttttggacacagatctggctcacgattctgaagagctatttcaggatctcagtcaacttcaagaggcttggttagctgaagcacaagttcctgatgatgaacagtttgtcccagattttcagtctgataaccaaaaatgtcctgtttccccttatcctgattgcgtgatccagtgtgagcagcccttcatgataaaatccactgtggttgatgtaaggtcacagtagaggaagccgccctgtcatctctaatgagttgggagaacaagggtttccttagacctctttctcaatcttgaaaataaaaccaatagttgtctatcataaacacaaccaccatcacataccaatcaaaaaccaccacacaacaacaagatagaaaacacaaatagaggcgcgcggagtcatattatacggggcgcgagcacaagacagatgtagcgagagagaaggagcatgtctctgttctgttctgtacgccgacgacctgtagttgggaacaagaggtgggttacttgcggggggacccccaagtagggagggcgagtaatg

SEQ ID NO: 294582 - DNA, 2884 bp, Homo sapiens
  misc_feature (1006)..(1006): n is a, c, g, or t
agacaaaaaattagggcataagggatagcgaagtgcaccctgagagggggggttttaatatcggacgaggccgctggtgcgcggagcggttcaccgtcttcggagcggttcggcccagcctttcgcccaggcgcccaggcccgctgcgcgcgtgcgtgagcgcgcctgcgccgccagggccgctgcaaggggaggagagcggccgcctcaggaggatcccttttcccccagaaattactcaatgctgaaacctctcaaagtggtattagagacgctgaaagcaccatgaactatgacaagctgagccgctctctccgctattactatgaaaagggcatcatgcagaaggtggctggagagcgatacgtctacaaatttgtctgtgacccagatgccctcttctccatggctttcccggataaccagcgtccgttcctgaaggcagagtccgagtgccacctcagcgaggaggacaccctgccgctgacccactttgaagacagccccgcttacctcctggacatggaccgctgcagcagcctcccctatgccgaaggctttgcttactaagtttctgagtggcggagtggccaaaccctagagctagcagttcccattcaggcaaacaagggcagtggttttgtttgtgtttttggttgttcctaaagcttgccctttgagtattatctggagaacccaagctgtctctggattggcacccttaaagacagatacattggctggggagtgggaacagggaggggcagaaaaccaccaaaaggccagtgcctcaactcttgattctgatgaggtttctgggaagagatcaaaatggagtctccttaccatggacaatacatgcaaagcaatatcttgttcaggttagtacccgcaaaacgggacatgatgtgacaatctgcatcgatcatggactactaaatgcctttacatagaagggctctgatttgcacaatttgttgaaaaatcacaaacccatagaaaagtnagtaggctaagttggggaggctcaaaccattaagggttaaaaatacatcttaaacattggaaagctcttctagctgaatctgaaatattaccccttgtctagaaaaaggggggcagtcagaacagctgttccccactccgtgttctcaaaatcataaaccatggctactcttgggaaccacccggccatgtggtcgccaagtagagcaagccccctttctcttcccaatcacgtggctgagtgtggatgacttttattttaggagaagggcgattaacacttttgacagtattttgttttgccctgatttgggggattgttttgttttggtggttgttttggaaaaacagtttataaactgatttttgtagttttggtatttaaagcaaaaaaacgaaaaacaaaaaacaaaaacaaaccttttggtaatgtgcactgtgtctttagccagggccgtgcaacttatgaagacactgcagcttgagaggggctttgctgaggcttccccttggccatgtgaaagcccgccttgttgcctgctttgtgctttctgcaccagacaacctgatggaacatttgcacctgagttgtacatttttgaagtgtgcagggcagcctggacacaagcttagattctctatgtatagttccccgtgttcactaacatgccctctctggaaagcatatgtatataacatgtgtcatgtcctttggaaacctggtcacctggtgaaaacccttgggattcttccctgggcatgactgatgacaatttccatttcatcagtttgttttgttttcctttttctttaaatcttggactttaaaccctacctgtgtgattcagtagggtttgagacttagctgtgatactgacaggtaagcaacagtgctagcattctagattcctgcctttttttaaaaagaaattattctcattgctgtattatattggaaaagttttaaacaaccaagctaaagctatgtgaaagttgagctcaaagtagaggaaaagttactggtggtaccttgctgcctgctctgctggtagaattctgtgctccccgtgacacttagtacattaagaatgactacactgttcctcgtatgtgaaggaggcagtgctgactccgtgagtgtgagacacgtgctttgaactgcttttctattcatggagcactccatagtctcaaactgtcccccttatgaccaacagcacatttgtgaagaggttcgcagggataaggggtgcactttatagctatggaaacatgagattctcctctattggaagctaattagcccacaaaggtggtaaacctgtagattgggccttaattagcattgtactctaatcaaaggactctttctaaaccatatttatagctttcttaacctacacatagtctatacatagatgcatattttacccccagctggctagagatttatttgttgtaaatgctgtatagatttggttttcctttctttacttaccctggtttggattttttttttttttttttttgaatggatttatgctgtcttagcaatatgacaataatcctctgtagcttgagctacccctcccctgctgtaacttacgtgacctgtgctgtcactgggcataggacagcggcatcacggttgcattcccattggactcatgcacctcccggatggtttttgtttttttcgggggttctttggggtttgtttgtttgcttcttttccagagtgtggaaagtctacagtgcagaaaggcttgaacctgccagctgatttgaaatactttcaccctgcgcagggccgtatgcatcctgccaagctgcgttatattctgtactgtgtacaataaagaagtttgcttttcgttta

SEQ ID NO: 294583 - DNA, 985 bp, Homo sapiens
ctgccaaagcagccaaccaaaggggcagctcagctccttcgtggcaccagcagtgttcctgatgcagttgaagagttgatgtctttgacaacatacggacactgcctggattacctagatgtcacatcttaattgccaattgatgaaattaggtaaatgaaaagaaagcacttaaatttccccttagagcattttaacatgacatgcaatcaggttttgtctgctaataattatttctccccctccatccctcccaccagtttctttcctgaagtctgtgaggccgctataaacaggtagatgaagttagagcagttatggccctaaatggtccacagttgggtattggcactaccgcagtttcaggtgatgtcggcatttttagaaataggaggagatggaaaaattacgcttcagctgttaaaaatatttttggggcattgagttactttaaaacacgtatattctctaagctgtttttatctgaacttgtagagtctattcattttcttgttcagaacattttgtaatatgtgaaaccttttataattaaaactctgaactgcagattaagtctgacttgcagttttgtaagattctaatggattaacagcattttgttttgcgattcctgccagctcccaggggctttggttatagaagtgaagtggactaaatacggatccctgctgaatccacaggccaaaatagtcaatgtaactgcaaatctaatttcatcctcctttcctgaggccaactcaggaaatgaaaggacgattcttatttccactgcggttacttttgtggatgtgtctgcacctgcagaggcaggcttcagagctccaccagccatcaatgccaggctgccctttaacttcttcttcccgtttgtttgacaatgctcagatgcatcagttccttaatatacacgtgaaatttgaaaactgtacattcggtgagattaaattttatatacaactagcaa

SEQ ID NO: 294584 - DNA, 1869 bp, Homo sapiens
cgtgatgccccgcgcctggctgtcgcggttgccgggcaacgcgctgtccatgtcgcgggcctcgctgggactccctgggagatgaggccgcgaggtctcccgccgctcctggtggtgctcctgggctgctgggcctccgtgagcgcccagaccgatgccaccccggcggtgacgacagagggcctcaactccaccgaggcagccctggccaccttcggaactttcccgtcgaccaggccccccgggactcccagggctccagggccctcctccggccccaggcctaccccagtcacggacgggtctcactctgtcactcaggctggagtatagtggcatgatcacagctcactgcggcctcgacctcctgggctcagttgctgttctctgtgtctgtgacttatccccagcacagtgtgacatcaactgctgctgtgatcccgactgcagctccgtggatttcagtgtcttttctgcctgctcagttccagttgtcacgggcgacagccagttttgtagtcaaaaagcagtcatctattcattgaattttacagcaaacccacctcaaagagtatttgaacttgttgaccagattaatccatctattttctgcattcatattacaaactataaacctgcattatcctttattaatccagaagtacctgatgaaaacaattttgatacattgatgaaaacatctgatggttttacattgaatgctgaatcatatgtttccttcacaaccaaactggatattcctactgctgctaaatatgagtatggggttcctctgcagacttcagattcgtttctgagatttccttcgtccctgacatcatctctgtgcactgataataaccctgcagcgtttctggtgaaccaggctgttaagtgcaccagaaaaataaatttagaacagtgtgaagaaattgaagccctcagcatggctttttacagcagcccggaaattctgagggtacctgattcaagaaaaaaggtccctatcactgttcagtccatcgtcattcagtctctaaataaaacgctcacccgacgggaggacactgatgtgctgcagccgactctcgtcaacgctggacactttagcctttgcgtgaatgttgttcttgaggtaaagtacagcctcacatacacagatgcaggtgaagtcaccaaagctgatctctcattcgttctggggacagttagcagcgtagtggtcccactgcagcaaaagtttgaaattcattttcttcaggaaaatacccagccagtccctctcagtggaaaccctggttatgtcgtggggctcccattagctgctggattccagcctcataagggactgactggagctctcccgtgtcagctcgtagcacagaaggtgaagagcctgctgtggggccagggcttcccagattacgtggccccttttggaaattcccaggcccaggacatgctggactgggtgcccatccacttcatcacccagtcattcaacaggaaggattcctgccagctcccaggggctttggttatagaagtgaagtggactaaatacggatccctgctgaatccacaggccaaaatagtcaatgtaactgcaaatctaatttcatcctcctttcctgaggccaactcaggaaatgaaaggacgattcttatttccactgcggttacttttgtggatgtgtctgcacctgcagaggcaggcttcagagctccaccagccatcaatgccaggctgccctttaacttcttcttcccgtttgtttgacaatgctcagatgcatcagttccttaatatacacgtgaaatttgaaaactgtacattcggtgagattaaattttatatacaactagcaa

SEQ ID NO: 294585 - DNA, 1130 bp, Homo sapiens
cgtgatgccccgcgcctggctgtcgcggttgccgggcaacgcgctgtccatgtcgcgggcctcgctgggactccctgggagatgaggccgcgaggtctcccgccgctcctggtggtgctcctgggctgctgggcctccgtgagcgcccagaccgatgccaccccggcggtgacgacagagggcctcaactccaccgaggcagccctggccaccttcggaactttcccgtcgaccaggccccccgggactcccagggctccagggccctcctccggccccaggcctaccccagtcacggacggtgggtaccatgtgccagctcctggagtccacagtgatccaacctcaaggggacagccccgttgctgttctctgtgtctgtgacttatccccagcacagtgtgacatcaactgctgctgtgatcccgactgcagctccgtggatttcagtgtcttttctgcctgctcagttccagttgtcacgggcgacagccagttttgtagtcaaaaagcagtcatctattcattgaattttacagcaaacccacctcaaagagtatttgaacttgttgaccagattaatccatctattttctgcattcatattacaaactataaacctgcattatcctttattaatccagaagtacctgatgaaaacaattttgatacattgatgaaaacatctgatggttttacattgaatgctgaatcatatgtttccttcacaaccaaactggatattcctactgctgctaaatatgaggtgagcctgaacttgattgattcttttcatcccatcacaaatatctttccttgtaagttaattttcaaggttaccaggaaaactgggttccttgagacagagttgatattatagactaaaaaacttaatgttcatgcctacaaatcaaagatcatgaaaattaaaactgaatatttgaagatggattaaagacttaaatgtaagacctaaaaccatacaaaccctagaagaaaacccaggcaataccattcaggacatagacatgggcaaagacatcatgagtaaaacaaccaaaagcaatggcaacaaaagccaaaattgacaaatgggatctaattaaactaaagagcttctgcacagcaaa

SEQ ID NO: 294586 - DNA, 742 bp, Homo sapiens
cgtgatgccccgcgcctggctgtcgcggttgccgggcaacgcgctgtccatgtcgcgggcctcgctgggactccctgggagatgaggccgcgaggtctcccgccgctcctggtggtgctcctgggctgctgggcctccgtgagcgcccagaccgatgccaccccggcggtgacgacagagggcctcaactccaccgaggcagccctggccaccttcggaactttcccgtcgaccaggccccccgggactcccagggctccagggccctcctccggccccaggcctaccccagtcacggacgttgctgttctctgtgtctgtgacttatccccagcacagtgtgacatcaactgctgctgtgatcccgactgcagctccgtggatttcagtgtcttttctgcctgctcagttccagttgtcacgggcgacagccagttttgtagtcaaaaagcagtcatctattcattgaattttacagcaaacccacctcaaagagtatttgaacttgttgaccagattaatccatctattttctgcattcatattacaaactgcagatgctctgtgtgatttgtaatctgaagtgataactggccagtgactgtcaggttctctgtcgtaacaccagcccagtgaacatgccagcctgcttccttctctctcttctgtacacagcacattttactccaggactttcacggtggctgtgtgagagtagaagtcggattctttcattcccata

SEQ ID NO: 294587 - DNA, 803 bp, Homo sapiens
cgtgatgccccgcgcctggctgtcgcggttgccgggcaacgcgctgtccatgtcgcgggcctcgctgggactccctgggagatgaggccgcgaggtctcccgccgctcctggtggtgctcctgggctgctgggcctccgtgagcgcccagaccgatgccaccccggcggtgacgacagagggcctcaactccaccgaggcagccctggccaccttcggaactttcccgtcgaccaggccccccgggactcccagggctccagggccctcctccggccccaggcctaccccagtcacggacggtgggtaccatgtgccagctcctggagtccacagtgatccaacctcaaggggacagccccgttgctgttctctgtgtctgtgacttatccccagcacagtgtgacatcaactgctgctgtgatcccgactgcagctccgtggatttcagtgtcttttctgcctgctcagttccagttgtcacgggcgacagccagttttgtagtcaaaaagcagtcatctattcattgaattttacagcaaacccacctcaaagagtatttgaacttgttgaccagattaatccatctattttctgcattcatattacaaactgcagatgctctgtgtgatttgtaatctgaagtgataactggccagtgactgtcaggttctctgtcgtaacaccagcccagtgaacatgccagcctgcttccttctctctcttctgtacacagcacattttactccaggactttcacggtggctgtgtgagagtagaagtcggattctttcattcccata

SEQ ID NO: 294588 - DNA, 497 bp, Homo sapiens
atagtgtatatattgtacatttgtttccaaaaggggaaagaaataataataaaaatatatgtatgttttttacacacatatttgtttttatttccatagaatatttctagaaagagacacaagaagcctcatgccagttgcctctggagaaggggactggtggtagctggggggcaggacaagaattggagggggatttactcattatctttttgtgctttttgaattttgaatctcatgaatgtattctttttgaaaaataatttaaaacattgtaggccaggcgtactggttcacacctgtaatcccagcactctgggaggccgaggcgagaggatcacttgaggtgaggagtttgagaccagtctgggcaacacggtgaaaccttgtctctactaaaaaaacaaaacaaacaacaacaaaattgtatatctgtgttgtaacttattttacagttttacctagattaaaactttttagttgccattggaaaattg

SEQ ID NO: 294589 - DNA, 948 bp, Homo sapiens
cgtgatgccccgcgcctggctgtcgcggttgccgggcaacgcgctgtccatgtcgcgggcctcgctgggactccctgggagatgaggccgcgaggtctcccgccgctcctggtggtgctcctgggctgctgggcctccgtgagcgcccagaccgatgccaccccggcggtgacgacagagggcctcaactccaccgaggcagccctggccaccttcggaactttcccgtcgaccaggccccccgggactcccagggctccagggccctcctccggccccaggcctaccccagtcacggacggggcgacagccagttttgtagtcaaaaagcagtcatctattcattgaattttacagcaaacccacctcaaagagtatttgaacttgttgaccagattaatccatctattttctgcattcatattacaaactataaacctgcattatcctttattaatccagaagtacctgatgaaaacaattttgatacattgatgaaaacatctgatggttttacattgaatgctgaatcatatgtttccttcacaaccaaactggatattcctactgctgctaaatatgaggtgagcctgaacttgattgattcttttcatcccatcacaaatatctttccttgtaagttaattttcaaggttaccaggaaaactgggttccttgagacagagttgatattatagactaaaaaacttaatgttcatgcctacaaatcaaagatcatgaaaattaaaactgaatatttgaagatggattaaagacttaaatgtaagacctaaaaccatacaaaccctagaagaaaacccaggcaataccattcaggacatagacatgggcaaagacatcatgagtaaaacaaccaaaagcaatggcaacaaaagccaaaattgacaaatgggatctaattaaactaaagagcttctgcacagcaaa

SEQ ID NO: 294590 - DNA, 635 bp, Homo sapiens
ctgttggttgttgtgtttgcagtatggggttcctctgcagacttcagattcgtttctgagatttccttcgtccctgacatcatctctgtgcactgataataaccctgcaggtaagaaagtggtcattcttctttccttagacatttgctgttattattaggttggtggaaaagtagttgcggtttttgccattaaaagtaatgaccaaaatcgcaattatttttgcaccaacttaatactttacatttgtagtagtcatcattaaacaggcctcgtaactaaaaacagaatcttcgggttaaaagaggcctcaaaggtcacgtagttcaatttctcacccagggccagtcttttctaccacatgcagtcactgcttgagcacttgtagtgatggggaactgactacctgaaaacagctcactcaattgtttaacacttccagttgttggaaagttctaaagcatatcaacagctaaccattattaagcacatattgtgtgctgggtattgtgttaagtgcttgtatgtgttttcccttaaatactctctgtaatcccttgaggccaggttagtatctccattttttagagcaggaaacagagatgtacagtttcttgttcaggctcactcaggtg

SEQ ID NO: 294591 - DNA, 319 bp, Homo sapiens
  misc_feature (307)..(308): n is a, c, g, or t
  misc_feature (312)..(312): n is a, c, g, or t
cagcttcattccaacagatcaatgaccacctgttagcacttcccagtattatttggttacactatgcaatctggctgtaaactaagactgactggagctctcccgtgtcagctcgtagcacagaaggtgaagagcctgctgtggggccagggcttcccagattacgtggccccttttggaaattcccaggcccaggacatgctggactgggtgcccatccacttcatcacccagtcattcaacaggaaggattcctgccagctcccaggggctttggttatagaagtgcaggaagcaagccggggannctcnagagccc

SEQ ID NO: 294592 - DNA, 1934 bp, Homo sapiens
cgtgatgccccgcgcctggctgtcgcggttgccgggcaacgcgctgtccatgtcgcgggcctcgctgggactccctgggagatgaggccgcgaggtctcccgccgctcctggtggtgctcctgggctgctgggcctccgtgagcgcccagaccgatgccaccccggcggtgacgacagagggcctcaactccaccgaggcagccctggccaccttcggaactttcccgtcgaccaggccccccgggactcccagggctccagggccctcctccggccccaggcctaccccagtcacggacgttgctgttctctgtgtctgtgacttatccccagcacagtgtgacatcaactgctgctgtgatcccgactgcagctccgtggatttcagtgtcttttctgcctgctcagttccagttgtcacgggcgacagccagttttgtagtcaaaaagcagtcatctattcattgaattttacagcaaacccacctcaaagagtatttgaacttgttgaccagattaatccatctattttctgcattcatattacaaactataaacctgcattatcctttattaatccagaagtacctgatgaaaacaattttgatacattgatgaaaacatctgatggttttacattgaatgctgaatcatatgtttccttcacaaccaaactggatattcctactgctgctaaatatgagtatggggttcctctgcagacttcagattcgtttctgagatttccttcgtccctgacatcatctctgtgcactgataataaccctgcagcgtttctggtgaaccaggctgttaagtgcaccagaaaaataaatttagaacagtgtgaagaaattgaagccctcagcatggctttttacagcagcccggaaattctgagggtacctgattcaagaaaaaaggtccctatcactgttcagtccatcgtcattcagtctctaaataaaacgctcacccgacgggaggacactgatgtgctgcagccgactctcgtcaacgctggacactttagcctttgcgtgaatgttgttcttgaggtaaagtacagcctcacatacacagatgcaggtgaagtcaccaaagctgatctctcattcgttctggggacagttagcagcgtagtggtcccactgcagcaaaagtttgaaattcattttcttcaggaaaatacccagccagtccctctcagtggaaaccctggttatgtcgtggggctcccattagctgctggattccagcctcataaggggtctgggattattcagaccacaaatagatatggacagcttactattcttcatagcacaactgagcaagactgcttagcactggagggggtccggaccccagtattatttggttacactatgcaatctggctgtaaactaagactgactggagctctcccgtgtcagctcgtagcacagaaggtgaagagcctgctgtggggccagggcttcccagattacgtggccccttttggaaattcccaggcccaggacatgctggactgggtgcccatccacttcatcacccagtcattcaacaggaaggattcctgccagctcccaggggctttggttatagaagtgaagtggactaaatacggatccctgctgaatccacaggccaaaatagtcaatgtaactgcaaatctaatttcatcctcctttcctgaggccaactcaggaaatgaaaggacgattcttatttccactgcggttacttttgtggatgtgtctgcacctgcagaggcaggcttcagagctccaccagccatcaatgccaggctgccctttaacttcttcttcccgtttgtttgacaatgctcagatgcatcagttccttaatatacacgtgaaatttgaaaactgtacattcggtgagattaaattttatatacaactagcaa

SEQ ID NO: 294593 - DNA, 1880 bp, Homo sapiens
cgtgatgccccgcgcctggctgtcgcggttgccgggcaacgcgctgtccatgtcgcgggcctcgctgggactccctgggagatgaggccgcgaggtctcccgccgctcctggtggtgctcctgggctgctgggcctccgtgagcgcccagaccgatgccaccccggcggtgacgacagagggcctcaactccaccgaggcagccctggccaccttcggaactttcccgtcgaccaggccccccgggactcccagggctccagggccctcctccggccccaggcctaccccagtcacggacgttgctgttctctgtgtctgtgacttatccccagcacagtgtgacatcaactgctgctgtgatcccgactgcagctccgtggatttcagtgtcttttctgcctgctcagttccagttgtcacgggcgacagccagttttgtagtcaaaaagcagtcatctattcattgaattttacagcaaacccacctcaaagagtatttgaacttgttgaccagattaatccatctattttctgcattcatattacaaactataaacctgcattatcctttattaatccagaagtacctgatgaaaacaattttgatacattgatgaaaacatctgatggttttacattgaatgctgaatcatatgtttccttcacaaccaaactggatattcctactgctgctaaatatgagtatggggttcctctgcagacttcagattcgtttctgagatttccttcgtccctgacatcatctctgtgcactgataataaccctgcagcgtttctggtgaaccaggctgttaagtgcaccagaaaaataaatttagaacagtgtgaagaaattgaagccctcagcatggctttttacagcagcccggaaattctgagggtacctgattcaagaaaaaaggtccctatcactgttcagtccatcgtcattcagtctctaaataaaacgctcacccgacgggaggacactgatgtgctgcagccgactctcgtcaacgctggacactttagcctttgcgtgaatgttgttcttgaggtaaagtacagcctcacatacacagatgcaggtgaagtcaccaaagctgatctctcattcgttctggggacagttagcagcgtagtggtcccactgcagcaaaagtttgaaattcattttcttcagccattagctgctggattccagcctcataaggggtctgggattattcagaccacaaatagatatggacagcttactattcttcatagcacaactgagcaagactgcttagcactggagggggtccggaccccagtattatttggttacactatgcaatctggctgtaaactaagactgactggagctctcccgtgtcagctcgtagcacagaaggtgaagagcctgctgtggggccagggcttcccagattacgtggccccttttggaaattcccaggcccaggacatgctggactgggtgcccatccacttcatcacccagtcattcaacaggaaggattcctgccagctcccaggggctttggttatagaagtgaagtggactaaatacggatccctgctgaatccacaggccaaaatagtcaatgtaactgcaaatctaatttcatcctcctttcctgaggccaactcaggaaatgaaaggacgattcttatttccactgcggttacttttgtggatgtgtctgcacctgcagaggcaggcttcagagctccaccagccatcaatgccaggctgccctttaacttcttcttcccgtttgtttgacaatgctcagatgcatcagttccttaatatacacgtgaaatttgaaaactgtacattcggtgagattaaattttatatacaactagcaa

SEQ ID NO: 294594 - DNA, 2511 bp, Homo sapiens
cgtgatgccccgcgcctggctgtcgcggttgccgggcaacgcgctgtccatgtcgcgggcctcgctgggactccctgggagatgaggccgcgaggtctcccgccgctcctggtggtgctcctgggctgctgggcctccgtgagcgcccagaccgatgccaccccggcggtgacgacagagggcctcaactccaccgaggcagccctggccaccttcggaactttcccgtcgaccaggccccccgggactcccagggctccagggccctcctccggccccaggcctaccccagtcacggacgttgctgttctctgtgtctgtgacttatccccagcacagtgtgacatcaactgctgctgtgatcccgactgcagctccgtggatttcagtgtcttttctgcctgctcagttccagttgtcacgggcgacagccagttttgtagtcaaaaagcagtcatctattcattgaattttacagcaaacccacctcaaagagtatttgaacttgttgaccagattaatccatctattttctgcattcatattacaaactataaacctgcattatcctttattaatccagaagtacctgatgaaaacaattttgatacattgatgaaaacatctgatggttttacattgaatgctgaatcatatgtttccttcacaaccaaactggatattcctactgctgctaaatatgagtatggggttcctctgcagacttcagattcgtttctgagatttccttcgtccctgacatcatctctgtgcactgataataaccctgcagcgtttctggtgaaccaggctgttaagtgcaccagaaaaataaatttagaacagtgtgaagaaattgaagccctcagcatggctttttacagcagcccggaaattctgagggtacctgattcaagaaaaaaggtccctatcactgttcagtccatcgtcattcagtctctaaataaaacgctcacccgacgggaggacactgatgtgctgcagccgactctcgtcaacgctggacactttagcctttgcgtgaatgttgttcttgaggtaaagtacagcctcacatacacagatgcaggtgaagtcaccaaagctgatctctcattcgttctggggacagttagcagcgtagtggtcccactgcagcaaaagtttgaaattcattttcttcaggaaaatacccagccagtccctctcagtggaaaccctggttatgtcgtggggctcccattagctgctggattccagcctcataaggggtctgggattattcagaccacaaatagatatggacagcttactattcttcatagcacaactgagcaagactgcttagcactggagggggtccggaccccagtattatttggttacactatgcaatctggctgtaaactaagaaggtaaaagagtcacttgtttctgtttgaacttgtgctgatcagaaaacaaagcattctcacttttccccattttaatcaaatctctgcatcagctgatgagctcacatgaaagccacatatagtatatcatcatgcatgaatagtagcaaaactgttacaatcatttttgttattaaatacggcaaagcaaaaatttcaaggctttgtatgtttctttttctttttttaagagatggggtctcgctcttgtactccagcctgggcaacagagcaaactccatctcaaaacaaaacaaaaaaaccaaaaatcaaaacttaaaaaacaaaaaactgctggtgggctgggtgtggtggctcactcctgtagtcccagcactctgggaggattgcatgagcccaggagtttgaggctgcagggagctatgatggtgccactgcactccagcttgggcatcagagtgagaccttatctcaaaaataaataaacaaagggaaggaaaggaagaagaaaatgaaaaactgctggtggatgaacaacagcctcattcagttgacttctttttccttcaccaagactgactggagctctcccgtgtcagctcgtagcacagaaggtgaagagcctgctgtggggccagggcttcccagattacgtggccccttttggaaattcccaggcccaggacatgctggactgggtgcccatccacttcatcacccagtcattcaacaggaaggattcctgccagctcccaggggctttggttatagaagtgaagtggactaaatacggatccctgctgaatccacaggccaaaatagtcaatgtaactgcaaatctaatttcatcctcctttcctgaggccaactcaggaaatgaaaggacgattcttatttccactgcggttacttttgtggatgtgtctgcacctgcagaggcaggcttcagagctccaccagccatcaatgccaggctgccctttaacttcttcttcccgtttgtttgacaatgctcagatgcatcagttccttaatatacacgtgaaatttgaaaactgtacattcggtgagattaaattttatatacaactagcaa

SEQ ID NO: 294595 - DNA, 1793 bp, Homo sapiens
cgtgatgccccgcgcctggctgtcgcggttgccgggcaacgcgctgtccatgtcgcgggcctcgctgggactccctgggagatgaggccgcgaggtctcccgccgctcctggtggtgctcctgggctgctgggcctccgtgagcgcccagaccgatgccaccccggcggtgacgacagagggcctcaactccaccgaggcagccctggccaccttcggaactttcccgtcgaccaggccccccgggactcccagggctccagggccctcctccggccccaggcctaccccagtcacggacgttgctgttctctgtgtctgtgacttatccccagcacagtgtgacatcaactgctgctgtgatcccgactgcagctccgtggatttcagtgtcttttctgcctgctcagttccagttgtcacgggcgacagccagttttgtagtcaaaaagcagtcatctattcattgaattttacagcaaacccacctcaaagagtatttgaacttgttgaccagattaatccatctattttctgcattcatattacaaactataaacctgcattatcctttattaatccagaagtacctgatgaaaacaattttgatacattgatgaaaacatctgatggttttacattgaatgctgaatcatatgtttccttcacaaccaaactggatattcctactgctgctaaatatgagtatggggttcctctgcagacttcagattcgtttctgagatttccttcgtccctgacatcatctctgtgcactgataataaccctgcagcgtttctggtgaaccaggctgttaagtgcaccagaaaaataaatttagaacagtgtgaagaaattgaagccctcagcatggctttttacagcagcccggaaattctgagggtacctgattcaagaaaaaaggtccctatcactgttcagtccatcgtcattcagtctctaaataaaacgctcacccgacgggaggacactgatgtgctgcagccgactctcgtcaacgctggacactttagcctttgcgtgaatgttgttcttgaggtaaagtacagcctcacatacacagatgcaggtgaagtcaccaaagctgatctctcattcgttctggggacagttagcagcgtagtggtcccactgcagcaaaagtttgaaattcattttcttcaggaaaatacccagccagtccctctcagtggaaaccctggttatgtcgtggggctcccattagctgctggattccagcctcataagggactgactggagctctcccgtgtcagctcgtagcacagaaggtgaagagcctgctgtggggccagggcttcccagattacgtggccccttttggaaattcccaggcccaggacatgctggactgggtgcccatccacttcatcacccagtcattcaacaggaaggattcctgccagctcccaggggctttggttatagaagtgaagtggactaaatacggatccctgctgaatccacaggccaaaatagtcaatgtaactgcaaatctaatttcatcctcctttcctgaggccaactcaggaaatgaaaggacgattcttatttccactgcggttacttttgtggatgtgtctgcacctgcagaggcaggcttcagagctccaccagccatcaatgccaggctgccctttaacttcttcttcccgtttgtttgacaatgctcagatgcatcagttccttaatatacacgtgaaatttgaaaactgtacattcggtgagattaaattttatatacaactagcaa

SEQ ID NO: 294596 - DNA, 1581 bp, Homo sapiens
cgtgatgccccgcgcctggctgtcgcggttgccgggcaacgcgctgtccatgtcgcgggcctcgctgggactccctgggagatgaggccgcgaggtctcccgccgctcctggtggtgctcctgggctgctgggcctccgtgagcgcccagaccgatgccaccccggcggtgacgacagagggcctcaactccaccgaggcagccctggccaccttcggaactttcccgtcgaccaggccccccgggactcccagggctccagggccctcctccggccccaggcctaccccagtcacggacgttgctgttctctgtgtctgtgacttatccccagcacagtgtgacatcaactgctgctgtgatcccgactgcagctccgtggatttcagtgtcttttctgcctgctcagttccagttgtcacgggcgacagccagttttgtagtcaaaaagcagtcatctattcattgaattttacagcaaacccacctcaaagagtatttgaacttgttgaccagattaatccatctattttctgcattcatattacaaactataaacctgcattatcctttattaatccagaagtacctgatgaaaacaattttgatacattgatgaaaacatctgatggttttacattgaatgctgaatcatatgtttccttcacaaccaaactggatattcctactgctgctaaatatgagtatggggttcctctgcagacttcagattcgtttctgagatttccttcgtccctgacatcatctctgtgcactgataataaccctgcagcgtttctggtgaaccaggctgttaagtgcaccagaaaaataaatttagaacagtgtgaagaaattgaagccctcagcatggctttttacagcagcccggaaattctgagggtacctgattcaagaaaaaaggtccctatcactgttcagtccatcgtcattcagtctctaaataaaacgctcacccgacgggaggacactgatgtgctgcagccgactctcgtcaacgctggacactttagcctttgcgtgaatgttgttcttgagactgactggagctctcccgtgtcagctcgtagcacagaaggtgaagagcctgctgtggggccagggcttcccagattacgtggccccttttggaaattcccaggcccaggacatgctggactgggtgcccatccacttcatcacccagtcattcaacaggaaggattcctgccagctcccaggggctttggttatagaagtgaagtggactaaatacggatccctgctgaatccacaggccaaaatagtcaatgtaactgcaaatctaatttcatcctcctttcctgaggccaactcaggaaatgaaaggacgattcttatttccactgcggttacttttgtggatgtgtctgcacctgcagaggcaggcttcagagctccaccagccatcaatgccaggctgccctttaacttcttcttcccgtttgtttgacaatgctcagatgcatcagttccttaatatacacgtgaaatttgaaaactgtacattcggtgagattaaattttatatacaactagcaa

SEQ ID NO: 294597 - DNA, 2002 bp, Homo sapiens
cgtgatgccccgcgcctggctgtcgcggttgccgggcaacgcgctgtccatgtcgcgggcctcgctgggactccctgggagatgaggccgcgaggtctcccgccgctcctggtggtgctcctgggctgctgggcctccgtgagcgcccagaccgatgccaccccggcggtgacgacagagggcctcaactccaccgaggcagccctggccaccttcggaactttcccgtcgaccaggccccccgggactcccagggctccagggccctcctccggccccaggcctaccccagtcacggacgttgctgttctctgtgtctgtgacttatccccagcacagtgtgacatcaactgctgctgtgatcccgactgcagctccgtggatttcagtgtcttttctgcctgctcagttccagttgtcacgggcgacagccagttttgtagtcaaaaagcagtcatctattcattgaattttacagcaaacccacctcaaagagtatttgaacttgttgaccagattaatccatctattttctgcattcatattacaaactataaacctgcattatcctttattaatccagaagtacctgatgaaaacaattttgatacattgatgaaaacatctgatggttttacattgaatgctgaatcatatgtttccttcacaaccaaactggatattcctactgctgctaaatatgagtatggggttcctctgcagacttcagattcgtttctgagatttccttcgtccctgacatcatctctgtgcactgataataaccctgcaggccaggcgtactggttcacacctgtaatcccagcactctgggaggccgaggcgagaggatcacttgagcgtttctggtgaaccaggctgttaagtgcaccagaaaaataaatttagaacagtgtgaagaaattgaagccctcagcatggctttttacagcagcccggaaattctgagggtacctgattcaagaaaaaaggtccctatcactgttcagtccatcgtcattcagtctctaaataaaacgctcacccgacgggaggacactgatgtgctgcagccgactctcgtcaacgctggacactttagcctttgcgtgaatgttgttcttgaggtaaagtacagcctcacatacacagatgcaggtgaagtcaccaaagctgatctctcattcgttctggggacagttagcagcgtagtggtcccactgcagcaaaagtttgaaattcattttcttcaggaaaatacccagccagtccctctcagtggaaaccctggttatgtcgtggggctcccattagctgctggattccagcctcataaggggtctgggattattcagaccacaaatagatatggacagcttactattcttcatagcacaactgagcaagactgcttagcactggagggggtccggaccccagtattatttggttacactatgcaatctggctgtaaactaagactgactggagctctcccgtgtcagctcgtagcacagaaggtgaagagcctgctgtggggccagggcttcccagattacgtggccccttttggaaattcccaggcccaggacatgctggactgggtgcccatccacttcatcacccagtcattcaacaggaaggattcctgccagctcccaggggctttggttatagaagtgaagtggactaaatacggatccctgctgaatccacaggccaaaatagtcaatgtaactgcaaatctaatttcatcctcctttcctgaggccaactcaggaaatgaaaggacgattcttatttccactgcggttacttttgtggatgtgtctgcacctgcagaggcaggcttcagagctccaccagccatcaatgccaggctgccctttaacttcttcttcccgtttgtttgacaatgctcagatgcatcagttccttaatatacacgtgaaatttgaaaactgtacattcggtgagattaaattttatatacaactagcaa

SEQ ID NO: 294598 - DNA, 1890 bp, Homo sapiens
cggctgcacgcgcctgtcatgtgcggctcgtgatcctggaaatagcgcaagtctcccgccgctcctggtggtgctcctgggctgctgggcctccgtgagcgcccagaccgatgccaccccggcggtgacgacagagggcctcaactccaccgaggcagccctggccaccttcggaactttcccgtcgaccaggccccccgggactcccagggctccagggccctcctccggccccaggcctaccccagtcacggacgttgctgttctctgtgtctgtgacttatccccagcacagtgtgacatcaactgctgctgtgatcccgactgcagctccgtggatttcagtgtcttttctgcctgctcagttccagttgtcacgggcgacagccagttttgtagtcaaaaagcagtcatctattcattgaattttacagcaaacccacctcaaagagtatttgaacttgttgaccagattaatccatctattttctgcattcatattacaaactataaacctgcattatcctttattaatccagaagtacctgatgaaaacaattttgatacattgatgaaaacatctgatggttttacattgaatgctgaatcatatgtttccttcacaaccaaactggatattcctactgctgctaaatatgagtatggggttcctctgcagacttcagattcgtttctgagatttccttcgtccctgacatcatctctgtgcactgataataaccctgcagcgtttctggtgaaccaggctgttaagtgcaccagaaaaataaatttagaacagtgtgaagaaattgaagccctcagcatggctttttacagcagcccggaaattctgagggtacctgattcaagaaaaaaggtccctatcactgttcagtccatcgtcattcagtctctaaataaaacgctcacccgacgggaggacactgatgtgctgcagccgactctcgtcaacgctggacactttagcctttgcgtgaatgttgttcttgaggtaaagtacagcctcacatacacagatgcaggtgaagtcaccaaagctgatctctcattcgttctggggacagttagcagcgtagtggtcccactgcagcaaaagtttgaaattcattttcttcaggaaaatacccagccagtccctctcagtggaaaccctggttatgtcgtggggctcccattagctgctggattccagcctcataaggggtctgggattattcagaccacaaatagatatggacagcttactattcttcatagcacaactgagcaagactgcttagcactggagggggtccggaccccagtattatttggttacactatgcaatctggctgtaaactaagactgactggagctctcccgtgtcagctcgtagcacagaaggtgaagagcctgctgtggggccagggcttcccagattacgtggccccttttggaaattcccaggcccaggacatgctggactgggtgcccatccacttcatcacccagtcattcaacaggaaggattcctgccagctcccaggggctttggttatagaagtgaagtggactaaatacggatccctgctgaatccacaggccaaaatagtcaatgtaactgcaaatctaatttcatcctcctttcctgaggccaactcaggaaatgaaaggacgattcttatttccactgcggttacttttgtggatgtgtctgcacctgcagaggcaggcttcagagctccaccagccatcaatgccaggctgccctttaacttcttcttcccgtttgtttgacaatgctcagatgcatcagttccttaatatacacgtgaaatttgaaaactgtacattcggtgagattaaattttatatacaactagcaa

SEQ ID NO: 294599 - DNA, 1892 bp, Homo sapiens
cgtgatgccccgcgcctggctgtcgcggttgccgggcaacgcgctgtccatgtcgcgggcctcgctgggactccctgggagatgaggccgcgaggtctcccgccgctcctggtggtgctcctgggctgctgggcctccgtgagcgcccagaccgatgccaccccggcggtgacgacagagggcctcaactccaccgaggcagccctggccaccttcggaactttcccgtcgaccaggccccccgggactcccagggctccagggccctcctccggccccaggcctaccccagtcacggacgttgctgttctctgtgtctgtgacttatccccagcacagtgtgacatcaactgctgctgtgatcccgactgcagctccgtggatttcagtgtcttttctgcctgctcagttccagttgtcacgggcgacagccagttttgtagtcaaaaagcagtcatctattcattgaattttacagcaaacccacctcaaagagtatttgaacttgttgaccagattaatccatctattttctgcattcatattacaaactataaacctgcattatcctttattaatccagaagtacctgatgaaaacaattttgatacattgatgaaaacatctgatggttttacattgaatgctgaatcatatgtttccttcacaaccaaactggatattcctactgctgctaaatatgagtatggggttcctctgcagacttcagattcgtttctgagatttccttcgtccctgacatcatctctgtgcactgataataaccctgcaggccaggcgtactggttcacacctgtaatcccagcactctgggaggccgaggcgagaggatcacttgaggtacctgattcaagaaaaaaggtccctatcactgttcagtccatcgtcattcagtctctaaataaaacgctcacccgacgggaggacactgatgtgctgcagccgactctcgtcaacgctggacactttagcctttgcgtgaatgttgttcttgaggtaaagtacagcctcacatacacagatgcaggtgaagtcaccaaagctgatctctcattcgttctggggacagttagcagcgtagtggtcccactgcagcaaaagtttgaaattcattttcttcaggaaaatacccagccagtccctctcagtggaaaccctggttatgtcgtggggctcccattagctgctggattccagcctcataaggggtctgggattattcagaccacaaatagatatggacagcttactattcttcatagcacaactgagcaagactgcttagcactggagggggtccggaccccagtattatttggttacactatgcaatctggctgtaaactaagactgactggagctctcccgtgtcagctcgtagcacagaaggtgaagagcctgctgtggggccagggcttcccagattacgtggccccttttggaaattcccaggcccaggacatgctggactgggtgcccatccacttcatcacccagtcattcaacaggaaggattcctgccagctcccaggggctttggttatagaagtgaagtggactaaatacggatccctgctgaatccacaggccaaaatagtcaatgtaactgcaaatctaatttcatcctcctttcctgaggccaactcaggaaatgaaaggacgattcttatttccactgcggttacttttgtggatgtgtctgcacctgcagaggcaggcttcagagctccaccagccatcaatgccaggctgccctttaacttcttcttcccgtttgtttgacaatgctcagatgcatcagttccttaatatacacgtgaaatttgaaaactgtacattcggtgagattaaattttatatacaactagcaa

SEQ ID NO: 294600 - DNA, 1879 bp, Homo sapiens
cgtgatgccccgcgcctggctgtcgcggttgccgggcaacgcgctgtccatgtcgcgggcctcgctgggactccctgggagatgaggccgcgaggtctcccgccgctcctggtggtgctcctgggctgctgggcctccgtgagcgcccagaccgatgccaccccggcggtgacgacagagggcctcaactccaccgaggcagccctggccaccttcggaactttcccgtcgaccaggccccccgggactcccagggctccagggccctcctccggccccaggcctaccccagtcacggacgttgctgttctctgtgtctgtgacttatccccagcacagtgtgacatcaactgctgctgtgatcccgactgcagctccgtggatttcagtgtcttttctgcctgctcagttccagttgtcacgggcgacagccagttttgtagtcaaaaagcagtcatctattcattgaattttacagcaaacccacctcaaagagtatttgaacttgttgaccagattaatccatctattttctgcattcatattacaaactataaacctgcattatcctttattaatccagaagtacctgatgaaaacaattttgatacattgatgaaatggatattcctactgctgctaaatatgagtatggggttcctctgcagacttcagattcgtttctgagatttccttcgtccctgacatcatctctgtgcactgataataaccctgcagcgtttctggtgaaccaggctgttaagtgcaccagaaaaataaatttagaacagtgtgaagaaattgaagccctcagcatggctttttacagcagcccggaaattctgagggtacctgattcaagaaaaaaggtccctatcactgttcagtccatcgtcattcagtctctaaataaaacgctcacccgacgggaggacactgatgtgctgcagccgactctcgtcaacgctggacactttagcctttgcgtgaatgttgttcttgaggtaaagtacagcctcacatacacagatgcaggtgaagtcaccaaagctgatctctcattcgttctggggacagttagcagcgtagtggtcccactgcagcaaaagtttgaaattcattttcttcaggaaaatacccagccagtccctctcagtggaaaccctggttatgtcgtggggctcccattagctgctggattccagcctcataaggggtctgggattattcagaccacaaatagatatggacagcttactattcttcatagcacaactgagcaagactgcttagcactggagggggtccggaccccagtattatttggttacactatgcaatctggctgtaaactaagactgactggagctctcccgtgtcagctcgtagcacagaaggtgaagagcctgctgtggggccagggcttcccagattacgtggccccttttggaaattcccaggcccaggacatgctggactgggtgcccatccacttcatcacccagtcattcaacaggaaggattcctgccagctcccaggggctttggttatagaagtgaagtggactaaatacggatccctgctgaatccacaggccaaaatagtcaatgtaactgcaaatctaatttcatcctcctttcctgaggccaactcaggaaatgaaaggacgattcttatttccactgcggttacttttgtggatgtgtctgcacctgcagaggcaggcttcagagctccaccagccatcaatgccaggctgccctttaacttcttcttcccgtttgtttgacaatgctcagatgcatcagttccttaatatacacgtgaaatttgaaaactgtacattcggtgagattaaattttatatacaactagcaa

SEQ ID NO: 294601 - DNA, 1824 bp, Homo sapiens
cgtgatgccccgcgcctggctgtcgcggttgccgggcaacgcgctgtccatgtcgcgggcctcgctgggactccctgggagatgaggccgcgaggtctcccgccgctcctggtggtgctcctgggctgctgggcctccgtgagcgcccagaccgatgccaccccggcggtgacgacagagggcctcaactccaccgaggcagccctggccaccttcggaactttcccgtcgaccaggccccccgggactcccagggctccagggccctcctccggccccaggcctaccccagtcacggacgttgctgttctctgtgtctgtgacttatccccagcacagtgtgacatcaactgctgctgtgatcccgactgcagctccgtggatttcagtgtcttttctgcctgctcagttccagttgtcacgggcgacagccagttttgtagtcaaaaagcagtcatctattcattgaattttacagcaaacccacctcaaagagtatttgaacttgttgaccagattaatccatctattttctgcattcatattacaaactataaacctgcattatcctttattaatccagaagtacctgatgaaaacaattttgatacattgatgaaaacatctgatggttttacattgaatgctgaatcatatgtttccttcacaaccaaactggatattcctactgctgctaaatatgagtatggggttcctctgcagacttcagattcgtttctgagatttccttcgtccctgacatcatctctgtgcactgataataaccctgcaggtacctgattcaagaaaaaaggtccctatcactgttcagtccatcgtcattcagtctctaaataaaacgctcacccgacgggaggacactgatgtgctgcagccgactctcgtcaacgctggacactttagcctttgcgtgaatgttgttcttgaggtaaagtacagcctcacatacacagatgcaggtgaagtcaccaaagctgatctctcattcgttctggggacagttagcagcgtagtggtcccactgcagcaaaagtttgaaattcattttcttcaggaaaatacccagccagtccctctcagtggaaaccctggttatgtcgtggggctcccattagctgctggattccagcctcataaggggtctgggattattcagaccacaaatagatatggacagcttactattcttcatagcacaactgagcaagactgcttagcactggagggggtccggaccccagtattatttggttacactatgcaatctggctgtaaactaagactgactggagctctcccgtgtcagctcgtagcacagaaggtgaagagcctgctgtggggccagggcttcccagattacgtggccccttttggaaattcccaggcccaggacatgctggactgggtgcccatccacttcatcacccagtcattcaacaggaaggattcctgccagctcccaggggctttggttatagaagtgaagtggactaaatacggatccctgctgaatccacaggccaaaatagtcaatgtaactgcaaatctaatttcatcctcctttcctgaggccaactcaggaaatgaaaggacgattcttatttccactgcggttacttttgtggatgtgtctgcacctgcagaggcaggcttcagagctccaccagccatcaatgccaggctgccctttaacttcttcttcccgtttgtttgacaatgctcagatgcatcagttccttaatatacacgtgaaatttgaaaactgtacattcggtgagattaaattttatatacaactagcaa

SEQ ID NO: 294602 - DNA, 970 bp, Homo sapiens
  misc_feature (29)..(29): n is a, c, g, or t
gggaagaaaagttattgggtggagggaantgtgttgaagggtgaagagtttagggtttgggtaaatgttgttgttgaggtaaaggagagggtaaggtaaagtacagcctcacatacacagatgcaggtgaagtcaccaaagctgatctctcattcgttctggggacagttagcagcgtagtggtcccactgcagcaaaagtttgaaattcattttcttcaggaaaatacccagccagtccctctcagtggaaaccctggttatgtcgtggggctcccattagctgctggattccagcctcataaggggtctgggattattcagaccacaaatagatatggacagcttactattcttcatagcacaactgagcaagactgcttagcactggagggggtccggaccccagtattatttggttacactatgcaatctggctgtaaactaagactgactggagctctcccgtgtcagctcgtagcacagaaggtgaagagcctgctgtggggccagggcttcccagattacgtggccccttttggaaattcccaggcccaggacatgctggactgggtgcccatccacttcatcacccagtcattcaacaggaaggattcctgccagctcccaggggctttggttatagaagtgaagtggactaaatacggatccctgctgaatccacaggccaaaatagtcaatgtaactgcaaatctaatttcatcctcctttcctgaggccaactcaggaaatgaaaggacgattcttatttccactgcggttacttttgtggatgtgtctgcacctgcagaggcaggcttcagagctccaccagccatcaatgccaggctgccctttaacttcttcttcccgtttgtttgacaatgctcagatgcatcagttccttaatatacacgtgaaatttgaaaactgtacattcggtgagattaaattttatatacaactagcaa

SEQ ID NO: 294603 - DNA, 789 bp, Homo sapiens
tgaagcctttaataagatgaatatactcttcaactcgagatctgaaaaagcaatgaaaatacttctttttgttgtacttaacacaattttttgtggtttctttttatctaggtacctgattcaagaaaaaaggtccctatcactgttcagtccatcgtcattcagtctctaaataaaacgctcacccgacgggaggacactgatgtgctgcagccgactctcgtcaacgctggacactttagcctttgcgtgaatgttgttcttgagactgactggagctctcccgtgtcagctcgtagcacagaaggtgaagagcctgctgtggggccagggcttcccagattacgtggccccttttggaaattcccaggcccaggacatgctggactgggtgcccatccacttcatcacccagtcattcaacaggaaggattcctgccagctcccaggggctttggttatagaagtgaagtggactaaatacggatccctgctgaatccacaggccaaaatagtcaatgtaactgcaaatctaatttcatcctcctttcctgaggccaactcaggaaatgaaaggacgattcttatttccactgcggttacttttgtggatgtgtctgcacctgcagaggcaggcttcagagctccaccagccatcaatgccaggctgccctttaacttcttcttcccgtttgtttgacaatgctcagatgcatcagttccttaatatacacgtgaaatttgaaaactgtacattcggtgagattaaattttatatacaactagcaa

SEQ ID NO: 294604 - DNA, 2112 bp, Homo sapiens
cgtgatgccccgcgcctggctgtcgcggttgccgggcaacgcgctgtccatgtcgcgggcctcgctgggactccctgggagatgaggccgcgaggtctcccgccgctcctggtggtgctcctgggctgctgggcctccgtgagcgcccagaccgatgccaccccggcggtgacgacagagggcctcaactccaccgaggcagccctggccaccttcggaactttcccgtcgaccaggccccccgggactcccagggctccagggccctcctccggccccaggcctaccccagtcacggacgttgctgttctctgtgtctgtgacttatccccagcacagtgtgacatcaactgctgctgtgatcccgactgcagctccgtggatttcagtgtcttttctgcctgctcagttccagttgtcacgggcgacagccagttttgtagtcaaaaagcagtcatctattcattgaattttacagcaaacccacctcaaagagtatttgaacttgttgaccagattaatccatctattttctgcattcatattacaaactataaacctgcattatcctttattaatccagaagtacctgatgaaaacaattttgatacattgatgaaaacatctgatggttttacattgaatgctgaatcatatgtttccttcacaaccaaactggatattcctactgctgctaaatatgagtatggggttcctctgcagacttcagattcgtttctgagatttccttcgtccctgacatcatctctgtgcactgataataaccctgcagcgtttctggtgaaccaggctgttaagtgcaccagaaaaataaatttagaacagtgtgaagaaattgaagccctcagcatggctttttacagcagcccggaaattctgagggtacctgattcaagaaaaaaggtccctatcactgttcagtccatcgtcattcagtctctaaataaaacgctcacccgacgggaggacactgatgtgctgcagccgactctcgtcaacgctggacactttagcctttgcgtgaatgttgttcttgaggtaaagtacagcctcacatacacagatgcaggtgaagtcaccaaagctgatctctcattcgttctggggacagttagcagcgtagtggtcccactgcagcaaaagtttgaaattcattttcttcaggaaaatacccagccagtccctctcagtggaaaccctggttatgtcgtggggctcccattagctgctggattccagcctcataaggggtctgggattattcagaccacaaatagatatggacagcttactattcttcatagcacaactgagcaagactgcttagcactggagggggtccggaccccagtattatttggttacactatgcaatctggctgtaaactaagactgactggagctctcccgtgtcagctcgtagcacagaaggtgaagagcctgctgtggggccagggcttcccagattacgtggccccttttggaaattcccaggcccaggacatgctggactgggtgcccatccacttcatcacccagtcattcaacaggaaggattcctgccagctcccaggggctttggttatagaagtgaagtggactaaatacggatccctgctgaatccacaggccaaaatagtcaatgtaactgcaaatctaatttcatcctcctttcctgaggccaactcaggaaatgaaaggacgattcttatttccactgcggttacttttgtggatgtgtctgcacctgcagaggcaggcttcagagctccaccagccatcaatgccaggctgccctttaacttcttcttcccgtttgtttgacaatgctcagatgcatcagttccttaatatacacgtgaaatttgaaaactgtacattcggtgagattaaattttatatacaactagcaaccttataaataattaatctataaatatgtttgttaccatcttaaactctgataaacgttttataagtttaggttgttctgcacttcgctctataaataatcaaaccccgggggggggcccggtcccccattcccccctaatagggggggattatacaattcattggcccgtggttttt

SEQ ID NO: 294605 - DNA, 2369 bp, Homo sapiens
cgtgatgccccgcgcctggctgtcgcggttgccgggcaacgcgctgtccatgtcgcgggcctcgctgggactccctgggagatgaggccgcgaggtctcccgccgctcctggtggtgctcctgggctgctgggcctccgtgagcgcccagaccgatgccaccccggcggtgacgacagagggcctcaactccaccgaggcagccctggccaccttcggaactttcccgtcgaccaggccccccgggactcccagggctccagggccctcctccggccccaggcctaccccagtcacggacgttgctgttctctgtgtctgtgacttatccccagcacagtgtgacatcaactgctgctgtgatcccgactgcagctccgtggatttcagtgtcttttctgcctgctcagttccagttgtcacgggcgacagccagttttgtagtcaaaaagcagtcatctattcattgaattttacagcaaacccacctcaaagagtatttgaacttgttgaccagattaatccatctattttctgcattcatattacaaactataaacctgcattatcctttattaatccagaagtacctgatgaaaacaattttgatacattgatgaaaacatctgatggttttacattgaatgctgaatcatatgtttccttcacaaccaaactggatattcctactgctgctaaatatgagtatggggttcctctgcagacttcagattcgtttctgagatttccttcgtccctgacatcatctctgtgcactgataataaccctgcagcgtttctggtgaaccaggctgttaagtgcaccagaaaaataaatttagaacagtgtgaagaaattgaagccctcagcatggctttttacagcagcccggaaattctgagggtacctgattcaagaaaaaaggtccctatcactgttcagtccatcgtcattcagtctctaaataaaacgctcacccgacgggaggacactgatgtgctgcagccgactctcgtcaacgctggacactttagcctttgcgtgaatgttgttcttgaggtaaagtacagcctcacatacacagatgcaggtgaagtcaccaaagctgatctctcattcgttctggggacagttagcagcgtagtggtcccactgcagcaaaagtttgaaattcattttcttcaggaaaatacccagccagtccctctcagtggaaaccctggttatgtcgtggggctcccattagctgctggattccagcctcataaggggtctgggattattcagaccacaaatagatatggacagcttactattcttcatagcacaactgagcaagactgcttagcactggagggggtccggaccccagtattatttggttacactatgcaatctggctgtaaactaagactgactggagctctcccgtgtcagctcgtagcacagaaggtgaagagcctgctgtggggccagggcttcccagattacgtggccccttttggaaattcccaggcccaggacatgctggactgggtgcccatccacttcatcacccagtcattcaacaggaaggattcctgccagctcccaggggctttggttatagaagtgaagtggactaaatacggatccctgctgaatccacaggccaaaatagtcaatgtaactgcaaatctaatttcatcctcctttcctgaggccaactcaggaaatgaaaggacgattcttatttccactgcggttacttttgtggatgtgtctgcacctgcagaggcaggcttcagagctccaccagccatcaatgccaggctgccctttaacttcttcttcccgtttgtttgacaatgctcagatgcatcagttccttaatatacacgtgaaatttgaaaactgtacattcggtgagattaaattttatatacaactagcaagcaattgtccagctttgttgctcattttcaattaaggctaaagtgttcaacatgagaaaatgtgatacatttgatacagtgtggggtgggagtggatgggcagctcttggtggtactggaccttccacaaggctgtgtccacccagaatccatgctggcaggagggaggcagaggtatcaaaccaaacctctcaccaagcggcccaggaggggcagctgttcctctcgtgacagcacaggcccatgagacagtgtcttctttttgaggggagctggtccgggtctagttcacttcaccaagaagtccatgctgtcgcaatagtttgttaagtctttcaatttcttgttccttctcagagcagctgaactcaaggtgttgaatcttggcggccaattgtacattcatctgttttaaccttaagagttgccgttctg

SEQ ID NO: 294606 - DNA, 1418 bp, Homo sapiens
cgtgatgccccgcgcctggctgtcgcggttgccgggcaacgcgctgtccatgtcgcgggcctcgctgggactccctgggagatgaggccgcgaggtctcccgccgctcctggtggtgctcctgggctgctgggcctccgtgagcgcccagaccgatgccaccccggcggtgacgacagagggcctcaactccaccgaggcagccctggccaccttcggaactttcccgtcgaccaggccccccgggactcccagggctccagggccctcctccggccccaggcctaccccagtcacggacgttgctgttctctgtgtctgtgacttatccccagcacagtgtgacatcaactgctgctgtgatcccgactgcagctccgtggatttcagtgtcttttctgcctgctcagttccagttgtcacgggcgacagccagttttgtagtcaaaaagcagtcatctattcattgaattttacagcaaacccacctcaaagagtatttgaacttgttgaccagattaatccatctattttctgcattcatattacaaactataaacctgcattatcctttattaatccagaagtacctgatgaaaacaattttgatacattgatgaaaacatctgatggttttacattgaatgctgaatcatatgtttccttcacaaccaaactggatattcctactgctgctaaatatgagtatggggttcctctgcagacttcagattcgtttctgagatttccttcgtccctgacatcatctctgtgcactgataataaccctgcagcgtttctggtgaaccaggctgttaagtgcaccagaaaaataaatttagaacagtgtgaagaaattgaagccctcagcatggctttttacagcagcccggaaattctgagggtacctgattcaagaaaaaaggtccctatcactgttcagtccatcgtcattcagtctctaaataaaacgctcacccgacgggaggacactgatgtgctgcagccgactctcgtcaacgctggacactttagcctttgcgtgaatgttgttcttgaggattcctgccagctcccaggggctttggttatagaagtgaagtggactaaatacggatccctgctgaatccacaggccaaaatagtcaatgtaactgcaaatctaatttcatcctcctttcctgaggccaactcaggaaatgaaaggacgattcttatttccactgcggttacttttgtggatgtgtctgcacctgcagaggcaggcttcagagctccaccagccatcaatgccaggctgccctttaacttcttcttcccgtttgtttgacaatgctcagatgcatcagttccttaatatacacgtgaaatttgaaaactgtacattcggtgagattaaattttatatacaactagcaa

SEQ ID NO: 294607 - DNA, 1645 bp, Homo sapiens
  misc_feature (1633)..(1634): n is a, c, g, or t
  misc_feature (1638)..(1638): n is a, c, g, or t
cgtgatgccccgcgcctggctgtcgcggttgccgggcaacgcgctgtccatgtcgcgggcctcgctgggactccctgggagatgaggccgcgaggtctcccgccgctcctggtggtgctcctgggctgctgggcctccgtgagcgcccagaccgatgccaccccggcggtgacgacagagggcctcaactccaccgaggcagccctggccaccttcggaactttcccgtcgaccaggccccccgggactcccagggctccagggccctcctccggccccaggcctaccccagtcacggacgttgctgttctctgtgtctgtgacttatccccagcacagtgtgacatcaactgctgctgtgatcccgactgcagctccgtggatttcagtgtcttttctgcctgctcagttccagttgtcacgggcgacagccagttttgtagtcaaaaagcagtcatctattcattgaattttacagcaaacccacctcaaagagtatttgaacttgttgaccagattaatccatctattttctgcattcatattacaaactataaacctgcattatcctttattaatccagaagtacctgatgaaaacaattttgatacattgatgaaaacatctgatggttttacattgaatgctgaatcatatgtttccttcacaaccaaactggatattcctactgctgctaaatatgagtatggggttcctctgcagacttcagattcgtttctgagatttccttcgtccctgacatcatctctgtgcactgataataaccctgcagcgtttctggtgaaccaggctgttaagtgcaccagaaaaataaatttagaacagtgtgaagaaattgaagccctcagcatggctttttacagcagcccggaaattctgagggtacctgattcaagaaaaaaggtccctatcactgttcagtccatcgtcattcagtctctaaataaaacgctcacccgacgggaggacactgatgtgctgcagccgactctcgtcaacgctggacactttagcctttgcgtgaatgttgttcttgaggtaaagtacagcctcacatacacagatgcaggtgaagtcaccaaagctgatctctcattcgttctggggacagttagcagcgtagtggtcccactgcagcaaaagtttgaaattcattttcttcaggaaaatacccagccagtccctctcagtggaaaccctggttatgtcgtggggctcccattagctgctggattccagcctcataaggggtctgggattattcagaccacaaatagatatggacagcttactattcttcatagcacaactgagcaagactgcttagcactggagggggtccggaccccagtattatttggttacactatgcaatctggctgtaaactaagactgactggagctctcccgtgtcagctcgtagcacagaaggtgaagagcctgctgtggggccagggcttcccagattacgtggccccttttggaaattcccaggcccaggacatgctggactgggtgcccatccacttcatcacccagtcattcaacaggaaggattcctgccagctcccaggggctttggttatagaagtgcaggaagcaagccggggannctcnagagccc

SEQ ID NO: 294608 - DNA, 1898 bp, Homo sapiens
cgtgatgccccgcgcctggctgtcgcggttgccgggcaacgcgctgtccatgtcgcgggcctcgctgggactccctgggagatgaggccgcgaggtctcccgccgctcctggtggtgctcctgggctgctgggcctccgtgagcgcccagaccgatgccaccccggcggtgacgacagagggcctcaactccaccgaggcagccctggccaccttcggaactttcccgtcgaccaggccccccgggactcccagggctccagggccctcctccggccccaggcctaccccagtcacggacgttgctgttctctgtgtctgtgacttatccccagcacagtgtgacatcaactgctgctgtgatcccgactgcagctccgtggatttcagtgtcttttctgcctgctcagttccagttgtcacgggcgacagccagttttgtagtcaaaaagcagtcatctattcattgaattttacagcaaacccacctcaaagagtatttgaacttgttgaccagattaatccatctattttctgcattcatattacaaactataaacctgcattatcctttattaatccagaagtacctgatgaaaacaattttgatacattgatgaaaacatctgatggttttacattgaatgctgaatcatatgtttccttcacaaccaaactggatattcctactgctgctaaatatgagtatggggttcctctgcagacttcagattcgtttctgagatttccttcgtccctgacatcatctctgtgcactgataataaccctgcagcgtttctggtgaaccaggctgttaagtgcaccagaaaaataaatttagaacagtgtgaagaaattgaagccctcagcatggctttttacagcagcccggaaattctgagggtacctgattcaagaaaaaaggtccctatcactgttcagtccatcgtcattcagtctctaaataaaacgctcacccgacgggaggacactgatgtgctgcagccgactctcgtcaacgctggacactttagcctttgcgtgaatgttgttcttgaggtaaagtacagcctcacatacacagatgcaggtgaagtcaccaaagctgatctctcattcgttctggggacagttagcagcgtagtggtcccactgcagcaaaagtttgaaattcattttcttcaggaaaatacccagccagtccctctcagtggaaaccctggttatgtcgtggggctcccattagctgctggattccagcctcataaggggtctgggattattcagaccacaaatagatatggacagcttactattcttcatagcacaactgagcaagactgcttagcactggagggggtccggaccccagtattatttggttacactatgcaatctggctgtaaactaagactgactggagctctcccgtgtcagctcgtagcacagaaggtgaagagcctgctgtggggccagggcttcccagattacgtggccccttttggaaattcccaggcccaggacatgctggactgggtgcccatccacttcatcacccagtcattcaacaggaaggattcctgccagctcccaggggctttggttatagaagtgaagtggactaaatacggatccctgctgaatccacaggccaaaatagtcaatgccaactcaggaaatgaaaggacgattcttatttccactgcggttacttttgtggatgtgtctgcacctgcagaggcaggcttcagagctccaccagccatcaatgccaggctgccctttaacttcttcttcccgtttgtttgacaatgctcagatgcatcagttccttaatatacacgtgaaatttgaaaactgtacattcggtgagattaaattttatatacaactagcaa

SEQ ID NO: 294609 - DNA, 1535 bp, Homo sapiens
cgtgatgccccgcgcctggctgtcgcggttgccgggcaacgcgctgtccatgtcgcgggcctcgctgggactccctgggagatgaggccgcgaggtctcccgccgctcctggtggtgctcctgggctgctgggcctccgtgagcgcccagaccgatgccaccccggcggtgacgacagagggcctcaactccaccgaggcagccctggccaccttcggaactttcccgtcgaccaggccccccgggactcccagggctccagggccctcctccggccccaggcctaccccagtcacggacgttgctgttctctgtgtctgtgacttatccccagcacagtgtgacatcaactgctgctgtgatcccgactgcagctccgtggatttcagtgtcttttctgcctgctcagttccagttgtcacgggcgacagccagttttgtagtcaaaaagcagtcatctattcattgaattttacagcaaacccacctcaaagagtatttgaacttgttgaccagattaatccatctattttctgcattcatattacaaactataaacctgcattatcctttattaatccagaagtacctgatgaaaacaattttgatacattgatgaaaacatctgatggttttacattgaatgctgaatcatatgtttccttcacaaccaaactggatattcctactgctgctaaatatgagtatggggttcctctgcagacttcagattcgtttctgagatttccttcgtccctgacatcatctctgtgcactgataataaccctgcagcgtttctggtgaaccaggctgttaagtgcaccagaaaaataaatttagaacagtgtgaagaaattgaagccctcagcatggctttttacagcagcccggaaattctgagggtacctgattcaagaaaaaaggtccctatcactgttcagtccatcgtcattcagtctctaaataaaacgctcacccgacgggaggacactgatgtgctgcagccgactctcgtcaacgctggacactttagcctttgcgtgaatgttgttcttgaggtaaagtacagcctcacatacacagatgcaggtgaagtcaccaaagctgatctctcattcgttctggggacagttagcagcgtagtggtcccactgcagcaaaagtttgaaattcattttcttcaggaaaatacccagccagtccctctcagtggaaaccctggttatgtcgtggggctcccattagctgctggattccagcctcataaggggtctgggattattcagaccacaaatagatatggacagcttactattcttcatagcacaactgagcaagactgcttagcactggagggggtccggaccccagtattatttggttacactatgcaatctggctgtaaactaaggctgccctttaacttcttcttcccgtttgtttgacaatgctcagatgcatcagttccttaatatacacgtgaaatttgaaaactgtacattcggtgagattaaattttatatacaactagcaa

SEQ ID NO: 294610 - DNA, 784 bp, Homo sapiens
tgtcacacaagtgacactgtcttcttacctgagaaccaggctgctctagcactaggcagttgtcccttaactgtctgtgaatgtctgggattattcagaccacaaatagatatggacagcttactattcttcatagcacaactgagcaagactgcttagcactggagggggtccggaccccagtattatttggttacactatgcaatctggctgtaaactaagaaggtaaaagagtcacttgtttctgtttgaacttgtgctgatcagaaaacaaagcattctcagtggaaaccctggttatgtcgtggggctcccattagctgctggattccagcctcataagggatatcctttttgggttctgtagagggtggatttatttctctctccatccacttcatcacccaggtcattcaacaggaaggattcctgccagctcccaggggctttggttatagaagtgaagtggactaaatacggatccctgctgaatccacaggccaaaatagtcaatgtaactgcaaatctaatttcatcctcctttcctgaggccaactcaggaaatgaaaggacgattcttatttccactgcggttacttttgtggatgtgtctgcacctgcagaggcaggcttcagagctccaccagccatcaatgccaggctgccctttaacttcttcttcccgtttgtttgacaatgctcagatgcatcagttccttaatatacacgtgaaatttgaaaactgtacattcggtgagattaaattttatatacaactagcaa

SEQ ID NO: 294611 - DNA, 504 bp, Homo sapiens
  misc_feature (24)..(24): n is a, c, g, or t
  misc_feature (69)..(69): n is a, c, g, or t
  misc_feature (71)..(71): n is a, c, g, or t
  misc_feature (73)..(73): n is a, c, g, or t
  misc_feature (81)..(81): n is a, c, g, or t
  misc_feature (87)..(87): n is a, c, g, or t
  misc_feature (90)..(90): n is a, c, g, or t
  misc_feature (98)..(98): n is a, c, g, or t
  misc_feature (100)..(100): n is a, c, g, or t
  misc_feature (105)..(105): n is a, c, g, or t
  misc_feature (107)..(107): n is a, c, g, or t
  misc_feature (110)..(110): n is a, c, g, or t
  misc_feature (112)..(112): n is a, c, g, or t
  misc_feature (114)..(114): n is a, c, g, or t
  misc_feature (117)..(117): n is a, c, g, or t
  misc_feature (127)..(128): n is a, c, g, or t
  misc_feature (136)..(139): n is a, c, g, or t
  misc_feature (141)..(145): n is a, c, g, or t
gagcctaacatagtagggagacanaggcttcacacaagattaacgtggccacctatttagagaaaatananangcccaggncaaaanagnctgggtgncnatccncnacntnanccngtaatacgannggaggggnnnntnnnnngattcctgccagctcccaggggctttggttatagaagtgaagtggactaaatacggatccctgctgaatccacaggccaaaatagtcaatgtaactgcaaatctaatttcatcctcctttcctgaggccaactcaggaaatgaaaggacgattcttatttccactgcggttacttttgtggatgtgtctgcacctgcagaggcaggcttcagagctccaccagccatcaatgccaggctgccctttaacttcttcttcccgtttgtttgacaatgctcagatgcatcagttccttaatatacacgtgaaatttgaaaactgtacattcggtgagattaaattttatatacaactagcaa

SEQ ID NO: 294612 - DNA, 1318 bp, Homo sapiens
cgtgatgccccgcgcctggctgtcgcggttgccgggcaacgcgctgtccatgtcgcgggcctcgctgggactccctgggagatgaggccgcgaggtctcccgccgctcctggtggtgctcctgggctgctgggcctccgtgagcgcccagaccgatgccaccccggcggtgacgacagagggcctcaactccaccgaggcagccctggccaccttcggaactttcccgtcgaccaggccccccgggactcccagggctccagggccctcctccggccccaggcctaccccagtcacggacgttgctgttctctgtgtctgtgacttatccccagcacagtgtgacatcaactgctgctgtgatcccgactgcagctccgtggatttcagtgtcttttctgcctgctcagttccagttgtcacgggcgacagccagttttgtagtcaaaaagcagtcatctattcattgaattttacagcaaacccacctcaaagagtatttgaacttgttgaccagattaatccatctattttctgcattcatattacaaactataaacctgcattatcctttattaatccagaagtacctgatgaaaacaattttgatacattgatgaaaacatctgatggttttacattgaatgctgaatcatatgtttccttcacaaccaaactggatattcctactgctgctaaatatgagtatggggttcctctgcagacttcagattcgtttctgagatttccttcgtccctgacatcatctctgtgcactgataataaccctgcaggtaagaaagtggtcattcttctttccttagacatttgctgttattattaggttggtggaaaagtagttgcggtttttgccattaaaagtaatgaccaaaatcgcaattatttttgcaccaacttaatactttacatttgtagtagtcatcattaaacaggcctcgtaactaaaaacagaatcttcgggttaaaagaggcctcaaaggtcacgtagttcaatttctcacccagggccagtcttttctaccacatgcagtcactgcttgagcacttgtagtgatggggaactgactacctgaaaacagctcactcaattgtttaacacttccagttgttggaaagttctaaagcatatcaacagctaaccattattaagcacatattgtgtgctgggtattgtgttaagtgcttgtatgtgttttcccttaaatactctctgtaatcccttgaggccaggttagtatctccattttttagagcaggaaacagagatgtacagtttcttgttcaggctcactcaggtg

SEQ ID NO: 294613 - DNA, 880 bp, Homo sapiens
aattgccatttctgcaccaggcactgtagctagcttgctctccgactggcaggctggtatgggtgccacagaggaaagaatacagtaggagggtccagggaaaagagagagtttattttatacagtagttgttttattttatacagtagttgtacagtaattgaggaaaaatgttgtcaggtggcagaaaacaatggagccacctagaagctggctgatgcagctggggcacacagaggaggggcctgggtaccccttttggggaaactgagacgaagctatttagaacagcttgaaaataagagacttttctagaatggggtggcagctaaagtagcttctttttctttctttcagaatgctcagatgcatcagttccttaatatacacgtgaaatttgaaaactgtacattcggtgagattaaattttatatacaactagcaagcaattgtccagctttgttgctcattttcaattaaggctaaagtgttcaacatgagaaaatgtgatacatttgatacagtgtggggtgggagtggatgggcagctcttggtggtactggaccttccacaaggctgtgtccacccagaatccatgctggcaggagggaggcagaggtatcaaaccaaacctctcaccaagcggcccaggaggggcagctgttcctctcgtgacagcacaggcccatgagacagtgtcttctttttgaggggagctggtccgggtctagttcacttcaccaagaagtccatgctgtcgcaatagtttgttaagtctttcaatttcttgttccttctcagagcagctgaactcaaggtgttgaatcttggcggccaattgtacattcatctgttttaaccttaagagttgccgttctg

SEQ ID NO: 294614 - DNA, 153 bp, Homo sapiens
catgctttcataaatatcctccacgtaactgttaacatagtacagtacaagcatctgacagttttaaaataattttgctaagattgtgtgcttatgtcttgtaactttgtattattatttttttaattttcaggggcgacagccagttttgta

SEQ ID NO: 294615 - DNA, 2530 bp, Homo sapiens
gaaccttgcaaaggacacttagatctagggctctgaagccatataagtctaagtcatgccttgtcttttaatatcgtgttccttaggtaacaattcctgtgcttcctattcatattgtatcgtgttgaatctcatgtataccactattaagaatatcccgatctgttgaacctgagcacgtttcatgtagtcaatcttccaaatgtggaagttacttgagcgcacgctacatggagaagctatagtaaacgtgatagttccaaactaagaatcaatttgctaattgataccaaggaaccgaactgggcatatttctaattggctttactatttttatttttaaattatgttttactgttcatttgatttgtacagattctttattatcattgttcttttcaatatatttgtattaatttgtaagaatatgcatcttaaaatggcaagttttccatatttttacaactcactggtggttttccgcattctttgtacacccatgaaagaaaacttttatgcaaggtcttgcatttaaaagacagctttgcgaatattttgtaaattacagtctcactcagaactgtttttggacacatttaaggtgtagtattaataggttaaaaccaggctttctagaaagaataaacttacatatttatttttaggacatgaaaatagcaatattcttggagattgataaccatagcattaatacgcccattatggtcatttaaattggggtttatttcagcaaacttgttgaatttatttttaagaaagaaatactgtattgggaagttactgttacttgataacaatgttttaacaagaagcaatgttataaagttagtttcagtgcattatctacttgtgtagtcctatgcaataacagtagtgttacatgtatcaagcctagatgttttatacagatgccatatagtgttatgagccaggctgttgaatggaatttctcagtagcagcctacaactgaatagcaagtggcataaagcatatccattcagaatgaagtgccttaaatatagcagtagtcttttttggactagcactgactgaactgtaatgtaggggaaagtttcatgatggtatctatagtcaagacgaacatgtagcatggtgcctatgtagacaatataagagcttccaattttccttcagatatttttaatattaaatatattttagtgacagagtgccaacttctttcatcaggaaaccttattcaggagggtttttaaaaagtgtttaaatgtcaaatgtgaattggtgatgggtgatggagggttcagagaggagtgatcgtcagatgtgtgaatggacggtttaggtgaaaataatcaactgcatagttcccatgcacgctgggcaatgagaatccttggaaacattggtgatgctatcagttttatagctttatttcttaagggggtagggaaaattagttcccattctttcaacccccttaactgtatagctcttttcctagaatagtgatgcaaatctgcatgaacagctaattgtaccatagtgttcattgatacaatcatagcattgtctatttttctcttcatatttatatgggggggagggcgctggatgcaaaagttgaagatcgtgatgctatgatgttagttttccttagctgattttgagggtttttaaaaataaagcaaggttgactaacctacggccacgggaacaggaccatggttaagcaaccatatagaaagctttgttgaaagaaagtatggcatcttgtaccactgccctgactgtcacaactcctaaccttgccattgcctgcctccccctccccttctccttaagagacaatttctgcaggtggcaggtgagcaagcccaggagaatgctgcaatcttgggggtggttttatttatttcttttttgccaaatagagtgtggattcatttcaggggctagctaagccaagaggcagtggtttgggcttgttgtttgtaacaagaaaatgatccacaccactcccccgattcccgggtgcagaattgtaactcggggttgggcctctatatggagtgaccaaaatgccaaaattgtccatctgcctctgagtagggcaatggaaataccaaaccttctgactttgccaaaaagcatacaagcaacctggtcatacataggatgacaaaattctttctggttgtttttaaacaataaagcaataagaacaaatacaatacataggaagttaaaagcacaaaggaatgaacttattaatatttttgaaaaatgcactgggaaaaagttgatgtcaataacagtataaaacagccctatttcttgataaaaaatgacaaatgactgtctcttgcggatgcttggtactgtaatgttaataatagtcacctgctgttggatgcagcaataatttctgtatggtccatagcactgtatattatggatcgatattaatgtatccaatgaaataatcgacttgttcttgatagcctcattaaagcatttggtttttca

SEQ ID NO: 294616 - DNA, 1212 bp, Homo sapiens
gaaccttgcaaaggacacttagatctagggctctgaagccatataagtctaagtcatgccttgtcttttaatatcgtgttccttaggtaacaattcctgtgcttcctattcatattgtatcgtgttgaatctcatgtataccactattaagaatatcccgatctgttgaacctgagcacgtttcatgtagtcaatcttccaaatgtggaagttacttgagcgcacgctacatggagaagctatagtaaacgtgatagttccaaactaagaatcaatttgctaattgataccaaggaaccgaactgggcatatttctaattggctttactatttttatttttaaattatgttttactgttcatttgatttgtacagattctttattatcattgttcttttcaatatatttgtattaatttgtaagaatatgcatcttaaaatggcaagttttccatatttttacaactcactggtggttttccgcattctttgtacacccatgaaagaaaacttttatgcaaggtcttgcatttaaaagacagctttgcgaatattttgtaaattacagtctcactcagaactgtttttggacacatttaaggtgtagtattaataggttaaaaccaggctttctagaaagaataaacttacatatttatttttaggacatgaaaatagcaatattcttggagattgataaccatagcattaatacgcccattatggtcatttaaattggggtttatttcagcaaacttgttgaatttatttttaagaaagaaatactgtattgggaagttactgttacttgataacaatgttttaacaagaagcaatgttataaagttagtttcagtgcattatctacttgtgtagtcctatgcaataacagtagtgttacatgtatcaagcctagatgttttatacagatgccatatagtgttatgagccaggctgttgaatggaatttctcagtagcagcctacaactgaatagcaagtggcataaagcatatccattcagaatgaagtgccttaaatatagcagtagtcttttttggactagcactgactgaactgtaatgtaggggaaagtttcatgatggtatctatagtcaagacgaacatgtagcatggtgcctatgtagacaatataagagcttccaattttccttcagatatttttaatattaaatatattttagtgacagag

SEQ ID NO: 294617 - DNA, 607 bp, Homo sapiens
atgtcctctcaaagtaaaatattgaggagcactgaaagtatgttttactttttttttattttatttttgcttttgataagaaaaccgaactgggcatatttctaattggctttactatttttatttttaaattatgttttactgttcatttgatttgtacagattctttattatcattgttcttttcaatatatttgtattaatttgtaagaatatgcatcttaaaatggcaagttttccatatttttacaactcactggtggttttccgcattctttgtacacccatgaaagaaaacttttatgcaaggtcttgcatttaaaagacagctttgcgaatattttgtaaattacagtctcactcagaactgtttttggacacatttaaggtgtagtattaataggttaaaaccaggctttctagaaagaataaacttacatatttatttttaggacatgaaaatagcaatattcttggagattgataaccatagcattaatacgcccattatggtcatttaaattggggtttatttcagcaaacttgttgaatttatttttaagaaagaaatactgtattgggaagttactgttacttgataacaatg

SEQ ID NO: 294618 - DNA, 767 bp, Homo sapiens
catccctcagtccaggaagtacttacatttccttcttttttgaaaaatcaagttcacaactatgctaggaagtacagaaaaacagggaagatgtgattacctgctggctggaagagacaggcataagatgcaagggagcctggtgtggggagaattatgctacgaaaaggggtaagccaaagcccagcaccattttgcaaccctaaatatggatctaggcaatggccatcaacagacgctaaaacctcaagatggaggagcagtggaaacctatcagggaagaggcaggctgccaccactggggcccctcatccatcctcccatcagcaaaggtggggccaccagacctcacacgcctcctgaaggcatctaagaggaggttcacagtgccacatgcaggcatctctgccacacgcagctcagccgggatctaattgagcggttggactcatcgccagcttacggcaagtgcacgaaacacaggcacaggttaaacaccgctgtgagcaagcaatgaggcaaatacatcatatggactattcgacaggacaaatgacctggctgctccaataaatcaatgtcatgaaaaaaagcgtggggtggagcctgttctagaatgaaacagttaacacacataagcagttgcaatgcctggatcctaattcaagcaaatcgatcataagaagttatctttgagataaatggagaaatccaaatgcggactggagacttaggtgacattaagtattcatttttttatgagtgat

SEQ ID NO: 294619 - DNA, 376 bp, Homo sapiens
ttttacaaataataaatttatttccaaatcctgaattataaccaaattacaattccctttaggtcttttttgctgctttacacaaggattaaaaaagacagccacagccaagtcacgcatacaccaagtgtcctgggccagttttagatgcgatgggacaaatgacctggctgctccaataaatcaatgtcatgaaaaaaagcgtggggtggagcctgttctagaatgaaacagttaacacacataagcagttgcaatgcctggatcctaattcaagcaaatcgatcataagaagttatctttgagataaatggagaaatccaaatgcggactggagacttaggtgacattaagtattcatttttttatgagtgat

SEQ ID NO: 294620 - DNA, 407 bp, Homo sapiens
cccccaccccccaccaggcaggggtcgcgggagatggcgggcgcctttctggtggctccacgtcctccttactcccgaagtcccggcggccccgagtctgccccaactccagcatccgttctccccgagctgcggcggggaaaacaagatctgctctccgcagacagtgggctgccggcggtggaccagggagaggtggcgggaccccggctgcagcccgctcagccgctccgcccgggcgccgtccccagcgcctcccgcgcccgagctccagacacaaaggcggggacacgagcccgggaccccgcgccgggagcctcccaactccgtgccgcgcactcaccccatcgaggcggcggcggcgctccccggacccagctggctgctccaccccgcccgccgcttcc

SEQ ID NO: 294621 - DNA, 702 bp, Homo sapiens
ataataattcttttttagaaatatgtgcttaaataattgtaagccaggcatagttgcctgtgcctgtattcctaaccacttgggaagctgaggcaggactgcttgagcccaggggtgtgaggctgcagtaagctatgatcacgccactgaactccagcctgggtgacagtgagaccgtgtttaaaaatatatatatacagatgaaatgatatgatgtctgagatttgcttccaaatatgcctaggaagggaagaagtgtttagagatatagacaaatcaagattgtcaaaatgtatagtaactgttaaagcttgctaaggtagttattctatttttggatatgtttggaattgtcccaaaggtttccctaaaacttatgttttaatattctttcaggagaaagcaatattgtaagatcaaagaaaaggccataacagcgcacccaaaaaatttcagccattctgagggtcaggagtctcctcccttccatccgccaacacttgaatcaggactataaagtaggtgtttccaagtctcaggcaggtaaatggataaattgcaaaactggatgcagaactcacatctgcctcatacataggccctgtgacaccccaccagctcctttgctccctttctgcctttctcatgccgtcccagagtcttgcacactaccaagatggtggtgagtcaggacagtgaaac

SEQ ID NO: 294622 - DNA, 1441 bp, Homo sapiens
accttggctgatcgcgcctgcgcagtggggagcagctcgctcctgggctttgggctggctgcagtctgtctgagggcggccgaagtggctggctcatttaagatgaggcttctgctgcttctcctagtggcggcgtctgcgatggtccggagcgaggcctcggccaatctgggcggcgtgcccagcaagagattaaagatgcagtacgccacggggccgctgctcaagttccagatttgtgtttcctgaggttataggcgggtgtttgaggagtacatgcgggttattagccagcggtacccagacatccgcattgaaggagagaattacctccctcaaccaatatatagacacatagcatctttcctgtcagtcttcaaactagtattaataggcttaataattgttggcaaggatccttttgctttctttggcatgcaagctcctagcatctggcagtggggccaagaaaataaggtttatgcatgtatgatggttttcttcttgagcaacatgattgagaaccagtgtatgtcaacaggtgcatttgagataactttaaatgatgtacctgtgtggtctaagctggaatctggtcaccttccatccatgcaacaacttgttcaaattcttgacaatgaaatgaagctcaatgtgcatatggattcaatcccacaccatcgatcatagcaccacctatcagcactgaaaactcttttgcattaagggatcattgcaagagcagcgtgactgacattatgaaggcctgtactgaagacagcaagctgttagtacagaccagatgctttcttggcaggctcgttgtacctcttggaaaacctcaatgcaagatagtgtttcagtgctggcatattttggaattctgcacattcatggagtgcaataatactgtatagctttccccacctcccacaaaatcacccagttaatgtgtgtgtgtgttttttttttaaggtaaacattactacttgtaactttttttcttagtcatatttgaaaaagtagaaaattgagttacaatttgattttttttccaaagatgtctgttaaatctgttgtgcttttatatgaatatttgttttttatagtttaaaattgatcctttgggaatccagttgaagttcccaaatactttataagagtttatcagacatctctaatttggccatgtccagtttatacagtttacaaaatatagcagatgcaagattatgggggaaatcctatattcagagtactctataaatttttgtgtatgtgtgtatgtgcgtgtgattaccagagaactactaaaaaaaccaactgctttttaaatcctattgtgtagttaaagtgtcatgccttgaccaatctaatgaattgattaattaactgggcctttatacttaactaaataaaaaactaagcagatatgagttaa

SEQ ID NO: 294623 - DNA, 1462 bp, Homo sapiens
  misc_feature (866)..(866): n is a, c, g, or t
accttggctgatcgcgcctgcgcagtggggagcagctcgctcctgggctttgggctggctgcagtctgtctgagggcggccgaagtggctggctcatttaagatgaggcttctgctgcttctcctagtggcggcgtctgcgatggtccggagcgaggcctcggccaatctgggcggcgtgcccagcaagagattaaagatgcagtacgccacggggccgctgctcaagttccagatttgtgtttcctgaggttataggcgggtgtttgaggagtacatgcgggttattagccagcggtacccagacatccgcattgaaggagagaattacctccctcaaccaatatatagacacatagcatctttcctgtcagtcttcaaactagtattaataggcttaataattgttggcaaggatccttttgctttctttggcatgcaagctcctagcatctggcagtggggccaagaaaataaggtttatgcatgtatgatggttttcttcttgagcaacatgattgagaaccagtgtatgtcaacaggtgcatttgagataactttaaatgatgtacctgtgtggtctaagctggaatctggtcaccttccatccatgcaacaacttgttcaaattcttgacaatgaaatgaagctcaatgtgcatatggattcaatcccacaccatcgatcatagcaccacctatcagcactgaaaactcttttgcattagggatcattgcagagcaggtgactgacatttgaaggctgtctgaaaagagtgttgtacgacagagcttttggggggtgtctgggaacagaaagggggggtgatagacaggagaggtttcccacaagtgggtggtgttcttnttcttttcttttttttttttttttttttttttttttttttttttttttttttcaaatattcagggaactttatttttaaagaataaatcaagtaagacacagctttcgtttacctaaacatgcataatccaacctgaatataaactgcacttaattggtgaattacacatgaaatacaaagggaatgcaattttacatatgtaaaatgattgctagctatagcaatttaacagtcaaatttatcagaacattgtacattaaaaaacacaaacaacaacttaaagccaaatatctatagtaaaccaaggaaaattctgatatggaatggtttgactaaaagcaaagaataaggcacctgctatgaatttagcacaaccataaaacagaattagttaaccaagacacttgtttcaaaaagggaaacaagtacagagactgattaactgggtgagaaaggcaagtaacaatttagttaaaaacctgctggcccaaggtcagttgattcattccttattccagaatagttaagttcctgaaagtcctaaccactctgctcccttactgttcatcatattgaatgcgggccgagctcgatc

SEQ ID NO: 294624 - DNA, 617 bp, Homo sapiens
accttggctgatcgcgcctgcgcagtggggagcagctcgctcctgggctttgggctggctgcagtctgtctgagggcggccgaagtggctggctcatttaagatgaggcttctgctgcttctcctagtggcggcgtctgcgatggtccggagcgaggcctcggccaatctgggcggcgtgcccagcaagagattaaagatgcagtacgccacggggccgctgctcaagttccagatttgtgtttcctgaggttataggcgggtgtttgaggagtacatgcgggttattagccagcggtacccagacatccgcattgaaggagagaattacctccctcaaccaatatatagacacatagcatctttcctgtcagtcttcaaactagtattaataggcttaataattgttggcaaggatccttttgctttctttggcatgcaagctcctagcatctggcagtggggccaagaaaataaggtttatgcatgtatgatggttttcttcttgagcaacatgattgagaaccagtgtatgtcaacacagggtgccattttgagattaaaccttttaacattgatggtaaccatgatggttgggtcttaaagcttggaaaattc

SEQ ID NO: 294625 - DNA, 441 bp, Homo sapiens
gggcgaatggggtacgggccccccctcgaaggtcgccggatcgagattttttttccaaagatgtctgttaaatctgttgtgcttttatatgaatatttgttttttatagtttaaaattgatcctttgggaatccagttgaagttcccaaatactttataagagtttatcagacatctctaatttggccatgtccagtttatacagtttacaaaatatagcagatgcaagattatgggggaaatcctatattcagagtactctataaatttttgtgtatgtgtgtatgtgcgtgtgattaccagagaactactaaaaaaaccaactgctttttaaatcctattgtgtagttaaagtgtcatgccttgaccaatctaatgaattgattaattaactgggcctttatacttaactaaataaaaaactaagcagatatgagttaa

SEQ ID NO: 294626 - DNA, 1024 bp, Homo sapiens
acttttgaatagctattgatctctgaaattgaacaaagaaaaagtattagctcttgatctcattgaaggaaacattaaaaggtaatagggtttcttgaaaaattggctgagtctagcaaaaaaaaaggtatttaggttctagagattcttatttgctgtgcattgatcatggtttctaggccttttttttctatttaaaagatgtaacaatcataatttttttaaattaaagttttatacgtatagttttatttaaattgaagactacaaggtttttatttaacttctatcttatttgtattgccttctgtcaccaccaagaatcttgttactctggaataccagggatgataatttgagaatatcacattcacataagtattcatttggtttgttccacattatccacaaggtattcttacaatcttaataccaaaaagtaacactgttactgaaaataattttttaaaaagggtttgcagttcttttgtctttagagcatcccattactgattgtacagttttgagtatatcatagttagaataggaattggtaactttgttcacacgtaccaaagatggcatgtaggctgattttgagcagcatccaatcagtatagttatgcattttattttcctgtgtttgaggcgcactgtcacctcactgtttctgggttagcttgctttcttgtcttattctcctctttgtgagcatgtcaaatgaagagggatcaccactttgacagtttggtgtgctgcttttgaaaagccattgatctcattctgagggtcaggagtctcctcccttccatccgccaacacttgaatcaggactataaagtaggtgtttccaagtctcaggcaggtaaatggataaattgcaaaactggatgcagaactcacatctgcctcatacataggccctgtgacaccccaccagctcctttgctccctttctgcctttctcatgccgtcccagagtcttgcacactaccaagatggtggtgagtcaggacagtgaaac

SEQ ID NO: 294627 - DNA, 1124 bp, Homo sapiens
acttttgaatagctattgatctctgaaattgaacaaagaaaaagtattagctcttgatctcattgaaggaaacattaaaaggtaatagggtttcttgaaaaattggctgagtctagcaaaaaaaaaggtatttaggttctagagattcttatttgctgtgcattgatcatggtttctaggccttttttttctatttaaaagatgtaacaatcataatttttttaaattaaagttttatacgtatagttttatttaaattgaagactacaaggtttttatttaacttctatcttatttgtattgccttctgtcaccaccaagaatcttgttactctggaataccagggatgataatttgagaatatcacattcacataagtattcatttggtttgttccacattatccacaaggtattcttacaatcttaataccaaaaagtaacactgttactgaaaataattttttaaaaagggtttgcagttcttttgtctttagagcatcccattactgattgtacagttttgagtatatcatagttagaataggaattggtaactttgttcacacgtaccaaagatggcatgtaggctgattttgagcagcatccaatcagtatagttatgcattttattttcctgtgtttgaggcgcactgtcacctcactgtttctgggttagcttgctttcttgtcttattctcctctttgtgagcatgtcaaatgaagagggatcaccactttgacagtttggtgtgctgcttttgaaaagccattgatctctgtaatcccagctactcaggaggctgaggcaggagacttgtttgaacctgggaggcagaggttgcattgagccgagaccgtgccactaaactccagacccattctgagggtcaggagtctcctcccttccatccgccaacacttgaatcaggactataaagtaggtgtttccaagtctcaggcaggtaaatggataaattgcaaaactggatgcagaactcacatctgcctcatacataggccctgtgacaccccaccagctcctttgctccctttctgcctttctcatgccgtcccagagtcttgcacactaccaagatggtggtgagtcaggacagtgaaac

SEQ ID NO: 294628 - DNA, 839 bp, Homo sapiens
  misc_feature (816)..(816): n is a, c, g, or t
acttttgaatagctattgatctctgaaattgaacaaagaaaaagtattagctcttgatctcattgaaggaaacattaaaaggtaatagggtttcttgaaaaattggctgagtctagcaaaaaaaaaggtatttaggttctagagattcttatttgctgtgcattgatcatggtttctaggccttttttttctatttaaaagatgtaacaatcataatttttttaaattaaagttttatacgtatagttttatttaaattgaagactacaaggtttttatttaacttctatcttatttgtattgccttctgtcaccaccaagaatcttgttactctggaataccagggatgataatttgagaatatcacattcacataagtattcatttggtttgttccacattatccacaaggtattcttacaatcttaataccaaaaagtaacactgttactgaaaataattttttaaaaagggtttgcagttcttttgtctttagagcatcccattactgattgtacagttttgagtatatcatagttagaataggaattggtaactttgttcacacgtaccaaagatggcatgtaggctgattttgagcagcatccaatcagtatagttatgcattttattttcctgtgtttgaggcgcactgtcacctcactgtttctgggttagcttgctttcttgtcttattctcctctttgtgagcatgtcaaatgaagagggatcaccactttgacagtttggtgtgctgcttttgaaaagccattgatcttatttagctcttgtcttggtcttattaaatgatggtngaccatatataagtactctttat

SEQ ID NO: 294629 - DNA, 578 bp, Homo sapiens
gtatatcacgttgtgagcgatactggtccttggttctcgtttggtttcacatcggtacccgcgcgagttgggcattgtatgccctgtgttgtcggcgccgggcagtggcagagtcaggtatgtatgtgtacttggcatttgttattctttccgtgctggtgtttgtactggctgcgcctgtcgctgtgcgcctcgttttctggtgcttagctgcgctttcgttggtcgctagtcgtcctcgtttgtgacgcatgtcgcaatgtcagacgggactcacctctgtgtgacacgtttggtgtgcgtgcttttgaattagccattgatctcctttatcattctgagggtcaggagtctcctcccttccatccgccaacacttgaatcaggactataaagtaggtgtttccaagtctcaggcaggtaaatggataaattgcaaaactggatgcagaactcacatctgcctcatacataggccctgtgacaccccaccagctcctttgctccctttctgcctttctcatgccgtcccagagtcttgcacactaccaagatggtggtgagtcaggacagtgaaac

SEQ ID NO: 294630 - DNA, 625 bp, Homo sapiens
  misc_feature (359)..(359): n is a, c, g, or t
  misc_feature (361)..(361): n is a, c, g, or t
  misc_feature (372)..(372): n is a, c, g, or t
  misc_feature (383)..(383): n is a, c, g, or t
ctaatttggccatgtccagtttatacagtttacataatcttgcatctgctatatttgtaaactgtataaactggacatggccaaattagagatgtctgataaactttatacagtttacaaaatatagcagatgcaagattatgggggaaatcctatattcagagtactctataaatttttgtgtatgtgtgtatgtgcgtgtgattaccagagaactactaaaaaaaccaactgctttttaaatcctattgtgtagttaaagtgtcatgccttgaccaatctaatgaattgattaattaactgggcctttatacttaactaaataaaaaactaagcagatatgagttaaaaaaaaaaananaaaaaaaaaanaaaaaaaaaanaaaaaaaaaaaaaaaaaaaaaaaaaaaaaaaaaaaaaaaaaaaaaaattaactggccgtcgtttaaaaacgtcggaactggaaaaaccttggggtaaccaaactaaatcgcttggaagaaaatccccttttcgcaagttggcgtaatagcaaaaaggcccgaaccgatcgcctttccaaacagttgcccagcctgaatggcaaatggcaaattgaaagcgtaaattttggtttcgcgttttt

SEQ ID NO: 294631 - DNA, 277 bp, Homo sapiens
ataataattcttttttagaaatatgtgcttaaataattgtaagccaggcatagttgcctgtgcctgtattcctaaccacttgggaagtgaatactttttgtattttttgtagagacagggtttcatcatgttgcccaagctggtcttgaactcctagactcaagtgatcctcccctcctcggtatcccaaagcgctgggattacaggcatgagctaccgctcctggcctatttggtactttttttaaagatggggtcttgctctgtcacccaggctt

SEQ ID NO: 294632 - DNA, 3502 bp, Homo sapiens
accttggctgatcgcgcctgcgcagtggggagcagctcgctcctgggctttgggctggctgcagtctgtctgagggcggccgaagtggctggctcatttaagatgaggcttctgctgcttctcctagtggcggcgtctgcgatggtccggagcgaggcctcggccaatctgggcggcgtgcccagcaagagattaaagatgcagtacgccacggggccgctgctcaagttccagatttgtgtttcctgaggttataggcgggtgtttgaggagtacatgcgggttattagccagcggtacccagacatccgcattgaaggagagaattacctccctcaaccaatatatagacacatagcatctttcctgtcagtcttcaaactagtattaataggcttaataattgttggcaaggatccttttgctttctttggcatgcaagctcctagcatctggcagtggggccaagaaaataaggtttatgcatgtatgatggttttcttcttgagcaacatgattgagaaccagtgtatgtcaacaggtgcatttgagataactttaaatgatgtacctgtgtggtctaagctggaatctggtcaccttccatccatgcaacaacttgttcaaattcttgacaatgaaatgaagctcaatgtgcatatggattcaatcccacaccatcgatcatagcaccacctatcagcactgaaaactcttttgcattaagggatcattgcaagagcagcgtgactgacattatgaaggcctgtactgaagacagcaagctgttagtacagaccagatgctttcttggcaggctcgttgtacctcttggaaaacctcaatgcaagatagtgtttcagtgctggcatattttggaattctgcacattcatggagtgcaataatactgtatagctttccccacctcccacaaaatcacccagttaatgtgtgtgtgtgttttttttttaaggtaaacattactacttgtaactttttttcttagtcatatttgaaaaagtagaaaattgagttacaatttgattttttttccaaagatgtctgttaaatctgttgtgcttttatatgaatatttgttttttatagtttaaaattgatcctttgggaatccagttgaagttcccaaatactttataagagtttatcagacatctctaatttggccatgtccagtttatacagtttacaaaatatagcagatgcaagattatgggggaaatcctatattcagagtactctataaatttttgtgtatgtgtgtatgtgcgtgtgattaccagagaactactaaaaaaaccaactgctttttaaatcctattgtgtagttaaagtgtcatgccttgaccaatctaatgaattgattaattaactgggcctttatacttaactaaataaaaaactaagcagatatgagttaagttaaatttaaaagtttcaatttattgctcagtgtacctgttaacattatatttaacaattgcttaaatttttgtttttgatttatggataatttcttaagagtacacactttagatacacaaataatcgttcatttaccatctttaggatcattgaaactcatctcactaaagaaagttcacttgaacctctttatagcattgatactaggtgaacagaaattacctgactaataatttgtctaacatcatatatcagaattttattgtatatgatgaacaaaacttaaaattttttaaatttaattcttaaatactgtttcagagttctaaaaaggcagttttttaaaaaacttaagttgataaaaactgtaagaataatttagcagaaatagaaccagaatgtagaagagtagtcatgtaacagcagtaataacatacttcagcttccatataggaatagaagtggtagagccaaaagtgatttaggaaaagttataaggtacaggttgagtatcccttttccaaaaatgcttgggacaagaagtatttcagatttcataatttttttcaaagtttggaatatttgcattatacttaccagttgggcatcccaaatctgaaatctgaaatgttccatgagcatttcctttgagtgtcatgttggcactcaaaaaggttcaacattgagtccacttaacacttaggtgttagaagacctaactttctgtaacaattaaccttatactttgtttgtcatcgaatatttgttgaatgcatgtcaggtaatggtcttgattgtgatagcttcaaggtggaacatactgtaatctccagatgctaggaagttagtctaataattcactgcagaaaattgattaagtggctgtccttttaattaagagtgtggagtcataaacttaagttcttcatatagtgacaagagtccttagagattgttattcaagttccttagaaattgttatttaggtataatatcatcttgtctttgactagagcttgaaaccttgttatctgattgtgtaccactccaaattccctgccttctgcaagttgaatgtcttgctgaatgtgtctaggggttcatcttcagtaatcgacattccactagtgccatagttaacttcatgacatgtagacattcaaaacttgagccttggatgttcctgtggacctgacagttaaaaatataaagaacctaggattcaattccaactttctctgtttgccttgggttgaataacttatcttttggagaatagctttaagtggcttagacactgataaaattcagctgtgttgttgacgctcatctcttttgtcttacgcttagccatatttaaatcttgaatttaatagagtctagtgaaaaaaatgagtgggaagaatgaatataaaagtaataatataaggaaaaagggaaagtaaactatttagaatgtagttttgttatattcccagcatttcaatatttattagttacttgtaaattactgtggctgtgtagtttataaatgtctgtgcactatattaattagaagaccatagaacatgccagcaggttggctaatgctatgggggtttttaccacagttgccattgtggaagaaattatttggtacattaataaaaaaagttggtaaaacatggttttatacctcagtgtataagatgtgcaagacaaatatgcttatttccttttctagaatataagtgatattatttgcttatgacactaacactattaatgacaggagtcaatcagcctttacagctatcaaaatataatgagatcccaatgatgattcttttttactttgaatgttaattagtttgggactttgattggctggcaaacattttatcattgtcagaatttaatttagatttcaaaaatagcttacaggattttaaacatggtgtggtattctaaagccttttttttaaaaaaagagatctttttgagagaaacaaatgaggattgtaaagtttggggacttacctctgtagcattgtgaaaataaactttgattaagctga

SEQ ID NO: 294633 - DNA, 3602 bp, Homo sapiens
accttggctgatcgcgcctgcgcagtggggagcagctcgctcctgggctttgggctggctgcagtctgtctgagggcggccgaagtggctggctcatttaagatgaggcttctgctgcttctcctagtggcggcgtctgcgatggtccggagcgaggcctcggccaatctgggcggcgtgcccagcaagagattaaagatgcagtacgccacggggccgctgctcaagttccagatttgtgtttcctgaggttataggcgggtgtttgaggagtacatgcgggttattagccagcggtacccagacatccgcattgaaggagagaattacctccctcaaccaatatatagacacatagcatctttcctgtcagtcttcaaactagtattaataggcttaataattgttggcaaggatccttttgctttctttggcatgcaagctcctagcatctggcagtggggccaagaaaataaggtttatgcatgtatgatggttttcttcttgagcaacatgattgagaaccagtgtatgtcaacaggtgcatttgagataactttaaatgatgtacctgtgtggtctaagctggaatctggtcaccttccatccatgcaacaacttgttcaaattcttgacaatgaaatgaagctcaatgtgcatatggattcaatcccacaccatcgatcatagcaccacctatcagcactgaaaactcttttgcattaagggatcattgcaagagcagcgtgactgacattatgaaggcctgtactgaagacagcaagctgttagtacagaccagatgctttcttggcaggctcgttgtacctcttggaaaacctcaatgcaagatagtgtttcagtgctggcatattttggaattctgcacattcatggagtgcaataatactgtatagctttccccacctcccacaaaatcacccagttaatgtgtgtgtgtgttttttttttaaggtaaacattactacttgtaactttttttcttagtcatatttgaaaaagtagaaaattgagttacaatttgattttttttccaaagatgtctgttaaatctgttgtgcttttatatgaatatttgttttttatagtttaaaattgatcctttgggaatccagttgaagttcccaaatactttataagagtttatcagacatctctaatttggccatgtccagtttatacagtttacaaaatatagcagatgcaagattatgggggaaatcctatattcagagtactctataaatttttgtgtatgtgtgtatgtgcgtgtgattaccagagaactactaaaaaaaccaactgctttttaaatcctattgtgtagttaaagtgtcatgccttgaccaatctaatgaattgattaattaactgggcctttatacttaactaaataaaaaactaagcagatatgagttaagttaaatttaaaagtttcaatttattgctcagtgtacctgttaacattatatttaacaattgcttaaatttttgtttttgatttatggataatttcttaagagtacacactttagatacacaaataatcgttcatttaccatctttaggatcattgaaactcatctcactaaagaaagttcacttgaacctctttatagcattgatactaggtgaacagaaattacctgactaataatttgtctaacatcatatatcagaattttattgtatatgatgaacaaaacttaaaattttttaaatttaattcttaaatactgtttcagagttctaaaaaggcagttttttaaaaaacttaagttgataaaaactgtaagaataatttagcagaaatagaaccagaatgtagaagagtagtcatgtaacagcagtaataacatacttcagcttccatataggaatagaagtggtagagccaaaagtgatttaggaaaagttataaggtacaggttgagtatcccttttccaaaaatgcttgggacaagaagtatttcagatttcataatttttttcaaagtttggaatatttgcattatacttaccagttgggcatcccaaatctgaaatctgaaatgttccatgagcatttcctttgagtgtcatgttggcactcaaaaaggttcaacattgagtccacttaacacttaggtgttagaagacctaactttctgtaacaattaaccttatactttgtttgtcatcgaatatttgttgaatgcatgtcaggtaatggtcttgattgtgatagcttcaaggtggaacatactgtaatctccagatgctaggaagttagtctaataattcactgcagaaaattgattaagtggctgtccttttaattaagagtgtggagtcataaacttaagttcttcatatagtgacaagagtccttagagattgttattcaagttccttagaaattgttatttaggtataatatcatcttgtctttgactagagcttgaaaccttgttatctgattgtgtaccactccaaattccctgccttctgcaagttgaatgtcttgctgaatgtgtctaggggttcatcttcagtaatcgacattccactagtgccatagttaacttcatgacatgtagacattcaaaacttgagccttggatgttcctgtggacctgacagttaaaaatataaagaacctaggattcaattccaactttctctgtttgccttgggttgaataacttatcttttggagaatagctttaagtggcttagacactgataaaattcagctgtgttgttgacgctcatctcttttgtcttacgcttagccatatttaaatcttgaatttaatagagtctagtgaaaaaaatgagtgggaagaatgaatataaaagtaataatataaggaaaaagggaaagtaaactatttagaatgtagttttgttatattcccagcatttcaatatttattagttacttgtaaattactgtggctgtgtagtttataaatgtctgtgcactatattaattagaagaccatagaacatgccagcaggttggctaatgctatgggggtttttaccacagttgccattgtggaagaaattatttggtacattaataaaaaaagttggtaaaacatggttttatacctcagtgtataagatgtgcaagacaaatatgcttatttccttttctagaatataagtgatattatttgcttatgacactaacactattaatgacaggagtcaatcagcctttacagctatcaaaatataatgagatcccaatgatgattcttttttactttgaatgttaattagtttgggactttgattggctggcaaacattttatcattgtcagaatttaatttagatttcaaaaatagcttacaggattttaaacatggtgtggtattctaaagccttttttttaaaaaaagagatctttttgagagaaacaaatgaggattgtaaagtttggggacttacctctgtagcattgtgaaaataaactttgattaagctgatttgaaaggaactcctactttgtggaattaaatctacattagagcactttatatggtaactatactcacaaaattttgcattataaaagttattatcatt

SEQ ID NO: 294634 - DNA, 3778 bp, Homo sapiens
  misc_feature (3512)..(3512): n is a, c, g, or t
  misc_feature (3514)..(3514): n is a, c, g, or t
  misc_feature (3525)..(3525): n is a, c, g, or t
  misc_feature (3536)..(3536): n is a, c, g, or t
accttggctgatcgcgcctgcgcagtggggagcagctcgctcctgggctttgggctggctgcagtctgtctgagggcggccgaagtggctggctcatttaagatgaggcttctgctgcttctcctagtggcggcgtctgcgatggtccggagcgaggcctcggccaatctgggcggcgtgcccagcaagagattaaagatgcagtacgccacggggccgctgctcaagttccagatttgtgtttcctgaggttataggcgggtgtttgaggagtacatgcgggttattagccagcggtacccagacatccgcattgaaggagagaattacctccctcaaccaatatatagacacatagcatctttcctgtcagtcttcaaactagtattaataggcttaataattgttggcaaggatccttttgctttctttggcatgcaagctcctagcatctggcagtggggccaagaaaataaggtttatgcatgtatgatggttttcttcttgagcaacatgattgagaaccagtgtatgtcaacaggtgcatttgagataactttaaatgatgtacctgtgtggtctaagctggaatctggtcaccttccatccatgcaacaacttgttcaaattcttgacaatgaaatgaagctcaatgtgcatatggattcaatcccacaccatcgatcatagcaccacctatcagcactgaaaactcttttgcattaagggatcattgcaagagcagcgtgactgacattatgaaggcctgtactgaagacagcaagctgttagtacagaccagatgctttcttggcaggctcgttgtacctcttggaaaacctcaatgcaagatagtgtttcagtgctggcatattttggaattctgcacattcatggagtgcaataatactgtatagctttccccacctcccacaaaatcacccagttaatgtgtgtgtgtgttttttttttaaggtaaacattactacttgtaactttttttcttagtcatatttgaaaaagtagaaaattgagttacaatttgattttttttccaaagatgtctgttaaatctgttgtgcttttatatgaatatttgttttttatagtttaaaattgatcctttgggaatccagttgaagttcccaaatactttataagagtttatcagacatctctaatttggccatgtccagtttatacagtttacaaaatatagcagatgcaagattatgggggaaatcctatattcagagtactctataaatttttgtgtatgtgtgtatgtgcgtgtgattaccagagaactactaaaaaaaccaactgctttttaaatcctattgtgtagttaaagtgtcatgccttgaccaatctaatgaattgattaattaactgggcctttatacttaactaaataaaaaactaagcagatatgagttaagttaaatttaaaagtttcaatttattgctcagtgtacctgttaacattatatttaacaattgcttaaatttttgtttttgatttatggataatttcttaagagtacacactttagatacacaaataatcgttcatttaccatctttaggatcattgaaactcatctcactaaagaaagttcacttgaacctctttatagcattgatactaggtgaacagaaattacctgactaataatttgtctaacatcatatatcagaattttattgtatatgatgaacaaaacttaaaattttttaaatttaattcttaaatactgtttcagagttctaaaaaggcagttttttaaaaaacttaagttgataaaaactgtaagaataatttagcagaaatagaaccagaatgtagaagagtagtcatgtaacagcagtaataacatacttcagcttccatataggaatagaagtggtagagccaaaagtgatttaggaaaagttataaggtacaggttgagtatcccttttccaaaaatgcttgggacaagaagtatttcagatttcataatttttttcaaagtttggaatatttgcattatacttaccagttgggcatcccaaatctgaaatctgaaatgttccatgagcatttcctttgagtgtcatgttggcactcaaaaaggttcaacattgagtccacttaacacttaggtgttagaagacctaactttctgtaacaattaaccttatactttgtttgtcatcgaatatttgttgaatgcatgtcaggtaatggtcttgattgtgatagcttcaaggtggaacatactgtaatctccagatgctaggaagttagtctaataattcactgcagaaaattgattaagtggctgtccttttaattaagagtgtggagtcataaacttaagttcttcatatagtgacaagagtccttagagattgttattcaagttccttagaaattgttatttaggtataatatcatcttgtctttgactagagcttgaaaccttgttatctgattgtgtaccactccaaattccctgccttctgcaagttgaatgtcttgctgaatgtgtctaggggttcatcttcagtaatcgacattccactagtgccatagttaacttcatgacatgtagacattcaaaacttgagccttggatgttcctgtggacctgacagttaaaaatataaagaacctaggattcaattccaactttctctgtttgccttgggttgaataacttatcttttggagaatagctttaagtggcttagacactgataaaattcagctgtgttgttgacgctcatctcttttgtcttacgcttagccatatttaaatcttgaatttaatagagtctagtgaaaaaaatgagtgggaagaatgaatataaaagtaataatataaggaaaaagggaaagtaaactatttagaatgtagttttgttatattcccagcatttcaatatttattagttacttgtaaattactgtggctgtgtagtttataaatgtctgtgcactatattaattagaagaccatagaacatgccagcaggttggctaatgctatgggggtttttaccacagttgccattgtggaagaaattatttggtacattaataaaaaaagttggtaaaacatggttttatacctcagtgtataagatgtgcaagacaaatatgcttatttccttttctagaatataagtgatattatttgcttatgacactaacactattaatgacaggagtcaatcagcctttacagctatcaaaatataatgagatcccaatgatgattcttttttactttgaatgttaattagtttgggactttgattggctggcaaacattttatcattgtcagaatttaatttagatttcaaaaatagcttacaggattttaaacatggtgtggtattctaaagccttttttttaaaaaaagagatctttttgagagaaacaaatgaggattgtaaagtttggggacttacctctgtagcattgtgaaaataaactttgattaagctgaaaaaaaaaananaaaaaaaaaanaaaaaaaaaanaaaaaaaaaaaaaaaaaaaaaaaaaaaaaaaaaaaaaaaaaaaaaaattaactggccgtcgtttaaaaacgtcggaactggaaaaaccttggggtaaccaaactaaatcgcttggaagaaaatccccttttcgcaagttggcgtaatagcaaaaaggcccgaaccgatcgcctttccaaacagttgcccagcctgaatggcaaatggcaaattgaaagcgtaaattttggtttcgcgttttt

SEQ ID NO: 294635 - DNA, 1485 bp, Homo sapiens
accttggctgatcgcgcctgcgcagtggggagcagctcgctcctgggctttgggctggctgcagtctgtctgagggcggccgaagtggctggctcatttaagatgaggcttctgctgcttctcctagtggcggcgtctgcgatggtccggagcgaggcctcggccaatctgggcggcgtgcccagcaagagattaaagatgcagtacgccacggggccgctgctcaagttccagatttgtgtttcctgaggttataggcgggtgtttgaggagtacatgcgggttattagccagcggtacccagacatccgcattgaaggagagaattacctccctcaaccaatatatagacacatagcatctttcctgtcagtcttcaaactagtattaataggcttaataattgttggcaaggatccttttgctttctttggcatgcaagctcctagcatctggcagtggggccaagaaaataaggtttatgcatgtatgatggttttcttcttgagcaacatgattgagaaccagtgtatgtcaacaggtgcatttgagataactttaaatgatgtacctgtgtggtctaagctggaatctggtcaccttccatccatgcaacaacttgttcaaattcttgacaatgaaatgaagctcaatgtgcatatggattcaatcccacaccatcgatcatagcaccacctatcagcactgaaaactcttttgcattaagggatcattgcaagagcagcgtgactgacattatgaaggcctgtactgaagacagcaagctgttagtacagaccagatgctttcttggcaggctcgttgtacctcttggaaaacctcaatgcaagatagtgtttcagtgctggcatattttggaattctgcacattcatggagtgcaataatactgtatagctttccccacctcccacaaaatcacccagttaatgtgtgtgtgtgttttttttttaaggtaaacattactacttgtaactttttttcttagtcatatttgaaaaagtagaaaattgagttacaatttgattttttttccaaagatgtctgttaaatctgttgtgcttttatatgaatatttgttttttatagtttaaaattgatcctttgggaatccagttgaagttcccaaatactttataagagtttatcagacatctctaatttggccatgtccagtttatacagtttacaaaatatagcagatgcaagattatgggggaaatcctatattcagagtactctataaatttttgtgtatgtgtgtatgtgcgtgtgattaccagagaactactaaaaaaaccaactgctttttaaatcctattgtgtagttaaagtgtcatgccttgaccaatctaatgaattgattaattaactgggcctttatacttaactaaataaaaaactaagcagatatgagttaaaaaaaacggaaaaaaaattttgggggtctggcaggaaatttaaa

SEQ ID NO: 294636 - DNA, 1572 bp, Homo sapiens
accttggctgatcgcgcctgcgcagtggggagcagctcgctcctgggctttgggctggctgcagtctgtctgagggcggccgaagtggctggctcatttaagatgaggcttctgctgcttctcctagtggcggcgtctgcgatggtccggagcgaggcctcggccaatctgggcggcgtgcccagcaagagattaaagatgcagtacgccacggggccgctgctcaagttccagatttgtgtttcctgaggttataggcgggtgtttgaggagtacatgcgggttattagccagcggtacccagacatccgcattgaaggagagaattacctccctcaaccaatatatagacacatagcatctttcctgtcagtcttcaaactagtattaataggcttaataattgttggcaaggatccttttgctttctttggcatgcaagctcctagcatctggcagtggggccaagaaaataaggtttatgcatgtatgatggttttcttcttgagcaacatgattgagaaccagtgtatgtcaacaggtgcatttgagataactttaaatgatgtacctgtgtggtctaagctggaatctggtcaccttccatccatgcaacaacttgttcaaattcttgacaatgaaatgaagctcaatgtgcatatggattcaatcccacaccatcgatcatagcaccacctatcagcactgaaaactcttttgcattaagggatcattgcaagagcagcgtgactgacattatgaaggcctgtactgaagacagcaagctgttagtacagaccagatgctttcttggcaggctcgttgtacctcttggaaaacctcaatgcaagatagtgtttcagtgctggcatattttggaattctgcacattcatggagtgcaataatactgtatagctttccccacctcccacaaaatcacccagttaatgtgtgtgtgtgttttttttttaaggtaaacattactacttgtaactttttttcttagtcatatttgaaaaagtagaaaattgagttacaatttgattttttttccaaagatgtctgttaaatctgttgtgcttttatatgaatatttgttttttatagtttaaaattgatcctttgggaatccagttgaagttcccaaatactttataagagtttatcagacatctctaatttggccatgtccagtttatacagtttacaaaatatagcagatgcaagattatgggggaaatcctatattcagagtactctataaatttttgtgtatgtgtgtatgtgcgtgtgattaccagagaactactaaaaaaaccaactgctttttaaatcctattgtgtagttaaagtgtcatgccttgaccaatctaatgaattgattaattaactgggcctttatacttaactaaataaaaaactaagcagatatgagttaatagttaaaaaaaaaaaaaaaaaaatttggggcgggccggaaattttaacattttggggggcccaagaataatgcccggcagagaaccgcgaaggggttccaaaaacgggggggtgaacaggtggtgtaagc

SEQ ID NO: 294637 - DNA, 1920 bp, Homo sapiens
accttggctgatcgcgcctgcgcagtggggagcagctcgctcctgggctttgggctggctgcagtctgtctgagggcggccgaagtggctggctcatttaagatgaggcttctgctgcttctcctagtggcggcgtctgcgatggtccggagcgaggcctcggccaatctgggcggcgtgcccagcaagagattaaagatgcagtacgccacggggccgctgctcaagttccagatttgtgtttcctgaggttataggcgggtgtttgaggagtacatgcgggttattagccagcggtacccagacatccgcattgaaggagagaattacctccctcaaccaatatatagacacatagcatctttcctgtcagtcttcaaactagtattaataggcttaataattgttggcaaggatccttttgctttctttggcatgcaagctcctagcatctggcagtggggccaagaaaataaggtttatgcatgtatgatggttttcttcttgagcaacatgattgagaaccagtgtatgtcaacaggtgcatttgagataactttaaatgatgtacctgtgtggtctaagctggaatctggtcaccttccatccatgcaacaacttgttcaaattcttgacaatgaaatgaagctcaatgtgcatatggattcaatcccacaccatcgatcatagcaccacctatcagcactgaaaactcttttgcattaagggatcattgcaagagcagcgtgactgacattatgaaggcctgtactgaagacagcaagctgttagtacagaccagatgctttcttggcaggctcgttgtacctcttggaaaacctcaatgcaagatagtgtttcagtgctggcatattttggaattctgcacattcatggagtgcaataatactgtatagctttccccacctcccacaaaatcacccagttaatgtgtgtgtgtgttttttttttaaggtaaacattactacttgtaactttttttcttagtcatatttgaaaaagtagaaaattgagttacaatttgattttttttccaaagatgtctgttaaatctgttgtgcttttatatgaatatttgttttttatagtttaaaattgatcctttgggaatccagttgaagttcccaaatactttataagagtttatcagacatctctaatttggccatgtccagtttatacagtttacaaaatatagcagatgcaagattatgggggaaatcctatattcagagtactctataaatttttgtgtatgtgtgtatgtgcgtgtgattaccagagaactactaaaaaaaccaactgctttttaaatcctattgtgtagttaaagtgtcatgccttgaccaatctaatgaattgattaattaactgggcctttatacttaactaaataaaaaactaagcagatatgagttaaaaaacacaaacaaaaacaaaccaaacacacaacaacctggtgctggcgccgcctggcgcccgagaaaaaaggttcacgaaacccatcggtgggggcgcgcggcggccccaaatggtaatgcgccacccggggccaacgggggttccaaaaggaacccggggtctaaaccacaggcgcgggcatcttccccccaatataaaaaacgccggggggggacaccgacggtgtctcgcacacaacccagagggaggcctgcgcggggccactacggcggcattacaacgggaccaagagagccgaataaaataaccgccacggcggggggtgcacacaaacacacacaccacaccaaagaagaaaacacagacaaacaagaagaaccaacaaacagaacacaaaaaagaaagaaacacacaaagcaaaaaaatagaacacaacagaacacaaacaacaaacaaatcaacaagataaaaagcagc

SEQ ID NO: 294638 - DNA, 1417 bp, Homo sapiens
  misc_feature (24)..(24): n is a, c, g, or t
ccagttgatacgcccccgagtatntccctatcgtggaccaggcctcggagggcggccgaagtggctggctcatttaagatgaggcttctgctgcttctcctagtggcggcgtctgcgatggtccggagcgaggcctcggccaatctgggcggcgtgcccagcaagagattaaagatgcagtacgccacggggccgctgctcaagttccagatttgtgtttcctgaggttataggcgggtgtttgaggagtacatgcgggttattagccagcggtacccagacatccgcattgaaggagagaattacctccctcaaccaatatatagacacatagcatctttcctgtcagtcttcaaactagtattaataggcttaataattgttggcaaggatccttttgctttctttggcatgcaagctcctagcatctggcagtggggccaagaaaataaggtttatgcatgtatgatggttttcttcttgagcaacatgattgagaaccagtgtatgtcaacaggtgcatttgagataactttaaatgatgtacctgtgtggtctaagctggaatctggtcaccttccatccatgcaacaacttgttcaaattcttgacaatgaaatgaagctcaatgtgcatatggattcaatcccacaccatcgatcatagcaccacctatcagcactgaaaactcttttgcattaagggatcattgcaagagcagcgtgactgacattatgaaggcctgtactgaagacagcaagctgttagtacagaccagatgctttcttggcaggctcgttgtacctcttggaaaacctcaatgcaagatagtgtttcagtgctggcatattttggaattctgcacattcatggagtgcaataatactgtatagctttccccacctcccacaaaatcacccagttaatgtgtgtgtgtgttttttttttaaggtaaacattactacttgtaactttttttcttagtcatatttgaaaaagtagaaaattgagttacaatttgattttttttccaaagatgtctgttaaatctgttgtgcttttatatgaatatttgttttttatagtttaaaattgatcctttgggaatccagttgaagttcccaaatactttataagagtttatcagacatctctaatttggccatgtccagtttatacagtttacaaaatatagcagatgcaagattatgggggaaatcctatattcagagtactctataaatttttgtgtatgtgtgtatgtgcgtgtgattaccagagaactactaaaaaaaccaactgctttttaaatcctattgtgtagttaaagtgtcatgccttgaccaatctaatgaattgattaattaactgggcctttatacttaactaaataaaaaactaagcagatatgagttaa

SEQ ID NO: 294639 - DNA, 959 bp, Homo sapiens
accttggctgatcgcgcctgcgcagtggggagcagctcgctcctgggctttgggctggctgcagtctgtctgagggcggccgaagtggctggctcatttaagatgaggcttctgctgcttctcctagtggcggcgtctgcgatggtccggagcgaggcctcggccaatctgggcggcgtgcccagcaagagattaaagatgcagtacgccacggggccgctgctcaagttccagatttgtgtttcctgaggttataggcgggtgtttgaggagtacatgcgggttattagccagcggtacccagacatccgcattgaaggagagaattacctccctcaaccaatatatagacacatagcatctttcctgtcagtcttcaaactagtattaataggcttaataattgttggcaaggatccttttgctttctttggcatgcaagctcctagcatctggcagtggggccaagaaaataaggtttatgcatgtatgatggttttcttcttgagcaacatgattgagaaccagtgtatgtcaacaggtgcatttgagataactttaaatgatgtacctgtgtggtctaagctggaatctggtcaccttccatccatgcaacaacttgttcaaattcttgacaatgaaatgaagctcaatgtgcatatggattcaatcccacaccatcgatcatagcaccacctatcagcactgaaaactcttttgcattaagggatcattgcaagagcagcgtgactgacattatgaaggcctgtactgaagacagcaagctgttagtacagaccagatgctttcttggcaggctcgttgtacctcttggaaaacctcaatgcaagatagtgtttcagtgctggcatattttggaattctgcacattcatggagtgcaataatactgtatagctttccccaagtcccccccagagagaacgtcggtacgagcta

SEQ ID NO: 294640 - DNA, 2042 bp, Homo sapiens
acttttgaatagctattgatctctgaaattgaacaaagaaaaagtattagctcttgatctcattgaaggaaacattaaaaggtaatagggtttcttgaaaaattggctgagtctagcaaaaaaaaaggtatttaggttctagagattcttatttgctgtgcattgatcatggtttctaggccttttttttctatttaaaagatgtaacaatcataatttttttaaattaaagttttatacgtatagttttatttaaattgaagactacaaggtttttatttaacttctatcttatttgtattgccttctgtcaccaccaagaatcttgttactctggaataccagggatgataatttgagaatatcacattcacataagtattcatttggtttgttccacattatccacaaggtattcttacaatcttaataccaaaaagtaacactgttactgaaaataattttttaaaaagggtttgcagttcttttgtctttagagcatcccattactgattgtacagttttgagtatatcatagttagaataggaattggtaactttgttcacacgtaccaaagatggcatgtaggctgattttgagcagcatccaatcagtatagttatgcattttattttcctgtgtttgaggcgcactgtcacctcactgtttctgggttagcttgctttcttgtcttattctcctctttgtgagcatgtcaaatgaagagggatcaccactttgacagtttggtgtgctgcttttgaaaagccattgatctcattctgagggtcaggagtctcctcccttccatccgccaacacttgaatcaggactataaatgtttcctgaggttataggcgggtgtttgaggagtacatgcgggttattagccagcggtacccagacatccgcattgaaggagagaattacctccctcaaccaatatatagacacatagcatctttcctgtcagtcttcaaactagtattaataggcttaataattgttggcaaggatccttttgctttctttggcatgcaagctcctagcatctggcagtggggccaagaaaataaggtttatgcatgtatgatggttttcttcttgagcaacatgattgagaaccagtgtatgtcaacaggtgcatttgagataactttaaatgatgtacctgtgtggtctaagctggaatctggtcaccttccatccatgcaacaacttgttcaaattcttgacaatgaaatgaagctcaatgtgcatatggattcaatcccacaccatcgatcatagcaccacctatcagcactgaaaactcttttgcattaagggatcattgcaagagcagcgtgactgacattatgaaggcctgtactgaagacagcaagctgttagtacagaccagatgctttcttggcaggctcgttgtacctcttggaaaacctcaatgcaagatagtgtttcagtgctggcatattttggaattctgcacattcatggagtgcaataatactgtatagctttccccacctcccacaaaatcacccagttaatgtgtgtgtgtgttttttttttaaggtaaacattactacttgtaactttttttcttagtcatatttgaaaaagtagaaaattgagttacaatttgattttttttccaaagatgtctgttaaatctgttgtgcttttatatgaatatttgttttttatagtttaaaattgatcctttgggaatccagttgaagttcccaaatactttataagagtttatcagacatctctaatttggccatgtccagtttatacagtttacaaaatatagcagatgcaagattatgggggaaatcctatattcagagtactctataaatttttgtgtatgtgtgtatgtgcgtgtgattaccagagaactactaaaaaaaccaactgctttttaaatcctattgtgtagttaaagtgtcatgccttgaccaatctaatgaattgattaattaactgggcctttatacttaactaaataaaaaactaagcagatatgagttaa

SEQ ID NO: 294641 - DNA, 1628 bp, Homo sapiens
accttggctgatcgcgcctgcgcagtggggagcagctcgctcctgggctttgggctggctgcagtctgtctgagggcggccgaagtggctggctcatttaagatgaggcttctgctgcttctcctagtggcggcgtctgcgatggtccggagcgaggcctcggccaatctgggcggcgtgcccagcaagagattaaagatgcagtacgccacggggccgctgctcaagttccagatttggtgagtatgtgcactgggccccggccaccccgccgcgcctctgctcggcgccattggctacgcgaggccccggcttcgcggcctaaatggccgcatcttcgctggcctcgtagaactgtgccggcgcccttccacagccagccttctcgcggccccttagcgcggtcaggccgccctccttttccagtgtttcctgaggttataggcgggtgtttgaggagtacatgcgggttattagccagcggtacccagacatccgcattgaaggagagaattacctccctcaaccaatatatagacacatagcatctttcctgtcagtcttcaaactagtattaataggcttaataattgttggcaaggatccttttgctttctttggcatgcaagctcctagcatctggcagtggggccaagaaaataaggtttatgcatgtatgatggttttcttcttgagcaacatgattgagaaccagtgtatgtcaacaggtgcatttgagataactttaaatgatgtacctgtgtggtctaagctggaatctggtcaccttccatccatgcaacaacttgttcaaattcttgacaatgaaatgaagctcaatgtgcatatggattcaatcccacaccatcgatcatagcaccacctatcagcactgaaaactcttttgcattaagggatcattgcaagagcagcgtgactgacattatgaaggcctgtactgaagacagcaagctgttagtacagaccagatgctttcttggcaggctcgttgtacctcttggaaaacctcaatgcaagatagtgtttcagtgctggcatattttggaattctgcacattcatggagtgcaataatactgtatagctttccccacctcccacaaaatcacccagttaatgtgtgtgtgtgttttttttttaaggtaaacattactacttgtaactttttttcttagtcatatttgaaaaagtagaaaattgagttacaatttgattttttttccaaagatgtctgttaaatctgttgtgcttttatatgaatatttgttttttatagtttaaaattgatcctttgggaatccagttgaagttcccaaatactttataagagtttatcagacatctctaatttggccatgtccagtttatacagtttacaaaatatagcagatgcaagattatgggggaaatcctatattcagagtactctataaatttttgtgtatgtgtgtatgtgcgtgtgattaccagagaactactaaaaaaaccaactgctttttaaatcctattgtgtagttaaagtgtcatgccttgaccaatctaatgaattgattaattaactgggcctttatacttaactaaataaaaaactaagcagatatgagttaa

SEQ ID NO: 294642 - DNA, 1660 bp, Homo sapiens
  misc_feature (384)..(384): n is a, c, g, or t
accttggctgatcgcgcctgcgcagtggggagcagctcgctcctgggctttgggctggctgcagtctgtctgagggcggccgaagtggctggctcatttaagatgaggcttctgctgcttctcctagtggcggcgtctgcgatggtccggagcgaggcctcggccaatctgggcggcgtgcccagcaagagattaaagatgcagtacgccacggggccgctgctcaagttccagatttgagatggagtctcactgtattgcctaggctggtcttgaactcctgggatcaagtgaacctcctgcctcagcctcccaaagtgctgggattacagatgtgagccacgatgcccagcctatgatagactttaaaaagcacaaaaccantttgaaatagcatggacaagagatttgctgtattttcgaaatttcctttctgttctgcatagatcatctaatattgtttcctgaggttataggcgggtgtttgaggagtacatgcgggttattagccagcggtacccagacatccgcattgaaggagagaattacctccctcaaccaatatatagacacatagcatctttcctgtcagtcttcaaactagtattaataggcttaataattgttggcaaggatccttttgctttctttggcatgcaagctcctagcatctggcagtggggccaagaaaataaggtttatgcatgtatgatggttttcttcttgagcaacatgattgagaaccagtgtatgtcaacaggtgcatttgagataactttaaatgatgtacctgtgtggtctaagctggaatctggtcaccttccatccatgcaacaacttgttcaaattcttgacaatgaaatgaagctcaatgtgcatatggattcaatcccacaccatcgatcatagcaccacctatcagcactgaaaactcttttgcattaagggatcattgcaagagcagcgtgactgacattatgaaggcctgtactgaagacagcaagctgttagtacagaccagatgctttcttggcaggctcgttgtacctcttggaaaacctcaatgcaagatagtgtttcagtgctggcatattttggaattctgcacattcatggagtgcaataatactgtatagctttccccacctcccacaaaatcacccagttaatgtgtgtgtgtgttttttttttaaggtaaacattactacttgtaactttttttcttagtcatatttgaaaaagtagaaaattgagttacaatttgattttttttccaaagatgtctgttaaatctgttgtgcttttatatgaatatttgttttttatagtttaaaattgatcctttgggaatccagttgaagttcccaaatactttataagagtttatcagacatctctaatttggccatgtccagtttatacagtttacaaaatatagcagatgcaagattatgggggaaatcctatattcagagtactctataaatttttgtgtatgtgtgtatgtgcgtgtgattaccagagaactactaaaaaaaccaactgctttttaaatcctattgtgtagttaaagtgtcatgccttgaccaatctaatgaattgattaattaactgggcctttatacttaactaaataaaaaactaagcagatatgagttaa

SEQ ID NO: 294643 - DNA, 1536 bp, Homo sapiens
accttggctgatcgcgcctgcgcagtggggagcagctcgctcctgggctttgggctggctgcagtctgtctgagggcggccgaagtggctggctcatttaagatgaggcttctgctgcttctcctagtggcggcgtctgcgatggtccggagcgaggcctcggccaatctgggcggcgtgcccagcaagagattaaagatgcagtacgccacggggccgctgctcaagttccagatttgagatggagtctcactgtattgcctaggctggtcttgaactcctgggatcaagtgaacctcctgcctcagcctcccaaagtgctgggattacagattgtttcctgaggttataggcgggtgtttgaggagtacatgcgggttattagccagcggtacccagacatccgcattgaaggagagaattacctccctcaaccaatatatagacacatagcatctttcctgtcagtcttcaaactagtattaataggcttaataattgttggcaaggatccttttgctttctttggcatgcaagctcctagcatctggcagtggggccaagaaaataaggtttatgcatgtatgatggttttcttcttgagcaacatgattgagaaccagtgtatgtcaacaggtgcatttgagataactttaaatgatgtacctgtgtggtctaagctggaatctggtcaccttccatccatgcaacaacttgttcaaattcttgacaatgaaatgaagctcaatgtgcatatggattcaatcccacaccatcgatcatagcaccacctatcagcactgaaaactcttttgcattaagggatcattgcaagagcagcgtgactgacattatgaaggcctgtactgaagacagcaagctgttagtacagaccagatgctttcttggcaggctcgttgtacctcttggaaaacctcaatgcaagatagtgtttcagtgctggcatattttggaattctgcacattcatggagtgcaataatactgtatagctttccccacctcccacaaaatcacccagttaatgtgtgtgtgtgttttttttttaaggtaaacattactacttgtaactttttttcttagtcatatttgaaaaagtagaaaattgagttacaatttgattttttttccaaagatgtctgttaaatctgttgtgcttttatatgaatatttgttttttatagtttaaaattgatcctttgggaatccagttgaagttcccaaatactttataagagtttatcagacatctctaatttggccatgtccagtttatacagtttacaaaatatagcagatgcaagattatgggggaaatcctatattcagagtactctataaatttttgtgtatgtgtgtatgtgcgtgtgattaccagagaactactaaaaaaaccaactgctttttaaatcctattgtgtagttaaagtgtcatgccttgaccaatctaatgaattgattaattaactgggcctttatacttaactaaataaaaaactaagcagatatgagttaa

SEQ ID NO: 294644 - DNA, 1720 bp, Homo sapiens
ataataattcttttttagaaatatgtgcttaaataattgtaagccaggcatagttgcctgtgcctgtattcctaaccacttgggaagctgaggcaggactgcttgagcccaggggtgtgaggctgcagtaagctatgatcacgccactgaactccagcctgggtgacagtgagaccgtgtttaaaaatatatatatacagatgaaatgatatgatgtctgagatttgcttccaaatatgcctaggaagggaagaagtgtttagagatatagacaaatcaagattgtcaaaatgtatagtaactgttaaagcttgctaaggtagttattctatttttggatatgtttggaattgtcccaaaggtttccctaaaacttatgttttaatattctttcaggagaaagcaatattgtaagatcaaagaaaaggccataacagcgcacccaaaaaatttcagccattctgagggtcaggagtctcctcccttccatccgccaacacttgaatcaggactataaatgtttcctgaggttataggcgggtgtttgaggagtacatgcgggttattagccagcggtacccagacatccgcattgaaggagagaattacctccctcaaccaatatatagacacatagcatctttcctgtcagtcttcaaactagtattaataggcttaataattgttggcaaggatccttttgctttctttggcatgcaagctcctagcatctggcagtggggccaagaaaataaggtttatgcatgtatgatggttttcttcttgagcaacatgattgagaaccagtgtatgtcaacaggtgcatttgagataactttaaatgatgtacctgtgtggtctaagctggaatctggtcaccttccatccatgcaacaacttgttcaaattcttgacaatgaaatgaagctcaatgtgcatatggattcaatcccacaccatcgatcatagcaccacctatcagcactgaaaactcttttgcattaagggatcattgcaagagcagcgtgactgacattatgaaggcctgtactgaagacagcaagctgttagtacagaccagatgctttcttggcaggctcgttgtacctcttggaaaacctcaatgcaagatagtgtttcagtgctggcatattttggaattctgcacattcatggagtgcaataatactgtatagctttccccacctcccacaaaatcacccagttaatgtgtgtgtgtgttttttttttaaggtaaacattactacttgtaactttttttcttagtcatatttgaaaaagtagaaaattgagttacaatttgattttttttccaaagatgtctgttaaatctgttgtgcttttatatgaatatttgttttttatagtttaaaattgatcctttgggaatccagttgaagttcccaaatactttataagagtttatcagacatctctaatttggccatgtccagtttatacagtttacaaaatatagcagatgcaagattatgggggaaatcctatattcagagtactctataaatttttgtgtatgtgtgtatgtgcgtgtgattaccagagaactactaaaaaaaccaactgctttttaaatcctattgtgtagttaaagtgtcatgccttgaccaatctaatgaattgattaattaactgggcctttatacttaactaaataaaaaactaagcagatatgagttaa

SEQ ID NO: 294645 - DNA, 1235 bp, Homo sapiens
gcaagcgcacagtcgtcaaaaaaccaacaaacctgtttcctgaggttataggcgggtgtttgaggagtacatgcgggttattagccagcggtacccagacatccgcattgaaggagagaattacctccctcaaccaatatatagacacatagcatctttcctgtcagtcttcaaactagtattaataggcttaataattgttggcaaggatccttttgctttctttggcatgcaagctcctagcatctggcagtggggccaagaaaataaggtttatgcatgtatgatggttttcttcttgagcaacatgattgagaaccagtgtatgtcaacaggtgcatttgagataactttaaatgatgtacctgtgtggtctaagctggaatctggtcaccttccatccatgcaacaacttgttcaaattcttgacaatgaaatgaagctcaatgtgcatatggattcaatcccacaccatcgatcatagcaccacctatcagcactgaaaactcttttgcattaagggatcattgcaagagcagcgtgactgacattatgaaggcctgtactgaagacagcaagctgttagtacagaccagatgctttcttggcaggctcgttgtacctcttggaaaacctcaatgcaagatagtgtttcagtgctggcatattttggaattctgcacattcatggagtgcaataatactgtatagctttccccacctcccacaaaatcacccagttaatgtgtgtgtgtgttttttttttaaggtaaacattactacttgtaactttttttcttagtcatatttgaaaaagtagaaaattgagttacaatttgattttttttccaaagatgtctgttaaatctgttgtgcttttatatgaatatttgttttttatagtttaaaattgatcctttgggaatccagttgaagttcccaaatactttataagagtttatcagacatctctaatttggccatgtccagtttatacagtttacaaaatatagcagatgcaagattatgggggaaatcctatattcagagtactctataaatttttgtgtatgtgtgtatgtgcgtgtgattaccagagaactactaaaaaaaccaactgctttttaaatcctattgtgtagttaaagtgtcatgccttgaccaatctaatgaattgattaattaactgggcctttatacttaactaaataaaaaactaagcagatatgagttaa

SEQ ID NO: 294646 - DNA, 1242 bp, Homo sapiens
gcggccccgtggcgtactgcatctttaatctcttgctgggtgtttcctgaggttataggcgggtgtttgaggagtacatgcgggttattagccagcggtacccagacatccgcattgaaggagagaattacctccctcaaccaatatatagacacatagcatctttcctgtcagtcttcaaactagtattaataggcttaataattgttggcaaggatccttttgctttctttggcatgcaagctcctagcatctggcagtggggccaagaaaataaggtttatgcatgtatgatggttttcttcttgagcaacatgattgagaaccagtgtatgtcaacaggtgcatttgagataactttaaatgatgtacctgtgtggtctaagctggaatctggtcaccttccatccatgcaacaacttgttcaaattcttgacaatgaaatgaagctcaatgtgcatatggattcaatcccacaccatcgatcatagcaccacctatcagcactgaaaactcttttgcattaagggatcattgcaagagcagcgtgactgacattatgaaggcctgtactgaagacagcaagctgttagtacagaccagatgctttcttggcaggctcgttgtacctcttggaaaacctcaatgcaagatagtgtttcagtgctggcatattttggaattctgcacattcatggagtgcaataatactgtatagctttccccacctcccacaaaatcacccagttaatgtgtgtgtgtgttttttttttaaggtaaacattactacttgtaactttttttcttagtcatatttgaaaaagtagaaaattgagttacaatttgattttttttccaaagatgtctgttaaatctgttgtgcttttatatgaatatttgttttttatagtttaaaattgatcctttgggaatccagttgaagttcccaaatactttataagagtttatcagacatctctaatttggccatgtccagtttatacagtttacaaaatatagcagatgcaagattatgggggaaatcctatattcagagtactctataaatttttgtgtatgtgtgtatgtgcgtgtgattaccagagaactactaaaaaaaccaactgctttttaaatcctattgtgtagttaaagtgtcatgccttgaccaatctaatgaattgattaattaactgggcctttatacttaactaaataaaaaactaagcagatatgagttaa

SEQ ID NO: 294647 - DNA, 1396 bp, Homo sapiens
accttggctgatcgcgcctgcgcagtggggagcagctcgctcctgggctttgggctggctgcagtctgtctgagggcggccgaagtggctggctcatttaagatgaggcttctgctgcttctcctagtggcggcgtctgcgatggtccggagcgaggcctcggccaatctgggcggcgtgcccagcaagagatttgtttcctgaggttataggcgggtgtttgaggagtacatgcgggttattagccagcggtacccagacatccgcattgaaggagagaattacctccctcaaccaatatatagacacatagcatctttcctgtcagtcttcaaactagtattaataggcttaataattgttggcaaggatccttttgctttctttggcatgcaagctcctagcatctggcagtggggccaagaaaataaggtttatgcatgtatgatggttttcttcttgagcaacatgattgagaaccagtgtatgtcaacaggtgcatttgagataactttaaatgatgtacctgtgtggtctaagctggaatctggtcaccttccatccatgcaacaacttgttcaaattcttgacaatgaaatgaagctcaatgtgcatatggattcaatcccacaccatcgatcatagcaccacctatcagcactgaaaactcttttgcattaagggatcattgcaagagcagcgtgactgacattatgaaggcctgtactgaagacagcaagctgttagtacagaccagatgctttcttggcaggctcgttgtacctcttggaaaacctcaatgcaagatagtgtttcagtgctggcatattttggaattctgcacattcatggagtgcaataatactgtatagctttccccacctcccacaaaatcacccagttaatgtgtgtgtgtgttttttttttaaggtaaacattactacttgtaactttttttcttagtcatatttgaaaaagtagaaaattgagttacaatttgattttttttccaaagatgtctgttaaatctgttgtgcttttatatgaatatttgttttttatagtttaaaattgatcctttgggaatccagttgaagttcccaaatactttataagagtttatcagacatctctaatttggccatgtccagtttatacagtttacaaaatatagcagatgcaagattatgggggaaatcctatattcagagtactctataaatttttgtgtatgtgtgtatgtgcgtgtgattaccagagaactactaaaaaaaccaactgctttttaaatcctattgtgtagttaaagtgtcatgccttgaccaatctaatgaattgattaattaactgggcctttatacttaactaaataaaaaactaagcagatatgagttaa

SEQ ID NO: 294648 - DNA, 1396 bp, Homo sapiens
accttggctgatcgcgcctgcgcagtggggagcagctcgctcctgggctttgggctggctgcagtctgtctgagggcggccgaagtggctggctcatttaagatgaggcttctgctgcttctcctagtggcggcgtctgcgatggtccggagcgaggcctcggccaatctgggcggcgtgcccagcaagagattaaagatgcagtacgccacggggccgctgctcaagttccagatttgtgtttcctgaggttataggcgggtgtttgaggagtacatgcgggttattagccagcggtacccagacatccgcattgaaggagagaattacctccctcaaccaatatatagacacatagcatctttcctgtcagtcttcaaactagtattaataggcttaataattgttggcaaggatccttttgctttctttggcatgcaagctcctagcatctggcagtggggccaagaaaataagaaccagtgtatgtcaacaggtgcatttgagataactttaaatgatgtacctgtgtggtctaagctggaatctggtcaccttccatccatgcaacaacttgttcaaattcttgacaatgaaatgaagctcaatgtgcatatggattcaatcccacaccatcgatcatagcaccacctatcagcactgaaaactcttttgcattaagggatcattgcaagagcagcgtgactgacattatgaaggcctgtactgaagacagcaagctgttagtacagaccagatgctttcttggcaggctcgttgtacctcttggaaaacctcaatgcaagatagtgtttcagtgctggcatattttggaattctgcacattcatggagtgcaataatactgtatagctttccccacctcccacaaaatcacccagttaatgtgtgtgtgtgttttttttttaaggtaaacattactacttgtaactttttttcttagtcatatttgaaaaagtagaaaattgagttacaatttgattttttttccaaagatgtctgttaaatctgttgtgcttttatatgaatatttgttttttatagtttaaaattgatcctttgggaatccagttgaagttcccaaatactttataagagtttatcagacatctctaatttggccatgtccagtttatacagtttacaaaatatagcagatgcaagattatgggggaaatcctatattcagagtactctataaatttttgtgtatgtgtgtatgtgcgtgtgattaccagagaactactaaaaaaaccaactgctttttaaatcctattgtgtagttaaagtgtcatgccttgaccaatctaatgaattgattaattaactgggcctttatacttaactaaataaaaaactaagcagatatgagttaa

SEQ ID NO: 294649 - DNA, 1466 bp, Homo sapiens
accttggctgatcgcgcctgcgcagtggggagcagctcgctcctgggctttgggctggctgcagtctgtctgagggcggccgaagtggctggctcatttaagatgaggcttctgctgcttctcctagtggcggcgtctgcgatggtccggagcgaggcctcggccaatctgggcggcgtgcccagcaagagattaaagatgcagtacgccacggggccgctgctcaagttccagatttgtgtttcctgaggttataggcgggtgtttgaggagtacatgcgggttattagccagcggtacccagacatccgcattgaaggagagaattacctccctcaaccaatatatagacacatagcatctttcctgtcagtcttcaaactagtattaataggcttaataattgttggcaaggatccttttgctttctttggcatgcaagctcctagcatctggcagtggggccaagaaaataaggtttatgcatgtatgatggttttcttcttgagcaacatgattgagaaccagtgtatgtcaacaggtgcatttgagataactttaaatgggggcggtgccatttatttttatagatgtacctgtgtggtctaagctggaatctggtcaccttccatccatgcaacaacttgttcaaattcttgacaatgaaatgaagctcaatgtgcatatggattcaatcccacaccatcgatcatagcaccacctatcagcactgaaaactcttttgcattaagggatcattgcaagagcagcgtgactgacattatgaaggcctgtactgaagacagcaagctgttagtacagaccagatgctttcttggcaggctcgttgtacctcttggaaaacctcaatgcaagatagtgtttcagtgctggcatattttggaattctgcacattcatggagtgcaataatactgtatagctttccccacctcccacaaaatcacccagttaatgtgtgtgtgtgttttttttttaaggtaaacattactacttgtaactttttttcttagtcatatttgaaaaagtagaaaattgagttacaatttgattttttttccaaagatgtctgttaaatctgttgtgcttttatatgaatatttgttttttatagtttaaaattgatcctttgggaatccagttgaagttcccaaatactttataagagtttatcagacatctctaatttggccatgtccagtttatacagtttacaaaatatagcagatgcaagattatgggggaaatcctatattcagagtactctataaatttttgtgtatgtgtgtatgtgcgtgtgattaccagagaactactaaaaaaaccaactgctttttaaatcctattgtgtagttaaagtgtcatgccttgaccaatctaatgaattgattaattaactgggcctttatacttaactaaataaaaaactaagcagatatgagttaa

SEQ ID NO: 294650 - DNA, 1054 bp, Homo sapiens
ttttttctttttgtaagtagtgtattttaaatagctttcaagatacacatattttttcctttaaaaaagtctgttggagcagttttgttcttgaattttgctggtcatcctcatggtcccgagcccccctactccgggtcgtggaggcggccgagggggaggctgggggcccacgtggcccgtcctggcggcacctgcagcactgggggagccgctgaaccccgtgcttcagcgctgggggagccgctgggccccgtcttccgccacaaaccatgcatggccgccacgtgagctcaaacgtccgtttatttcaaagcagtaataatttaaaattataaaaatctttccaccgctgaacgtttagagggtgaggtcctcgtgccgaattcggcacgaggctgttagtacagaccagatgctttcttggcaggctcgttgtacctcttggaaaacctcaatgcaagatagtgtttcagtgctggcatattttggaattctgcacattcatggagtgcaataatactgtatagctttccccacctcccacaaaatcacccagttaatgtgtgtgtgtgttttttttttaaggtaaacattactacttgtaactttttttcttagtcatatttgaaaaagtagaaaattgagttacaatttgattttttttccaaagatgtctgttaaatctgttgtgcttttatatgaatatttgttttttatagtttaaaattgatcctttgggaatccagttgaagttcccaaatactttataagagtttatcagacatctctaatttggccatgtccagtttatacagtttacaaaatatagcagatgcaagattatgggggaaatcctatattcagagtactctataaatttttgtgtatgtgtgtatgtgcgtgtgattaccagagaactactaaaaaaaccaactgctttttaaatcctattgtgtagttaaagtgtcatgccttgaccaatctaatgaattgattaattaactgggcctttatacttaactaaataaaaaactaagcagatatgagttaa

SEQ ID NO: 294651 - DNA, 2598 bp, Homo sapiens
cacgcgtccgcggacgcgtgggcctcccacaaaatcacccagttaatgtgtgtgtgtgttttttttttaaggtaaacattactacttgtaactttttttcttagtcatatttgaaaaagtagaaaattgagttacaatttgattttttttccaaagatgtctgttaaatctgttgtgcttttatatgaatatttgttttttatagtttaaaattgatcctttgggaatccagttgaagttcccaaatactttataagagtttatcagacatctctaatttggccatgtccagtttatacagtttacaaaatatagcagatgcaagattatgggggaaatcctatattcagagtactctataaatttttgtgtatgtgtgtatgtgcgtgtgattaccagagaactactaaaaaaaccaactgctttttaaatcctattgtgtagttaaagtgtcatgccttgaccaatctaatgaattgattaattaactgggcctttatacttaactaaataaaaaactaagcagatatgagttaagttaaatttaaaagtttcaatttattgctcagtgtacctgttaacattatatttaacaattgcttaaatttttgtttttgatttatggataatttcttaagagtacacactttagatacacaaataatcgttcatttaccatctttaggatcattgaaactcatctcactaaagaaagttcacttgaacctctttatagcattgatactaggtgaacagaaattacctgactaataatttgtctaacatcatatatcagaattttattgtatatgatgaacaaaacttaaaattttttaaatttaattcttaaatactgtttcagagttctaaaaaggcagttttttaaaaaacttaagttgataaaaactgtaagaataatttagcagaaatagaaccagaatgtagaagagtagtcatgtaacagcagtaataacatacttcagcttccatataggaatagaagtggtagagccaaaagtgatttaggaaaagttataaggtacaggttgagtatcccttttccaaaaatgcttgggacaagaagtatttcagatttcataatttttttcaaagtttggaatatttgcattatacttaccagttgggcatcccaaatctgaaatctgaaatgttccatgagcatttcctttgagtgtcatgttggcactcaaaaaggttcaacattgagtccacttaacacttaggtgttagaagacctaactttctgtaacaattaaccttatactttgtttgtcatcgaatatttgttgaatgcatgtcaggtaatggtcttgattgtgatagcttcaaggtggaacatactgtaatctccagatgctaggaagttagtctaataattcactgcagaaaattgattaagtggctgtccttttaattaagagtgtggagtcataaacttaagttcttcatatagtgacaagagtccttagagattgttattcaagttccttagaaattgttatttaggtataatatcatcttgtctttgactagagcttgaaaccttgttatctgattgtgtaccactccaaattccctgccttctgcaagttgaatgtcttgctgaatgtgtctaggggttcatcttcagtaatcgacattccactagtgccatagttaacttcatgacatgtagacattcaaaacttgagccttggatgttcctgtggacctgacagttaaaaatataaagaacctaggattcaattccaactttctctgtttgccttgggttgaataacttatcttttggagaatagctttaagtggcttagacactgataaaattcagctgtgttgttgacgctcatctcttttgtcttacgcttagccatatttaaatcttgaatttaatagagtctagtgaaaaaaatgagtgggaagaatgaatataaaagtaataatataaggaaaaagggaaagtaaactatttagaatgtagttttgttatattcccagcatttcaatatttattagttacttgtaaattactgtggctgtgtagtttataaatgtctgtgcactatattaattagaagaccatagaacatgccagcaggttggctaatgctatgggggtttttaccacagttgccattgtggaagaaattatttggtacattaataaaaaaagttggtaaaacatggttttatacctcagtgtataagatgtgcaagacaaatatgcttatttccttttctagaatataagtgatattatttgcttatgacactaacactattaatgacaggagtcaatcagcctttacagctatcaaaatataatgagatcccaatgatgattcttttttactttgaatgttaattagtttgggactttgattggctggcaaacattttatcattgtcagaatttaatttagatttcaaaaatagcttacaggattttaaacatggtgtggtattctaaagccttttttttaaaaaaagagatctttttgagagaaacaaatgaggattgtaaagtttggggacttacctctgtagcattgtgaaaataaactttgattaagctga

SEQ ID NO: 294652 - DNA, 2576 bp, Homo sapiens
  misc_feature (32)..(32): n is a, c, g, or t
aagaaggcagtctggaaggagacacatgagtnaataattaagttttaaggtaaacattactacttgtaactttttttcttagtcatatttgaaaaagtagaaaattgagttacaatttgattttttttccaaagatgtctgttaaatctgttgtgcttttatatgaatatttgttttttatagtttaaaattgatcctttgggaatccagttgaagttcccaaatactttataagagtttatcagacatctctaatttggccatgtccagtttatacagtttacaaaatatagcagatgcaagattatgggggaaatcctatattcagagtactctataaatttttgtgtatgtgtgtatgtgcgtgtgattaccagagaactactaaaaaaaccaactgctttttaaatcctattgtgtagttaaagtgtcatgccttgaccaatctaatgaattgattaattaactgggcctttatacttaactaaataaaaaactaagcagatatgagttaagttaaatttaaaagtttcaatttattgctcagtgtacctgttaacattatatttaacaattgcttaaatttttgtttttgatttatggataatttcttaagagtacacactttagatacacaaataatcgttcatttaccatctttaggatcattgaaactcatctcactaaagaaagttcacttgaacctctttatagcattgatactaggtgaacagaaattacctgactaataatttgtctaacatcatatatcagaattttattgtatatgatgaacaaaacttaaaattttttaaatttaattcttaaatactgtttcagagttctaaaaaggcagttttttaaaaaacttaagttgataaaaactgtaagaataatttagcagaaatagaaccagaatgtagaagagtagtcatgtaacagcagtaataacatacttcagcttccatataggaatagaagtggtagagccaaaagtgatttaggaaaagttataaggtacaggttgagtatcccttttccaaaaatgcttgggacaagaagtatttcagatttcataatttttttcaaagtttggaatatttgcattatacttaccagttgggcatcccaaatctgaaatctgaaatgttccatgagcatttcctttgagtgtcatgttggcactcaaaaaggttcaacattgagtccacttaacacttaggtgttagaagacctaactttctgtaacaattaaccttatactttgtttgtcatcgaatatttgttgaatgcatgtcaggtaatggtcttgattgtgatagcttcaaggtggaacatactgtaatctccagatgctaggaagttagtctaataattcactgcagaaaattgattaagtggctgtccttttaattaagagtgtggagtcataaacttaagttcttcatatagtgacaagagtccttagagattgttattcaagttccttagaaattgttatttaggtataatatcatcttgtctttgactagagcttgaaaccttgttatctgattgtgtaccactccaaattccctgccttctgcaagttgaatgtcttgctgaatgtgtctaggggttcatcttcagtaatcgacattccactagtgccatagttaacttcatgacatgtagacattcaaaacttgagccttggatgttcctgtggacctgacagttaaaaatataaagaacctaggattcaattccaactttctctgtttgccttgggttgaataacttatcttttggagaatagctttaagtggcttagacactgataaaattcagctgtgttgttgacgctcatctcttttgtcttacgcttagccatatttaaatcttgaatttaatagagtctagtgaaaaaaatgagtgggaagaatgaatataaaagtaataatataaggaaaaagggaaagtaaactatttagaatgtagttttgttatattcccagcatttcaatatttattagttacttgtaaattactgtggctgtgtagtttataaatgtctgtgcactatattaattagaagaccatagaacatgccagcaggttggctaatgctatgggggtttttaccacagttgccattgtggaagaaattatttggtacattaataaaaaaagttggtaaaacatggttttatacctcagtgtataagatgtgcaagacaaatatgcttatttccttttctagaatataagtgatattatttgcttatgacactaacactattaatgacaggagtcaatcagcctttacagctatcaaaatataatgagatcccaatgatgattcttttttactttgaatgttaattagtttgggactttgattggctggcaaacattttatcattgtcagaatttaatttagatttcaaaaatagcttacaggattttaaacatggtgtggtattctaaagccttttttttaaaaaaagagatctttttgagagaaacaaatgaggattgtaaagtttggggacttacctctgtagcattgtgaaaataaactttgattaagctga

SEQ ID NO: 294653 - DNA, 2560 bp, Homo sapiens
tactaaattcgcggccgcgtcgacttttttaaggtaaacattactacttgtaactttttttcttagtcatatttgaaaaagtagaaaattgagttacaatttgattttttttccaaagatgtctgttaaatctgttgtgcttttatatgaatatttgttttttatagtttaaaattgatcctttgggaatccagttgaagttcccaaatactttataagagtttatcagacatctctaatttggccatgtccagtttatacagtttacaaaatatagcagatgcaagattatgggggaaatcctatattcagagtactctataaatttttgtgtatgtgtgtatgtgcgtgtgattaccagagaactactaaaaaaaccaactgctttttaaatcctattgtgtagttaaagtgtcatgccttgaccaatctaatgaattgattaattaactgggcctttatacttaactaaataaaaaactaagcagatatgagttaagttaaatttaaaagtttcaatttattgctcagtgtacctgttaacattatatttaacaattgcttaaatttttgtttttgatttatggataatttcttaagagtacacactttagatacacaaataatcgttcatttaccatctttaggatcattgaaactcatctcactaaagaaagttcacttgaacctctttatagcattgatactaggtgaacagaaattacctgactaataatttgtctaacatcatatatcagaattttattgtatatgatgaacaaaacttaaaattttttaaatttaattcttaaatactgtttcagagttctaaaaaggcagttttttaaaaaacttaagttgataaaaactgtaagaataatttagcagaaatagaaccagaatgtagaagagtagtcatgtaacagcagtaataacatacttcagcttccatataggaatagaagtggtagagccaaaagtgatttaggaaaagttataaggtacaggttgagtatcccttttccaaaaatgcttgggacaagaagtatttcagatttcataatttttttcaaagtttggaatatttgcattatacttaccagttgggcatcccaaatctgaaatctgaaatgttccatgagcatttcctttgagtgtcatgttggcactcaaaaaggttcaacattgagtccacttaacacttaggtgttagaagacctaactttctgtaacaattaaccttatactttgtttgtcatcgaatatttgttgaatgcatgtcaggtaatggtcttgattgtgatagcttcaaggtggaacatactgtaatctccagatgctaggaagttagtctaataattcactgcagaaaattgattaagtggctgtccttttaattaagagtgtggagtcataaacttaagttcttcatatagtgacaagagtccttagagattgttattcaagttccttagaaattgttatttaggtataatatcatcttgtctttgactagagcttgaaaccttgttatctgattgtgtaccactccaaattccctgccttctgcaagttgaatgtcttgctgaatgtgtctaggggttcatcttcagtaatcgacattccactagtgccatagttaacttcatgacatgtagacattcaaaacttgagccttggatgttcctgtggacctgacagttaaaaatataaagaacctaggattcaattccaactttctctgtttgccttgggttgaataacttatcttttggagaatagctttaagtggcttagacactgataaaattcagctgtgttgttgacgctcatctcttttgtcttacgcttagccatatttaaatcttgaatttaatagagtctagtgaaaaaaatgagtgggaagaatgaatataaaagtaataatataaggaaaaagggaaagtaaactatttagaatgtagttttgttatattcccagcatttcaatatttattagttacttgtaaattactgtggctgtgtagtttataaatgtctgtgcactatattaattagaagaccatagaacatgccagcaggttggctaatgctatgggggtttttaccacagttgccattgtggaagaaattatttggtacattaataaaaaaagttggtaaaacatggttttatacctcagtgtataagatgtgcaagacaaatatgcttatttccttttctagaatataagtgatattatttgcttatgacactaacactattaatgacaggagtcaatcagcctttacagctatcaaaatataatgagatcccaatgatgattcttttttactttgaatgttaattagtttgggactttgattggctggcaaacattttatcattgtcagaatttaatttagatttcaaaaatagcttacaggattttaaacatggtgtggtattctaaagccttttttttaaaaaaagagatctttttgagagaaacaaatgaggattgtaaagtttggggacttacctctgtagcattgtgaaaataaactttgattaagctga

SEQ ID NO: 294654 - DNA, 2800 bp, Homo sapiens
  misc_feature (5)..(5): n is a, c, g, or t
  misc_feature (9)..(28): n is a, c, g, or t
  misc_feature (30)..(31): n is a, c, g, or t
  misc_feature (34)..(36): n is a, c, g, or t
  misc_feature (38)..(38): n is a, c, g, or t
  misc_feature (54)..(54): n is a, c, g, or t
  misc_feature (58)..(58): n is a, c, g, or t
  misc_feature (66)..(66): n is a, c, g, or t
  misc_feature (70)..(70): n is a, c, g, or t
  misc_feature (73)..(75): n is a, c, g, or t
  misc_feature (85)..(86): n is a, c, g, or t
  misc_feature (88)..(89): n is a, c, g, or t
  misc_feature (93)..(99): n is a, c, g, or t
  misc_feature (106)..(107): n is a, c, g, or t
  misc_feature (116)..(116): n is a, c, g, or t
  misc_feature (119)..(119): n is a, c, g, or t
  misc_feature (121)..(124): n is a, c, g, or t
  misc_feature (126)..(126): n is a, c, g, or t
  misc_feature (128)..(129): n is a, c, g, or t
  misc_feature (131)..(133): n is a, c, g, or t
  misc_feature (137)..(137): n is a, c, g, or t
  misc_feature (140)..(140): n is a, c, g, or t
  misc_feature (144)..(145): n is a, c, g, or t
  misc_feature (159)..(159): n is a, c, g, or t
  misc_feature (164)..(164): n is a, c, g, or t
  misc_feature (167)..(169): n is a, c, g, or t
  misc_feature (171)..(172): n is a, c, g, or t
  misc_feature (181)..(185): n is a, c, g, or t
  misc_feature (193)..(195): n is a, c, g, or t
  misc_feature (198)..(198): n is a, c, g, or t
  misc_feature (200)..(200): n is a, c, g, or t
  misc_feature (208)..(208): n is a, c, g, or t
  misc_feature (214)..(215): n is a, c, g, or t
  misc_feature (229)..(231): n is a, c, g, or t
  misc_feature (233)..(234): n is a, c, g, or t
  misc_feature (261)..(261): n is a, c, g, or t
  misc_feature (294)..(294): n is a, c, g, or t
  misc_feature (297)..(297): n is a, c, g, or t
ataanaaannnnnnnnnnnnnnnnnnnnannccnnnanccccatttattatacnccanaaaacaantttnacnnnaaatcactcnntnncccnnnnnnnacccccnntattctcanccncnnnnananncnnnaaanccncaanncaatatattttttnatttnttnnntnnaatttaatnnnnnacattcannnatntnaataatantctatnncccccccccccccnnntnncggcccccaggtaatgggggggggcgnggggggggtgggggaggcattacgccctgtggnggnttgtcttaggcatattgggagagggggggaattgagttgcggggggattttttttccaaagatgtctgttaaatctgttgtgcttttatatgaatatttgttttttatagtttaaaattgatcctttgggaatccagttgaagttcccaaatactttataagagtttatcagacatctctaatttggccatgtccagtttatacagtttacaaaatatagcagatgcaagattatgggggaaatcctatattcagagtactctataaatttttgtgtatgtgtgtatgtgcgtgtgattaccagagaactactaaaaaaaccaactgctttttaaatcctattgtgtagttaaagtgtcatgccttgaccaatctaatgaattgattaattaactgggcctttatacttaactaaataaaaaactaagcagatatgagttaagttaaatttaaaagtttcaatttattgctcagtgtacctgttaacattatatttaacaattgcttaaatttttgtttttgatttatggataatttcttaagagtacacactttagatacacaaataatcgttcatttaccatctttaggatcattgaaactcatctcactaaagaaagttcacttgaacctctttatagcattgatactaggtgaacagaaattacctgactaataatttgtctaacatcatatatcagaattttattgtatatgatgaacaaaacttaaaattttttaaatttaattcttaaatactgtttcagagttctaaaaaggcagttttttaaaaaacttaagttgataaaaactgtaagaataatttagcagaaatagaaccagaatgtagaagagtagtcatgtaacagcagtaataacatacttcagcttccatataggaatagaagtggtagagccaaaagtgatttaggaaaagttataaggtacaggttgagtatcccttttccaaaaatgcttgggacaagaagtatttcagatttcataatttttttcaaagtttggaatatttgcattatacttaccagttgggcatcccaaatctgaaatctgaaatgttccatgagcatttcctttgagtgtcatgttggcactcaaaaaggttcaacattgagtccacttaacacttaggtgttagaagacctaactttctgtaacaattaaccttatactttgtttgtcatcgaatatttgttgaatgcatgtcaggtaatggtcttgattgtgatagcttcaaggtggaacatactgtaatctccagatgctaggaagttagtctaataattcactgcagaaaattgattaagtggctgtccttttaattaagagtgtggagtcataaacttaagttcttcatatagtgacaagagtccttagagattgttattcaagttccttagaaattgttatttaggtataatatcatcttgtctttgactagagcttgaaaccttgttatctgattgtgtaccactccaaattccctgccttctgcaagttgaatgtcttgctgaatgtgtctaggggttcatcttcagtaatcgacattccactagtgccatagttaacttcatgacatgtagacattcaaaacttgagccttggatgttcctgtggacctgacagttaaaaatataaagaacctaggattcaattccaactttctctgtttgccttgggttgaataacttatcttttggagaatagctttaagtggcttagacactgataaaattcagctgtgttgttgacgctcatctcttttgtcttacgcttagccatatttaaatcttgaatttaatagagtctagtgaaaaaaatgagtgggaagaatgaatataaaagtaataatataaggaaaaagggaaagtaaactatttagaatgtagttttgttatattcccagcatttcaatatttattagttacttgtaaattactgtggctgtgtagtttataaatgtctgtgcactatattaattagaagaccatagaacatgccagcaggttggctaatgctatgggggtttttaccacagttgccattgtggaagaaattatttggtacattaataaaaaaagttggtaaaacatggttttatacctcagtgtataagatgtgcaagacaaatatgcttatttccttttctagaatataagtgatattatttgcttatgacactaacactattaatgacaggagtcaatcagcctttacagctatcaaaatataatgagatcccaatgatgattcttttttactttgaatgttaattagtttgggactttgattggctggcaaacattttatcattgtcagaatttaatttagatttcaaaaatagcttacaggattttaaacatggtgtggtattctaaagccttttttttaaaaaaagagatctttttgagagaaacaaatgaggattgtaaagtttggggacttacctctgtagcattgtgaaaataaactttgattaagctga

SEQ ID NO: 294655 - DNA, 2438 bp, Homo sapiens
tcagctcggatgcgacgcttggctcaggtacgtggtttacatacgtttaaaattgatcctttgggaatccagttgaagttcccaaatactttataagagtttatcagacatctctaatttggccatgtccagtttatacagtttacaaaatatagcagatgcaagattatgggggaaatcctatattcagagtactctataaatttttgtgtatgtgtgtatgtgcgtgtgattaccagagaactactaaaaaaaccaactgctttttaaatcctattgtgtagttaaagtgtcatgccttgaccaatctaatgaattgattaattaactgggcctttatacttaactaaataaaaaactaagcagatatgagttaagttaaatttaaaagtttcaatttattgctcagtgtacctgttaacattatatttaacaattgcttaaatttttgtttttgatttatggataatttcttaagagtacacactttagatacacaaataatcgttcatttaccatctttaggatcattgaaactcatctcactaaagaaagttcacttgaacctctttatagcattgatactaggtgaacagaaattacctgactaataatttgtctaacatcatatatcagaattttattgtatatgatgaacaaaacttaaaattttttaaatttaattcttaaatactgtttcagagttctaaaaaggcagttttttaaaaaacttaagttgataaaaactgtaagaataatttagcagaaatagaaccagaatgtagaagagtagtcatgtaacagcagtaataacatacttcagcttccatataggaatagaagtggtagagccaaaagtgatttaggaaaagttataaggtacaggttgagtatcccttttccaaaaatgcttgggacaagaagtatttcagatttcataatttttttcaaagtttggaatatttgcattatacttaccagttgggcatcccaaatctgaaatctgaaatgttccatgagcatttcctttgagtgtcatgttggcactcaaaaaggttcaacattgagtccacttaacacttaggtgttagaagacctaactttctgtaacaattaaccttatactttgtttgtcatcgaatatttgttgaatgcatgtcaggtaatggtcttgattgtgatagcttcaaggtggaacatactgtaatctccagatgctaggaagttagtctaataattcactgcagaaaattgattaagtggctgtccttttaattaagagtgtggagtcataaacttaagttcttcatatagtgacaagagtccttagagattgttattcaagttccttagaaattgttatttaggtataatatcatcttgtctttgactagagcttgaaaccttgttatctgattgtgtaccactccaaattccctgccttctgcaagttgaatgtcttgctgaatgtgtctaggggttcatcttcagtaatcgacattccactagtgccatagttaacttcatgacatgtagacattcaaaacttgagccttggatgttcctgtggacctgacagttaaaaatataaagaacctaggattcaattccaactttctctgtttgccttgggttgaataacttatcttttggagaatagctttaagtggcttagacactgataaaattcagctgtgttgttgacgctcatctcttttgtcttacgcttagccatatttaaatcttgaatttaatagagtctagtgaaaaaaatgagtgggaagaatgaatataaaagtaataatataaggaaaaagggaaagtaaactatttagaatgtagttttgttatattcccagcatttcaatatttattagttacttgtaaattactgtggctgtgtagtttataaatgtctgtgcactatattaattagaagaccatagaacatgccagcaggttggctaatgctatgggggtttttaccacagttgccattgtggaagaaattatttggtacattaataaaaaaagttggtaaaacatggttttatacctcagtgtataagatgtgcaagacaaatatgcttatttccttttctagaatataagtgatattatttgcttatgacactaacactattaatgacaggagtcaatcagcctttacagctatcaaaatataatgagatcccaatgatgattcttttttactttgaatgttaattagtttgggactttgattggctggcaaacattttatcattgtcagaatttaatttagatttcaaaaatagcttacaggattttaaacatggtgtggtattctaaagccttttttttaaaaaaagagatctttttgagagaaacaaatgaggattgtaaagtttggggacttacctctgtagcattgtgaaaataaactttgattaagctga

SEQ ID NO: 294656 - DNA, 436 bp, Homo sapiens
accttggctgatcgcgcctgcgcagtggggagcagctcgctcctgggctttgggctggctgcagtctgtctgagggcggccgaagtggctggctcatttaagatgaggcttctgctgcttctcctagtggcggcgtctgcgatggtccggagcgaggcctcggccaatctgggcggcgtgcccagcaagagattaaagatgcagtacgccacggggccgctgctcaagttccagatttgtgtttcctgaggttataggcgggtgtttgaggagtacatgcgggttattagccagcggtacccagacatccgcattgaaggagagaattacctccctcaaccaatatatagcaagtgcattttctatagtctaaactagtataagaggctaatattgtgcagcatctctgcttctgagcagcagctcagcatcagca

SEQ ID NO: 294657 - DNA, 5248 bp, Homo sapiens
  misc_feature (1990)..(1990): n is a, c, g, or t
cacacatccgaccccgtcgcctcttctctcctggtgctgcccagaaagccagccctcccttcccttcttggggcgcagaggctcagccagctcagagcgcagcctggagccgacccagaagggcgaagaaagcccagcggacgagcctcctttctctgctgcctgcccgggctggggcgtcccatcccccgccctgaactccgatctctcccaccccacccctctctgggtttcacccggacagagccgggagctgggtgtcgcccccgtttggaatccacgtttcagcactttggacagcgccccggacgccccggcccctttgggttggcgatggcgagcgttcagcaaggcgagaagcagctttttgagaagttctggcgaggaaccttcaaagcggtggccaccccccgtcccgagagcatcattgtcgccagtatcacggcccgcaagccgctgccaaggacagagccccagaataaccccgttgtcccagctcaggatggaccctcagaaaagctgggtcagcatctggccaccgagcccttgggcaccaacagttgggagagagacaagacctgtcgggaactgggtgccaccagaggacacagtgcctctcatgacaaagacttgacaccaccaccttcctccaggggaaagaagaaaaagaagaaatccactcggaagaagagaaggaggtcctcatcctatagcccatcgcctgtcaagaaaaagaagaagaaaagttccaagaaacacaagcgacgcaggtcattctccaagaagagaaggcacagctcctctagcccaaaaagcaaaagaagagatgagaagaggcacaagaaacaatctcgaagccggccccgaaagtctcaccgccaccgccatcaccgctgcccctcgcggtcccagagctcggagtcccgcccctcaagctgtgagagcaggcaccgcggccggtcccctgaggaagggcagaagtcccgccgaaggcactcccgccgctgctccaagaccctctgcaaggacagccctgaggcccagtccagtcgcccgcccagtcaacccctccagatgcttggctacctgtcagccaggggtgtaatcactgggtcggggtctgctgctgacctctttaccaaaacagccagcccgctcaccacctcgcgaggacgttcccaggagtacgactcaggaaatgacacgtcctcgccaccctccacgcaaaccagctcagccaggtctcggggccaggagaaggggagccccagtgggggcttgagcaagagccgggagctcaacagtggcaacacctctgattcagggaactccttcaccacctcctcaccccagaacaagggggccatgttggagaatctctcccccaccagcaggggcagagagtcaaggggatttcagtcaccgtgtctggaatgtgccgaagtgaagaagtccagtttggtcccatccacagcccggagctcacccatgaaagggtgttcccgcagctcctcctatgccagcacccgatcctccagtcactcgtcccgatccccaaatcccagggcttcccccaggtacacccaaagccgatccacctcttctgaaaaaaggtcctactcccgctctcccagctattcctccaagtctggcaagaggagcccgcccagcagaagctctaggtcccgccgcagccctagctactcccgctacagccccagcagggagcgggatcccaaatacagtgagaaggactcgcagcagcgggagcgcgagcgagcgcgtcggagacgtcggtcctactcgcctatgagaaagcgccggagagactccccgagccacctggaggcccggaggataaccagtgcccggaaacgccccatcccctactatcggcccagcccctcctcatccggcagcctcagcagcacctcctcctggtacagcagcagcagtagccgctcggccagccgcagctactcccggagcnggagtcggagccggagccggagacggagccggacccgcacgagcagcagctctagctcccgcagccctagtccgggctcccgcagccggagccggagcaggagccggagccggagccggagcaggagccagagccggagctacagctcagcagacagctactccagcacgaggcgctaagtgcccctgagccagctgcccgtgggggccccttcgcgctgccagcctcccccaaccacctgccctccccgccttcttggtgacaaatagtgagggctcctataccttgtccttcctgcttgcctaggggaagaggagaagagggtaagggggcttcactctctagatcagcctgctaggagcctctaccagcatcatcctggggcccagctcaggcctgggcatatggaaagaaccatcatcttgtggcacaaaaaaagaagaaagaaaagaaaacttcaaggttttgtgagaagcaatgggtctgtgactcaaaaattgagccctggccaggaaaatgtggagacagttcttctcctccactgctcacaggaggcccgtggtaattctccccacctccccggatgccccactagtccaacttcatggctgcacgtggatggacccccatgtctgagaggggtgaaagaggagaccaatggcagttcaggttcaagataacggggtcaggcctttaacttcctcaaacaggcccaagcaaaggctggaagacatttgggtcctagaagaagggatatccttgaataccagatggggacgtttgacttggtgggaggtgtcaggagataggagttggttaagatgatagatagaaaaacggaagggttcagctgctgctcccaatacctcagcatggtaaggggacagagcccagcagatcccagctgtgaagaggccactgcatggctgacacaaaacacctcttggccattcacaggggccctgcaacctcacgagaaaggagatagtggaagagtcaggacaggttggtctccagccccacttcccaaatatgcctcagccccactagctggcaccaacttaattccacgggaccatctgctgaacattccccagtgccatggccagttgccaggccccagcgccagccagtctggccttaccctccggttggcgcctgccagccccctcccctctgcccaggctgccacgccctggatgccacccagtgcagcctggcacctacccacccacccttcagcttaagccactccccttgcctctcaggaattttgccaggatggggcacagcagctcaggtttgggggaaaagacccgaatccagagtgcaggggagaggggcttggatatgccatgtcttgggctcctgctggcttctgaggtttcttgtcagcttgggaaagacccacctttatttttgccctcaccccaagtcccccctggctggggctgggcagagagggtaagctgatctccgatccacaaataccaccagctgcttcatccacagaaggcgctaagaacggggaggtgaggaataagatccttaaaataaactcttgggcatccccctcaccagctgactggctttccggaggcttgtgggtgagtttcaagtttgtggtggcaacagcagcaggacagggcacggagggagcgagggagagaggaccggtcccagcttttggatattttgggttatggggaagcaagggccaaacattctttatccctcccaccccagggaaaacatttggaaaatagtcctttttcttggaagcagtgacgtctccctacccaatctttcccatcctatcaacccatggggctagagactgccatgcaaccaccaccacgacagcccttcctccatcagaagacaggagtgagggccccgggcagcagtggacgacccagcctccccataccgggcctctggcccagacctaagccctgcccacaaagactaatggatgccagtgctgtcactgcagaaggccagatggcaggtgcctgggacaggggcaggtgccccggggagggcaagtacagccactgtaaataaccctcgtccctgcccaggaacccagactggacttcagtctccctccatggagacaaaggcttcccagagccaccaaaaaccttcttagcaggacagctgtgagaggcatcagaacctcacgttcggactgccttcatcaagacaactctaggggaccattttgcctggggctcctagcaaacctttttatttattttatttatttatctatttatttatttgatgactgtctctctttctcgccattagcagtattgaattatttatttatacagaggttttgtgtgtgtgtgtgtgtgtgtgtgtgtgtgtgtgtgtgtgtgtgttggggggatctcctaaattatttctgtgcatctcctttttttttctgctgttttttatggatgggatttgagaggccaaaggtgagtgggctattggccttctccctgaaggctctaagcctggaacaccctggggttggcccagaaggaggcacatcagtcccaaaattcatcacttaacccagcgtccaggagggtcaggcctgtaccccagcctcctgtcccccaggaacctcacaggggtatcaaaaagatgtaaacagcccagaggcttatgagctacagtgatgaattgacacagtggagttgcaacttaggtgggggttggagtcgaaagttggcaaatggggccaaggctgcacaaagtcgaaatcccttgtgaatgtcccttagggaggcaccagattggagacagatgtgctatctcctaacagagtgatgaggcttcagttgagtacttgctgaagtagttgccttgtattttgagggccatggtggatgaaaatgatgtctggtttagtactggaattgcacttggggttgacaaggtgctcacaccatgagaatggaggcaggaattgagctgactgagggaagatgcaccttgatctcaccctcactccaaggcacatagcaggatcactccctagcttctctgagcacacctagttggtttcatgtatgttacacatgcttccactccacagtacctaatttctctctgtcccctgagatctgaaggctaccttgggaagaggcatcagccatcttgcttgagaaccaccaagccaaaagcaaaagcttttatctatgatctcttgctgtttcatcaggggaaagcacaaagctatttctgaaattagga

SEQ ID NO: 294658 - DNA, 1277 bp, Homo sapiens
tagggaatgcgaccaggccgtcgcggacgcgtgggctccggtcactggaactctgcggggtgttcaagcgattctcctgcctcagcctcccgagtagctgggattacaggtccagctgggagctccccgacctccaggagggcaagatccaagccatcagcgactcggatggggtgaactacccctggtacggcaacaccacagagacctgcaccatcgtgggccccaccaagagggactccaagttcatcatcagcatgaatgacaacttttaccccagcgtcacatgggccgtgcccgtcagcgagagcaacgtggccaagctcaccaacatctaccgggaccagagcttcaccacctggctggtggccaccaacacctccaccaacgacatgatcatcctgcagacgctgcactggcgcatgcagctcagcatcgaggtgaaccccaaccggcccctgggccagcgcgcccggctgcgggagcccatcgcccaggaccagcccaaaatcctgagcaagaatgagcccatcccgcccagcgccctggtcaagcccaatgccaacgatgcccaggtcctcatgtggcggcccaagtacgggcagccgctggtggtgatcccgcccaagcaccggtgacagccaggaccacccgctaggttagactcacaaataataataccgctgaaaacaaaactcagactcactcttcagtcattcagcaagatacaaccattctaccctctccagcgggcggatctcactgtgctgatgcccccgggaaggcctccccggctctcggcacctgcttcctttcagggagaggggagatctaagcaggacagacagaccccacgtgcgccctcagggtgacctctggtctccttgcctctcctttttctcagtttcagtcgctcacttgtaacagattccctgaaacactgctttttccgttttttaaaaaaactcctcttttgggggctcaggggcaggaggagggggagctgattaggagggaagctccagcccccgatcaaagagacagatccacactgctgccgatttgtggcgctggccggccttccccccaggtccctccgccctctgtcatgcggccttatgtagacttgctttgccaaacttttgccttaagctgaattgaaaggaagaaaaccaatcggagaaagaaagcaggatctcttttctaccggacttttcctcttctgccagaggtggagggagggttggggtcgcccgcgagagtctcttgagcccttc

SEQ ID NO: 294659 - DNA, 1398 bp, Homo sapiens
ggccaagggattgctgcagccctcatccaccttccaagcactggaaacaaacattggagaccaaggtctccagaagcttccactgactgctgttggctgcaccaggcaacagggtctggctctgtcacccaggctggagtgcaatggtatgatctcggctcactgcaacctctgcctcccaggttcaagcgattctcctgcctcagcctcccgagtagctgggattacaggtccagctgggagctccccgacctccaggagggcaagatccaagccatcagcgactcggatggggtgaactacccctggtacggcaacaccacagagacctgcaccatcgtgggccccaccaagagggactccaagttcatcatcagcatgaatgacaacttttaccccagcgtcacatgggccgtgcccgtcagcgagagcaacgtggccaagctcaccaacatctaccgggaccagagcttcaccacctggctggtggccaccaacacctccaccaacgacatgatcatcctgcagacgctgcactggcgcatgcagctcagcatcgaggtgaaccccaaccggcccctgggccagcgcgcccggctgcgggagcccatcgcccaggaccagcccaaaatcctgagcaagaatgagcccatcccgcccagcgccctggtcaagcccaatgccaacgatgcccaggtcctcatgtggcggcccaagtacgggcagccgctggtggtgatcccgcccaagcaccggtgacagccaggaccacccgctaggttagactcacaaataataataccgctgaaaacaaaactcagactcactcttcagtcattcagcaagatacaaccattctaccctctccagcgggcggatctcactgtgctgatgcccccgggaaggcctccccggctctcggcacctgcttcctttcagggagaggggagatctaagcaggacagacagaccccacgtgcgccctcagggtgacctctggtctccttgcctctcctttttctcagtttcagtcgctcacttgtaacagattccctgaaacactgctttttccgttttttaaaaaaactcctcttttgggggctcaggggcaggaggagggggagctgattaggagggaagctccagcccccgatcaaagagacagatccacactgctgccgatttgtggcgctggccggccttccccccaggtccctccgccctctgtcatgcggccttatgtagacttgctttgccaaacttttgccttaagctgaattgaaaggaagaaaaccaatcggagaaagaaagcaggatctcttttctaccggacttttcctcttctgccagaggtggagggagggttggggtcgcccgcgagagtctcttgagcccttc

SEQ ID NO: 294660 - DNA, 1216 bp, Homo sapiens
ggcgtgcagccacatggagttctacaaccagtacggcgagcagggcatgtccagctgggagctccccgacctccaggagggcaagatccaagccatcagcgactcggatggggtgaactacccctggtacggcaacaccacagagacctgcaccatcgtgggccccaccaagagggactccaagttcatcatcagcatgaatgacaacttttaccccagcgtcacatgggccgtgcccgtcagcgagagcaacgtggccaagctcaccaacatctaccgggaccagagcttcaccacctggctggtggccaccaacacctccaccaacgacatgatcatcctgcagacgctgcactggcgcatgcagctcagcatcgaggtgaaccccaaccggcccctgggccagcgcgcccggctgcgggagcccatcgcccaggaccagcccaaaatcctgagcaagaatgagcccatcccgcccagcgccctggtcaagcccaatgccaacgatgcccaggtcctcatgtggcggcccaagtacgggcagccgctggtggtgatcccgcccaagcaccggtgacagccaggaccacccgctaggttagactcacaaataataataccgctgaaaacaaaactcagactcactcttcagtcattcagcaagatacaaccattctaccctctccagcgggcggatctcactgtgctgatgcccccgggaaggcctccccggctctcggcacctgcttcctttcagggagaggggagatctaagcaggacagacagaccccacgtgcgccctcagggtgacctctggtctccttgcctctcctttttctcagtttcagtcgctcacttgtaacagattccctgaaacactgctttttccgttttttaaaaaaactcctcttttgggggctcaggggcaggaggagggggagctgattaggagggaagctccagcccccgatcaaagagacagatccacactgctgccgatttgtggcgctggccggccttccccccaggtccctccgccctctgtcatgcggccttatgtagacttgctttgccaaacttttgccttaagctgaattgaaaggaagaaaaccaatcggagaaagaaagcaggatctcttttctaccggacttttcctcttctgccagaggtggagggagggttggggtcgcccgcgagagtctcttgagcccttc

SEQ ID NO: 294661 - DNA, 1425 bp, Homo sapiens
tttcaccaaagtttccccaaaggtttgccgaaaaatggggcccaaaaccctttcggggaaaacaaaacactttcggagaaatccccgttatgaaaatatcccccgcgatttctataggtttctctattaaagacacgcctcccattcgtctgccgtaaaattggggccctcacggggtttttccacaaagagtggcaaacaacttttggcgccggagggacctcctccccgagggttttggtcccatctccgcgagagggtttccctaaaaagggcgctcgggaaaaagggtaacggggcccctataacacctcggaattcagggggccccctatgaagcgggcccgttccgcaaccgccatgaaaaccaaatttgctgttaaccaccctggaggggaatccacccaatgggagaggcccgttgttcgaagccctcaataccccattggggcgctctgggtttgcgaccaaatcccgaaacccaagcccctttcccaaccccgatacctgaaccaatggaattcaatcccctcgctaggatccgacctgcacatggccggcaattgcatgcgtcaacgcaatacgatggtgaaccccaaccggcccctgggccagcgcgcccggctgcgggagcccatcgcccaggaccagcccaaaatcctgagcaagaatgagcccatcccgcccagcgccctggtcaagcccaatgccaacgatgcccaggtcctcatgtggcggcccaagtacgggcagccgctggtggtgatcccgcccaagcaccggtgacagccaggaccacccgctaggttagactcacaaataataataccgctgaaaacaaaactcagactcactcttcagtcattcagcaagatacaaccattctaccctctccagcgggcggatctcactgtgctgatgcccccgggaaggcctccccggctctcggcacctgcttcctttcagggagaggggagatctaagcaggacagacagaccccacgtgcgccctcagggtgacctctggtctccttgcctctcctttttctcagtttcagtcgctcacttgtaacagattccctgaaacactgctttttccgttttttaaaaaaactcctcttttgggggctcaggggcaggaggagggggagctgattaggagggaagctccagcccccgatcaaagagacagatccacactgctgccgatttgtggcgctggccggccttccccccaggtccctccgccctctgtcatgcggccttatgtagacttgctttgccaaacttttgccttaagctgaattgaaaggaagaaaaccaatcggagaaagaaagcaggatctcttttctaccggacttttcctcttctgccagaggtggagggagggttggggtcgcccgcgagagtctcttgagcccttc

SEQ ID NO: 294662 - DNA, 181 bp, Homo sapiens
tgggagaggcacacttctaactgctgatgccaccctcaaagggtctccagaagcttccactgactgctgttggctgcaccaggcagtgagtatcagtacatttaatcatcacaaaaaccgggcaggcagatgttggcggattgtctgtgggctgctgaagagctggtagagctcagcgcgt

SEQ ID NO: 294663 - DNA, 1202 bp, Homo sapiens
cttggacacacagcctcttcccaccacagaattgcatatgttacagctgagttggttagggatcttcacagctcatggaattagcagcaatagccaataatagtctcccatcatacagaaccctgtcatccatgggagcttaccacgtggatgcagaagcttttgtgaggggcagcccggaccatcttttggacttaatataccgatatgaagattcagatgcatctactcctcggttgggtggaagagtgatccaggttggtatgcctatagattctgataaagtcttgtgctacttaggaatctgaagagcaaacacttaggccggtgctcatcacatatccttgacctgcagagtcctgaagcttcagcctactaggcagctcagcctagaagctggtcccgcggggctttcagaaatggcaggaagtagacttgcccattcctgacaagcaagattccatagtccttcaggctccatcttaattgatcccagatcttctgcccccaatgtattgtgcatctaatcaaaagcttctttctagctggctccttgggtttcagctacatttcttagatgatcccgaaggtctagataacaagggggcgtagctgaatggaggttaacatttcctgctggactgtaaacttaagggcccaggtcttgtgtgtgtgtgtgtgtgtgtgtgtgtctgttttaacctaatgatttgtatatagtgagtactcagtaagtacttgtcaaatgaaagaacagggattgccagaccttcaaggcaatgggaaaggagcaaatctgcaaaggtaggatctctttggaaggcaggtattggccaccaagtcaaactccttgagtcttatattctgattgggatgatctcacatggatgttcatctcttatatgtgaatactcatttgtgaaaaatagtaagagccagctaggatatttggattcagtcaggcaccatcagaatagtgcagtgaaaggccaaactggccacaagacagaggaatgttttcagttttctggttttcctctggtccatgataaagctcggagtaactcttctatcaagatggggctataccttctcatgacagaggctggcaattgagctacccagcagaacgtgtgctctcaaaagggaagtcaagggaactgggttcctcttctccctctacttctgagccaatgcttcat

SEQ ID NO: 294664 - DNA, 468 bp, Homo sapiens
cgtcacctccagcaccttaatctgttcttcagcagccgcccgcacctcctgtactggggataggatcccggtgagcgtatccactaacgcttcctttaatccttgtgccactggacccggcagcccggaggccgcaccagctgccgccgccgccgccatcttttctcccctcagcccgccagccccgcggccgggacccgccaccgaatgacggcccccgcgcgcggccaatccgcgaagccgcgcctgcgcaccagaggcgggcgggagcgggcggagggcggggaatgaatctaagcctccagagacagcgcctcctgctgcctgaacgagaactgcacctttctctgcaaggatctctggatttgtgtgaaaactgagccccagacaggttaaggggctttcctaaagttgcacagtaagttagcaatctcatttggaataaagttcatgatatatgactttata

SEQ ID NO: 294665 - DNA, 739 bp, Homo sapiens
cgtcacctccagcaccttaatctgttcttcagcagccgcccgcacctcctgtactggggataggatcccggtgagcgtatccactaacgcttcctttaatccttgtgccactggacccggcagcccggaggccgcaccagctgccgccgccgccgccatcttttctcccctcagcccgccagccccgcggccgggacccgccaccgaatgacggcccccgcgcgcggccaatccgcgaagccgcgcctgcgcaccagaggcgggcgggagcgggcggagggcggggaatgaatctaagcctccagagacagcgcctcctgctgcctgaacgagaactgcacctttctctgcaaggatctctggatttgtgtgaaaactgagccccagacaggttaaggggctttcctaaagttgcacaaaccctgtcatccatgggagcttaccacgtggatgcagaagcttttgtgaggggcagcccggaccatcttttggacttaatataccgatatgaagattcagatgcatctactcctcggttgggtggaagagtgatccaggttggcagccgtcttgttgatgtcccctatgtcatccagagggcaggagcgggcagctctctaccttggcaactggttcctctctctccagcttcatcttttccattgttttttgtttgtttgcttgtttttgtttttcatttttaccttttacagattgatttaaacattttttaaaccac

SEQ ID NO: 294666 - DNA, 607 bp, Homo sapiens
cgtcacctccagcaccttaatctgttcttcagcagccgcccgcacctcctgtactggggataggatcccggtgagcgtatccactaacgcttcctttaatccttgtgccactggacccggcagcccggaggccgcaccagctgccgccgccgccgccatcttttctcccctcagcccgccagccccgcggccgggacccgccaccgaatgacggcccccgcgcgcggccaatccgcgaagccgcgcctgcgcaccagaggcgggcgggagcgggcggagggcggggaatgaatctaagcctccagagacagcgcctcctgctgcctgaacgagaactgcacctttctctgcaaggatctctggatttgtgtgaaaactgagccccagacaggttaaggggctttcctaaagttgcacaaatggcttctactcaccagaggatctgagtccagagaacttggggtgctgtctttgactgtcctatcctcgggaggcgcagtggctcatgcctgtaatcccagcatttagggaggccaagacaggaagatcacttgaggtcagaagttcaagaccagcctggccaacgtggtgaaaccctgtttctact

SEQ ID NO: 294667 - DNA, 1356 bp, Homo sapiens
tgattaagagactgagtcagttcccacttgtgaatagacagcatgaaggctttaaacctctctgaacctgatcagcattggcaatgatcttctgcagatccaacaacagcacagaagaatgtatcatcaggaacacatttggatattgacacaacttcatctgcagttggcttgtcatcctgagctccgttcccaggcagcgtagatattgcacaggattttgctgaccagggagttgggttataagtggtaactccaacctcttaatactaacgacattgacagtaccatataatccatctattacaccacacaggaaaatcaagcccagtggtacaggacagaagaactggctccagccaggatcaagcattgctttggcattgttccccaatacctgggcctttcttctccaattgttggggtaactggagtgaggagcctgaggggacccaaaggtgttctcctggtaggattccctctcatggtcttctgcatttgtagacattttgattggttccatttctaagggccaattatctgtgctttaacctgaaataaggaacctgccttctgatcttcaaggatatgtacatggacacacatctttcagattcaactcttgagatttttggttttaaacaaacaattgtgttcatcacaaatgaagattccctcaagcagcagccgcctggaatcaactgctgagtccaaatcttgtagcccttaaaaatatttagtatttttactaagtaataagtatttagggtgttatgaaaaatgcaatttgaaaaagtacattggtttttaagaacaagaggaactatttagaaattatacaatatattaacaaaagtaaatatttaatatatctcaaacacaaaaatgcaaaaactggttaccaagcatcaagaaaaacttaaaacttgtaaaatacaaaggttaaatgtattttatcttcattctattattagcagataaccttaataaaaatgagctgttatttacagcaaaatatcatgtaattttagatttatcactttttatttctatggaaaagcaacaccagcatgtattgttgctgaaggtgaagcaactttttgattctgttctgttccactctgtgttctaagatgtgtgtcagataccggccacacaccctacatgtgctcggggcacagcctggccccacacagcactctagtctgcaggtgggcatctaaggccctgccattcccacttcttattgtcatatttacttagttctcagcacctctgcccatctttaaatgacttaagtgagagtatgttaaagtagcttacatgttcctaagcttcctcacagcacatcccatc

SEQ ID NO: 294668 - DNA, 955 bp, Homo sapiens
tgattaagagactgagtcagttcccacttgtgaatagacagcatgaaggctttaaacctctctgaacctgatcagcattggcaatgatcttctgcagatccaacaacagcacagaagaatgtatcatcaggaacacatttggatattgacacaacttcatctgcagttggcttgtcatcctgagctccgttcccaggcagcgtagatattgcacaggattttgctgaccagggagttgggttataagtggtaactccaacctcttaatactaacgacattgacagtaccatataatccatctattacaccacacaggaaaatcaagcccagtggtacaggacagaagaactggctccagccaggatcaagcattgctttggcattgttccccaatacctgggcctttcttctccaattgttggggtaactggagtgaggagcctgaggggacccaaaggtgttctcctgagcctaaggaggacccaatggcaggcatcagcacagctgaacaccacctggaccccactgcagccctgcccacgcagctctcacggagcagacacagtcctcaagtaataagcacagatggaggagaaacgagaggctgtggaaggcaggagagaaaggccgagagacgagtttgtaagaatgccaaagtcaccttccccattgtgggaggaaaatgccaaaggcactggttctgctgccacaggcagtctgagcacctggagttgtgacgtccttccaggagaggtgccaccaaggagcaggaggtttgtcaaagctctggtcccaccaacaagaacctcccaaagcaaagcagcccccattgaggttccaaggtcgttttgctgaagacgggaacgaaaccaacaccaaagcgacagggggttgacagaggggacaggggctgggcaccggcaacatggagccgttcaagtaaacataaaccac

SEQ ID NO: 294669 - DNA, 809 bp, Homo sapiens
  misc_feature (808)..(809): n is a, c, g, or t
aatcgagatctcctgcgcgaaggccagcgagatgagcagcaggggcagccccaccgcaatgcacgtgaccatcttgtccacagccagctccagtcgcagccccttgaacttgggctccgtgggctccttcagcaagaaatccgagaacacgtactccgtggccaggtggtcgctgacctggcaggttatcatccacttcccaggattctcggctatcatttctgttgtaaggaaggtggctgggaacaggttgacgacatcagtccgatgccctctgctgatgaaggtgttaccatagaaatagatagaatggatgtctatttcattccccattccaaataggtgccaggacacagattctccaacacacatatcaggctccgggaagtttccgaagaggtatccattgagggctggaaacagaaacacgctagtggaagagactcccctgcagaggcgactgggaccagaaatgttgagaaaacactcaataaaagtgaagatcagcatacactgagaacagcctcggagctgctgtgggaacgcaatatgaggtcaggagaaaacagagtgctgctcatatttacaggaggctcagtcaccttctgtcataatccttcactggcatatctgctgtctccaccagattctgtgctccttggaactagaaaccctgtcttgttcatcttaacagttatcaggacctagcagaaaaactggcacatagtatctacttaatgaagtgacaaaagcatgtagtaagatggaaagaaaaggaattgattaaaaggaatttatgagaaaaaann

SEQ ID NO: 294670 - DNA, 523 bp, Homo sapiens
aatcgagatctcctgcgcgaaggccagcgagatgagcagcaggggcagccccaccgcaatgcacgtgaccatcttgtccacagccagctccagtcgcagccccttgaacttgggctccgtgggctccttcagcaagaaatccgagaacacgtactccgtggccagttgagcgatggccatggctgcggcgcgccaggctcgaccaggaggtccgggtacagccggcgtcgggaaagctgcgcggcgccttcacccagtcaccggccgggcgcgcggctttcgctttccctttgcctgctcccgcatcccgcctgcctttgtgtctcggtgcctcaggctcccagcgactccgctgggctctcgcgctcgctgcctccgccgccggcggggcggggcggggcgggaacccgagagctccgcttcctgcggttccaccccgcacgcccgtgcaagtccccgggccgcgcgcggcactcggattcgcgcctctcccgcgcacccccaggcgcgggaaccacgcgcg

SEQ ID NO: 294671 - DNA, 944 bp, Homo sapiens
  misc_feature (943)..(944): n is a, c, g, or t
aatcgagatctcctgcgcgaaggccagcgagatgagcagcaggggcagccccaccgcaatgcacgtgaccatcttgtccacagccagctccagtcgcagccccttgaacttgggctccgtgggctccttcagcaagaaatccgagaacacgtactccgtggccaggtggtcgctgacctggcaggttatcatccacttcccaggattctcggctatcatttctgttgtaaggaaggtggctgggaacaggttgacgacatcagtccgatgccctctgctgatgaaggtgttaccatagaaatagatagaatggatgtctatttcattccccattccaaataggtgccaggacacagattctccaacacacatatcaggctccgggaagtttccgaagaggtatccattgagggctggaaacagaaacacgctagtggaagagactcccctgcagaggcgactgggaccagaaatgttggtaatacgggcttaagcatggctggaaaaccagtgcagaccattggttgtaaggttttggtgcagaaaaacctggctcttagaaatatatattgtccaaaagagaaatgaaatgtttttattggcctttttccagagaaaacactcaataaaagtgaagatcagcatacactgagaacagcctcggagctgctgtgggaacgcaatatgaggtcaggagaaaacagagtgctgctcatatttacaggaggctcagtcaccttctgtcataatccttcactggcatatctgctgtctccaccagattctgtgctccttggaactagaaaccctgtcttgttcatcttaacagttatcaggacctagcagaaaaactggcacatagtatctacttaatgaagtgacaaaagcatgtagtaagatggaaagaaaaggaattgattaaaaggaatttatgagaaaaaann

SEQ ID NO: 294672 - DNA, 356 bp, Homo sapiens
actaaggctcaagtaggagaacttacttgtttagtaagatcatacagctaggaagtgggagaggcaagagttgaacccagatcttcctagctcctagtccattgttctgtctactgggtcacactggaccagccaggaggcaggaaaatcagctggggaatgtggtgccaacgtgtgatgtttgcctaaatgtgtgcatccttgctggaagccagccatgattcatgctgcataagtattcattaatgttcatttcatttatttggctatccatatgctttccagggcgaaggcaagctaggacaagggcagacaagcagccttaaagtttgggtgctttccttcgaagttgagct

SEQ ID NO: 294673 - DNA, 285 bp, Homo sapiens
tcactagggtcccagtcaggggcatctggtgaccttaggcctggttagtagcggcctgatcagtggcaacctgttccctggaggcctggtcagtggggcctcatctttggggccagggaatgaggtcatgatcagtggaacctgatcagtgaggccttgtcaataatgacctagtcagtgaggacttgtcagtaaggacttggtccttgaggccttgtcagtgaggccttgtcagtaaggtcctggtcagtggagtccttgtcattgtgtgcctggcagtggggg

SEQ ID NO: 294674 - DNA, 579 bp, Homo sapiens
  misc_feature (477)..(477): n is a, c, g, or t
atgcaggccatcaagtgtgtggtggtgggagatggggccgtgggcaagacctgccttctcatcagctacaccaccaacgcctttcccggagagtacatccccaccgtgtttgacaactattcagccaatgtgatggtggacagcaagccagtgaacctggggctgtgggacactgctgggcaggaggactacgaccgtctccggccgctctcctatccacagacggacgtcttcctcatctgcttctccctcgtcagcccagcctcttatgagaacgtccgcgccaagtggttcccagaagtgcggcaccactgccccagcacacccatcatcctggtgggcaccaagctggacctgcgggacgacaaggacaccatcgagaaactgaaggagaagaagctggctcccatcacctacccgcagggcctggcactggccaaggagattgactcggtgaaatacctggagtgctcagcnctcacccagagaggcctgaaaaccgtgttcgacgaggccatccgggccgtgctgtgccctcagcccacgcggcagcagaagcgcgcctgcagcctcctctag

SEQ ID NO: 294675 - DNA, 1665 bp, Homo sapiens
ggtctcgggtggggtgcggcttcctgcgtctgagagacgcttcctctcctgctgtcctctccctgccaggccccttctgcagcggctggcttccagacaccctgcgtccctcccttgctcgcagcagttgctgtggcggtcctcccgtgcacccccccttctgccctcactgcccctgggggtcctcatcacggaccccctaactcggcatcctggacaccaccaccccgcacctttccacagtgcagctctgctcgtgcctgtgaagcctcccacagcctgggaaggaaaatccagacttgccagaccttgcctcagccaggccttggaagcctgccagcttacctaaccagaccctcagcccatggagtcctgtgtgatgttgtgagcgtgggaggacagactgaactgctcggcccgtggagtcctgtgtgatgttctcaacggcagctaaagccactgcatacaatgcaaggactggctcctgtttggccacgactgattgcagcccctggtgaaatgagaaccctgtgggtcggaacaaagtttggattatttatgttgcaagtaactaaaatctcaagtgaaactggtttaaacattatatttttattatttatttatttatatttaattcttttttagagacagggtcttcttaggttgcccaggctggtcttgaactcctggcctcaacgatcttcccacttcagcctcctgcattgctgggattataggtgtgagccaccatgcctggcttacacagtataaagggaatgcattggcccacacagtggaaaaaaatatctagtaggaataggaaggacttcaggtgaggtttgatccagcagctcaaatgttgtcaccacaggcctggattcctctggcctttctcaaggtctctttcattttcatgctccacaagatggcttctgccaggctgacctccctcccctgaccccagcagctctggacacccctctcagtgccatttatattgttgcatcaataggctcatttctatatactgcaaggttcagagaagacagagtatctctctcaagagttctaacataagtctgggggtcctggctctcataggcttgaacagggccacatgtccattcctgagccaatatttgtgaccaaggggatgtggtcaatctcatccaaacctcacttgaagtgagggtgggaggaggagtgctctgcaaggagactgtaggtctggaccaccaaaaaggtagatgggttggtgggaaaagccagatgcctactatggtagtgggcggggggagggcacactggcaaggtacagcaagaggcaggggcagtgctggacaggcaggggctcctccctagcacgactggagaaaggactcctgtgaagcggtcacctccatgagtccctcctgtcctggcttccaaccactctgaagtggggcttttgtccacagacctggcctctgctgcctaccctcttctgtccccacctgatggggccgctttccttctgaagcggctgcattttgggtttctctccacaggaagagttggggctcacaggcacaccctctccctaactcttctcccccggttcaacctggatccagggatccacactctgctccgagaggccagcacgcagccactggaaaatgagcc

SEQ ID NO: 294676 - DNA, 2024 bp, Homo sapiens
ggtctcgggtggggtgcggcttcctgcgtctgagagacgcttcctctcctgctgtcctctccctgccaggccccttctgcagcggctggcttccagacaccctgcgtccctcccttgctcgcagcagttgctgtggcggtcctcccgtgcacccccccttctgccctcactgcccctgggggtcctcatcacggaccccctaactcggcatcctggacaccaccaccccgcacctttccacagtgcagctctgctcgtgcctgtgaagcctcccacagcctgggaaggaaaatccagacttgccagaccttgcctcagccaggccttggaagcctgccagcttacctaaccaggctagtctgcccccctcactctgggtgctctccatgggccactcaccatttcctgagcaggaccagagctctcctgccccaaggctgggcttcagctgctctttcagctttgaacgtcctttcccattctccatcatccacattcacctatcctgcctgccccagttaaaatcctgtttcttctaggaagtccctcatcccacccgcttaccccagggagactgagcttgttccttctcctagtaagaccctcagcccatggagtcctgtgtgatgttgtgagcgtgggaggacagactgaactgctcggcccgtggagtcctgtgtgatgttgtgagcggggaggacagactgaactgcgtggtgcttcgcacatagacctcaacagggattggcattttgaagctgttggcgggggctgtggactgcttttcttcctttctagctcaacggcagctaaagccactgcatacaatgcaaggactggctcctgtttggccacgactgattgcagcccctggtgaaatgagaaccctgtgggtcggaacaaagtttggattatttatgttgcaagtaactaaaatctcaagtgaaactggtttaaacattatatttttattatttatttatttatatttaattcttttttagagacagggtcttcttaggttgcccaggctggtcttgaactcctggcctcaacgatcttcccacttcagcctcctgcattgctgggattataggtgtgagccaccatgcctggcttacacagtataaagggaatgcattggcccacacagtggaaaaaaatatctagtaggaataggaaggacttcaggtgaggtttgatccagcagctcaaatgttgtcaccacaggcctggattcctctggcctttctcaaggtctctttcattttcatgctccacaagatggcttctgccaggctgacctccctcccctgaccccagcagctctggacacccctctcagtgccatttatattgttgcatcaataggctcatttctatatactgcaaggttcagagaagacagagtatctctctcaagagttctaacataagtctgggggtcctggctctcataggcttgaacagggccacatgtccattcctgagccaatatttgtgaccaaggggatgtggtcaatctcatccaaacctcacttgaagtgagggtgggaggaggagtgctctgcaaggagactgtaggtctggaccaccaaaaaggtagatgggttggtgggaaaagccagatgcctactatggtagtgggcggggggagggcacactggcaaggtacagcaagaggcaggggcagtgctggacaggcaggggctcctccctagcacgactggagaaaggactcctgtgaagcggtcacctccatgagtccctcctgtcctggcttccaaccactctgaagtggggcttttgtccacagacctggcctctgctgcctaccctcttctgtccccacctgatggggccgctttccttctgaagcggctgcattttgggtttctctccacaggaagagttggggctcacaggcacaccctctccctaactcttctcccccggttcaacctggatccagggatccacactctgctccgagaggccagcacgcagccactggaaaatgagcc

SEQ ID NO: 294677 - DNA, 371 bp, Homo sapiens
agtaagaccctcagcccatggagtcctgtgtgatgttgtgagcgtgggaggacagactgaactgctcggcccgtggagtcctgtgtgatgttgtgagcggggaggacagactgaactgcgtggtgcttcgcacatagacctcaacagggattggcattttgaagctgttggcgggggctgtggactgcttttcttcctttctagctcaacggcagctaaagccactgcatacaatgcaaggactggctcctgtttggccacgactgattgcagcccctggtgaaatgagaaccctgtgggtcggaacaaagtttggattatttatgttgcaagtaactaaaatctcaagtgaaactggtttaaacattata

SEQ ID NO: 294678 - DNA, 4462 bp, Homo sapiens
tcgtttccgccggcgctccgagtgacgtagggaagcgcgccgcgcacctcatggttccggggacagttagggcggcggatggaggtcagcggtggtgctcgctgcggtttggaatcacttgctaggagtcttgtctctctgccacccaggacatcatggcagctcacctggtaaagcgatgcacgtgcctcctgagagaagctgctcgtcaggcccctgccatggctccagttggccgactgagacttgcctgggtagcccataagactctgacttcctcagccacctcacccatttcccacctcccaggttccttgatggagccggtggagaaggaacgagcatctactccctacatagagaagcaggtggaccacctcatcaagaaggccacaaggccagaggagctcctggagctacttggtggcagtcacgacttggacagcaatcaagcagcaatggtacttatccggctctctcacttgctgtctgagaagccagaagataaaggcttgctcatacaggatgcccactttcatcaacttctctgtctgctcaacagtcagattgcctcggtctggcatggtaccctctcgaagctgctgggaagcctgtatgctctgggcatccccaaggcctccaaggagctgcagtcggtggagcaggaggtccgctggcgcatgcggaagctcaagtacaagcacctggccttcctggcagagtcctgtgccaccctctcacaggagcagcactcgcaggagctgctggctgagctgctcacacacctggaaaggcgttggacagaaattgaagattcccacacattagtgaccgtcatgatgaaggtgggacacctctcggagccactaatgaaccgcctggaagacaagcacgtcctgaacagagcgcaggacatcaccctgccccacctgtgcagcgtacttctggcttttgcgcgtctgaacttccatccagaccaagaggatcagttcttcagcctggtacatgagaagctggggtcagagctgccaggcctggagccagccctgcaggtggacctggtgtgggccctgtgtgtgctgcagcaggcacgggaagcagagctgcaagccgtcctccaccctgaatttcacatccaatttctagggggcaagtctcagaaggatcagaacaccttccagaagctgctccacatcaacgccactgccctgctggagtaccccgagtactcgggtccccttctgcctgcctcggctgtggcccctgggccctcagcccttgacaggaaggtgacccccctgcaaaaggagctgcaggagacgctgaaggggctgctggggagcgccgacaagggcagcctcgaggtggccacgcagtatggctgggtgctggatgctgaggtgctgctggacagtgacggcgagtttctgcccgtaagggactttgtggcacctcaccttgcccagccaactgggagccagtcaccacctccagggtctaagaggctagcgttcttgcggtgggagttccccaacttcaacagccgaagcaaggacttgctgggtcgctttgttctggcccggcgacacatagtggctgcaggcttcctgatagtggacgtcccattctatgagtggctggaactcaagtctgaatggcagaaaggcgcctacctcaaggacaagatgcgcaaagcggtggctgaggagctggccaagtgacttgtgccagcagcatggactgcgtgcctctccgccggaggtctagctgtgggcggccaagaagggtcacccttgaggacaaacctctgtgcaggaccttggccagagtggggagggtggccagccactctgagggacagaacgtcctcttgtgtataataaacctttaattttggtgttggacccctggggccttcccaggcttggtcaccctctgcactgtcagcacttgtctgtctgctttgttgagcagggcgtggttctccagtctgccctgtgcactcccccgccacgcccagcccaagagggctgctttagggacagacctgggttgttacctgcctgtctctcccagcttcttccctccatgagtgcttattcacatatgccggcctcttgcgtaggggtctgtatcagccccagcaggcaggtggagtcctagaattctgaacctccagagcagaggagcttcccagggaagctgattggagattcagtgcatggctgggggttctgatggagctgtggctactgaaccacagccatcctgggaggctttctcccatcagttgtctcacacttagctgagtgaaaggcaccctgacagcatgtggtgacaggtgatgtgagggctgggtgagcacttgggaggcgctggctctgggagaggagaagatcccacttggctgacaccacggcaccaagagccaaactccatcgttgtcttcaccaccctgaccagagccttgtgctgtcatctaggaactggctgcccaaacaggaccctggcagcctccctgctgctgcggggattaccaggtgctgggaggcaacaagctttctaccttccagcctctccttagagacacctattggcagaacctgactaaatagcagtcagggaactgggttgcctccagccatacagaacagagagtaggacagtggggtggagctgagatggagaggcccacagccctcagcactgtaggctcccaaccctaggctgtttccccaaaaagaaaaagtctagtcactgctctgatgcttggccactcacccaagcattggggtagtttgtgctggcttcactgggcaccatcaggcacacccagcctgtagtttttgttttatattacctaagtcggccaggtgtggtgggatcacgcctgtaatcccagcacttagggaggctggggcgggcgaatcgcctgaggccaggaattcaagaccaacctggccaacattgtgaaaccctgtctctactaaaaatataaaaattagtcgggcatgatgacaggcacctgtaatcccagctactcaggaggctgaggcaggtgaatcacttgaacccgggaggtggaggctgcagtgagttaagattgtgccactgcactccagcctgggtaacagagcaagactctgtctcaaaaaatatatatgtgtgtgtgtgtgtgtgtatatatatgtacatgtgtatataagtatatatgtgtgtatatatgtatatatacacgtatatacacacacacccctaagtcatgattttggagcaattgtaagtggtgtagtgcttaattttggcattcacacattgattgttagcatatagaaatgggattgatttttatgtgatcttgctaaactttatgcatttttaaaattcctttggatttcctatgtagatatttatgtcctgaaaacaggaatgtatttatcctttcaaatcaatatgctttttattttgttatttatgaccacttcattaaaatataattcacatgccatacacttcacccatttaaaatgtataattaggccaggtgtggtggctcacgtctgtaatcccagcagtttgggaggccaaggccctcagatcttgagcccaggagttcaagaccaccctgggcaacaggcaaaaccctgtctctattttttaaaatacaagaattagccgcagtggcacgcacctgtcgtcccagcaacccaggaggctgaggtaggaggatcacttaagcctgggaagtcaagcctgcagtgaaccatgatagcaccactgcagtccagcctgggcgacagagtgagaccccatctcgaaaacaaaaatgtataattcagtggtttttagtctctttgcagatacatgcaaccatcaccacaatttgcacattttctaagcctcatatactgatgtgatattttggtgttttgtgactggcttcatttacttagcatattgttttcatgtttcattcatgtcgcatgtatgagtattcattcctttatttggctgaataatattccattatagtttgtgccacattttgtttatccattcatccattgatggacatgtggattgtttccaccttctggataatatgaactgatacagtttggatattttgtcccctccaaatctcatgaaataggatcaccagtgttggagaatggggcctgttaggaagtgtttggatcataggaacatctgtcataaatggcttggtgccatccttgtaatgagtgagttcttgctctatattagttcacttgaaagctggttgttgggaactcctgccctatctgttctgccctctctcgtcatgtgacatgcctgctccttgttcaccttctgtcatgagtaaaagcttcctaaggccttcccaggagccaagcagatgtcagtaccatgcttgtacagcctgcagaactgtgagccaaataaacttctttataaatta

SEQ ID NO: 294679 - DNA, 2616 bp, Homo sapiens
tcgtttccgccggcgctccgagtgacgtagggaagcgcgccgcgcacctcatggttccggggacagttagggcggcggatggaggtcagcggtggtgctcgctgcggtttggaatcacttgctaggagtcttgtctctctgccacccaggacatcatggcagctcacctggtaaagcgatgcacgtgcctcctgagagaagctgctcgtcaggcccctgccatggctccagttggccgactgagacttgcctgggtagcccataagactctgacttcctcagccacctcacccatttcccacctcccaggttccttgatggagccggtggagaaggaacgagcatctactccctacatagagaagcaggtggaccacctcatcaagaaggccacaaggccagaggagctcctggagctacttggtggcagtcacgacttggacagcaatcaagcagcaatggtacttatccggctctctcacttgctgtctgagaagccagaagataaaggcttgctcatacaggatgcccactttcatcaacttctctgtctgctcaacagtcagattgcctcggtctggcatggtaccctctcgaagctgctgggaagcctgtatgctctgggcatccccaaggcctccaaggagctgcagtcggtggagcaggaggtccgctggcgcatgcggaagctcaagtacaagcacctggccttcctggcagagtcctgtgccaccctctcacaggagcagcactcgcaggagctgctggctgagctgctcacacacctggaaaggcgttggacagaaattgaagattcccacacattagtgaccgtcatgatgaaggtgggacacctctcggagccactaatgaaccgcctggaagacaagtgcctggagttggtggagcactttggccccaatgagctgcggaaggtgctggtgatgctggcagctcagagccggcggtccgtgcccttgctgcgggccatctcctaccacctggtgcagaagcccttctctctgacgaaagatgtgctcttggacgtggcctatgcctatggcaaactcagctttcaccagacccaggtgtcccagcgcctggccaccgacctgctatccctcatgcccagcctgacttctggtgaggtggcccactgtgccaagtccttcgccttactcaagtggctcagcctgcccctgtttgaggcctttgcccagcacgtcctgaacagagcgcaggacatcaccctgccccacctgtgcagcgtacttctggcttttgcgcgtctgaacttccatccagaccaagaggatcagttcttcagcctggtacatgagaagctggggtcagagctgccaggcctggagccagccctgcaggtggacctggtgtgggccctgtgtgtgctgcagcaggcacgggaagcagagctgcaagccgtcctccaccctgaatttcacatccaatttctagggggcaagtctcagaaggatcagaacaccttccagaagctgctccacatcaacgccactgccctgctggagtaccccgagtactcgggtccccttctgcctgcctcggctgtggcccctgggccctcagcccttgacaggaaggtgacccccctgcaaaaggagctgcaggagacgctgaaggggctgctggggagcgccgacaagggcagcctcgaggtggccacgcagtatggctgggtgctggatgctgaggtgctgctggacagtgacggcgagtttctgcccgtaagggactttgtggcacctcaccttgcccagccaactgggagccagtcaccacctccagggtctaagaggctagcgttcttgcggtgggagttccccaacttcaacagccgaagcaaggacttgctgggtcgctttgttctggcccggcgacacatagtggctgcaggcttcctgatagtggacgtcccattctatgagtggctggaactcaagtctgaatggcagaaaggcgcctacctcaaggacaagatgcgcaaagcggtggctgaggagctggccaagtgacttgtgccagcagcatggactgcgtgcctctccgccggaggtctagctgtgggcggccaagaagggtcacccttgaggacaaacctctgtgcaggaccttggccagagtggggagggtggccagccactctgagggacagaacgtcctcttgtgtataataaacctttaattttggtgttggacccctggggccttcccaggcttggtcaccctctgcactgaaaaaaaaaaaaaaaaaaaaacgtttgcggggcggaggggaggggggaaagaggagcgcagggtgagagtgagccgcaggcttcgggaggcgagggggcggggggagcagcgccgaggccgccgcctccgcctccgccgcctaggactagggggtgggggacggacaagccccgatgccgggggagacggaagagccgagacccccggagcagcaggaccaggaagggggagaggcggccaaggcggctccggaggagccccaacaacggccccctgaggcggtcgcggcggcgcctgcagggaccactagcagccgcgtgctgaggggaggtcgggaccgag

SEQ ID NO: 294680 - DNA, 4771 bp, Homo sapiens
tcgtttccgccggcgctccgagtgacgtagggaagcgcgccgcgcacctcatggttccggggacagttagggcggcggatggagggtttggaatcacttgctaggagtcttgtctctctgccacccaggacatcatggcagctcacctggtaaagcgatgcacgtgcctcctgagagaagctgctcgtcaggcccctgccatggctccagttggccgactgagacttgcctgggtagcccataagactctgacttcctcagccacctcacccatttcccacctcccaggttccttgatggagccggtggagaaggaacgagcatctactccctacatagagaagcaggtggaccacctcatcaagaaggccacaaggccagaggagctcctggagctacttggtggcagtcacgacttggacagcaatcaagcagcaatggtacttatccggctctctcacttgctgtctgagaagccagaagataaaggcttgctcatacaggatgcccactttcatcaacttctctgtctgctcaacagtcagattgcctcggtctggcatggtaccctctcgaagctgctgggaagcctgtatgctctgggcatccccaaggcctccaaggagctgcagtcggtggagcaggaggtccgctggcgcatgcggaagctcaagtacaagcacctggccttcctggcagagtcctgtgccaccctctcacaggagcagcactcgcaggagctgctggctgagctgctcacacacctggaaaggcgttggacagaaattgaagattcccacacattagtgaccgtcatgatgaaggtgggacacctctcggagccactaatgaaccgcctggaagacaagtgcctggagttggtggagcactttggccccaatgagctgcggaaggtgctggtgatgctggcagctcagagccggcggtccgtgcccttgctgcgggccatctcctaccacctggtgcagaagcccttctctctgacgaaagatgtgctcttggacgtggcctatgcctatggcaaactcagctttcaccagacccaggtgtcccagcgcctggccaccgacctgctatccctcatgcccagcctgacttctggtgaggtggcccactgtgccaagtccttcgccttactcaagtggctcagcctgcccctgtttgaggcctttgcccagcacgtcctgaacagagcgcaggacatcaccctgccccacctgtgcagcgtacttctggcttttgcgcgtctgaacttccatccagaccaagaggatcagttcttcagcctggtacatgagaagctggggtcagagctgccaggcctggagccagccctgcaggtggacctggtgtgggccctgtgtgtgctgcagcaggcacgggaagcagagctgcaagccgtcctccaccctgaatttcacatccaatttctagggggcaagtctcagaaggatcagaacaccttccagaagctgctccacatcaacgccactgccctgctggagtaccccgagtactcgggtccccttctgcctgcctcggctgtggcccctgggccctcagcccttgacaggaaggtgacccccctgcaaaaggagctgcaggagacgctgaaggggctgctggggagcgccgacaagggcagcctcgaggtggccacgcagtatggctgggtgctggatgctgaggtgctgctggacagtgacggcgagtttctgcccgtaagggactttgtggcacctcaccttgcccagccaactgggagccagtcaccacctccagggtctaagaggctagcgttcttgcggtgggagttccccaacttcaacagccgaagcaaggacttgctgggtcgctttgttctggcccggcgacacatagtggctgcaggcttcctgatagtggacgtcccattctatgagtggctggaactcaagtctgaatggcagaaaggcgcctacctcaaggacaagatgcgcaaagcggtggctgaggagctggccaagtgacttgtgccagcagcatggactgcgtgcctctccgccggaggtctagctgtgggcggccaagaagggtcacccttgaggacaaacctctgtgcaggaccttggccagagtggggagggtggccagccactctgagggacagaacgtcctcttgtgtataataaacctttaattttggtgttggacccctggggccttcccaggcttggtcaccctctgcactgtcagcacttgtctgtctgctttgttgagcagggcgtggttctccagtctgccctgtgcactcccccgccacgcccagcccaagagggctgctttagggacagacctgggttgttacctgcctgtctctcccagcttcttccctccatgagtgcttattcacatatgccggcctcttgcgtaggggtctgtatcagccccagcaggcaggtggagtcctagaattctgaacctccagagcagaggagcttcccagggaagctgattggagattcagtgcatggctgggggttctgatggagctgtggctactgaaccacagccatcctgggaggctttctcccatcagttgtctcacacttagctgagtgaaaggcaccctgacagcatgtggtgacaggtgatgtgagggctgggtgagcacttgggaggcgctggctctgggagaggagaagatcccacttggctgacaccacggcaccaagagccaaactccatcgttgtcttcaccaccctgaccagagccttgtgctgtcatctaggaactggctgcccaaacaggaccctggcagcctccctgctgctgcggggattaccaggtgctgggaggcaacaagctttctaccttccagcctctccttagagacacctattggcagaacctgactaaatagcagtcagggaactgggttgcctccagccatacagaacagagagtaggacagtggggtggagctgagatggagaggcccacagccctcagcactgtaggctcccaaccctaggctgtttccccaaaaagaaaaagtctagtcactgctctgatgcttggccactcacccaagcattggggtagtttgtgctggcttcactgggcaccatcaggcacacccagcctgtagtttttgttttatattacctaagtcggccaggtgtggtgggatcacgcctgtaatcccagcacttagggaggctggggcgggcgaatcgcctgaggccaggaattcaagaccaacctggccaacattgtgaaaccctgtctctactaaaaatataaaaattagtcgggcatgatgacaggcacctgtaatcccagctactcaggaggctgaggcaggtgaatcacttgaacccgggaggtggaggctgcagtgagttaagattgtgccactgcactccagcctgggtaacagagcaagactctgtctcaaaaaatatatatgtgtgtgtgtgtgtgtgtatatatatgtacatgtgtatataagtatatatgtgtgtatatatgtatatatacacgtatatacacacacacccctaagtcatgattttggagcaattgtaagtggtgtagtgcttaattttggcattcacacattgattgttagcatatagaaatgggattgatttttatgtgatcttgctaaactttatgcatttttaaaattcctttggatttcctatgtagatatttatgtcctgaaaacaggaatgtatttatcctttcaaatcaatatgctttttattttgttatttatgaccacttcattaaaatataattcacatgccatacacttcacccatttaaaatgtataattaggccaggtgtggtggctcacgtctgtaatcccagcagtttgggaggccaaggccctcagatcttgagcccaggagttcaagaccaccctgggcaacaggcaaaaccctgtctctattttttaaaatacaagaattagccgcagtggcacgcacctgtcgtcccagcaacccaggaggctgaggtaggaggatcacttaagcctgggaagtcaagcctgcagtgaaccatgatagcaccactgcagtccagcctgggcgacagagtgagaccccatctcgaaaacaaaaatgtataattcagtggtttttagtctctttgcagatacatgcaaccatcaccacaatttgcacattttctaagcctcatatactgatgtgatattttggtgttttgtgactggcttcatttacttagcatattgttttcatgtttcattcatgtcgcatgtatgagtattcattcctttatttggctgaataatattccattatagtttgtgccacattttgtttatccattcatccattgatggacatgtggattgtttccaccttctggataatatgaactgatacagtttggatattttgtcccctccaaatctcatgaaataggatcaccagtgttggagaatggggcctgttaggaagtgtttggatcataggaacatctgtcataaatggcttggtgccatccttgtaatgagtgagttcttgctctatattagttcacttgaaagctggttgttgggaactcctgccctatctgttctgccctctctcgtcatgtgacatgcctgctccttgttcaccttctgtcatgagtaaaagcttcctaaggccttcccaggagccaagcagatgtcagtaccatgcttgtacagcctgcagaactgtgagccaaataaacttctttataaatta

SEQ ID NO: 294681 - DNA, 4770 bp, Homo sapiens
tcgtttccgccggcgctccgagtgacgtagggaagcgcgccgcgcacctcatggttccggggacagttagggcggcggatggaggtcagcggtggtgctcgctgcggtttggaatcacttgctaggagtcttgtctctctgccacccaggacatcatggcagctcacctggtaaagcgatgcacgtgcctcctgagagaagctgctcgtcaggcccctgccatggctccagttggccgactgagacttgcctgggtagcccataagactctgacttcctcagccacctcacccatttcccacctcccaggttccttgatggagccggtggagaaggaacgagcatctactccctacatagagaagcaggtggaccacctcatcaagaaggccacaaggccagaggagctcctggagctacttggtggcagtcacgacttggacagcaatcaagcagcaatggtacttatccggctctctcacttgctgtctgagaagccagaagataaaggcttgctcatacaggatgcccactttcatcaacttctctgtctgctcaacagtcagattgcctcggtctggcatggtaccctctcgaagctgctgggaagcctgtatgctctgggcatccccaaggcctccaaggagctgcagtcggtggagcaggaggtccgctggcgcatgcggaagctcaagtacaagcacctggccttcctggcagagtcctgtgccaccctctcacaggagcagcactcgcaggagctgctggctgagctgctcacacacctggaaaggcgttggacagaaattgaagattcccacacattagtgaccgtcatgatgaaggtgggacacctctcggagccactaatgaaccgcctggaagacaagtgcctggagttggtggagcactttggccccaatgagctgcggaaggtgctggtgatgctggcagctcagagccggcggtccgtgcccttgctgcgggccatctcctaccacctggtgcagaagcccttctctctgacgaaagatgtgctcttggacgtggcctatgcctatggcaaactcagctttcaccagacccaggtgtcccagcgcctggccaccgacctgctatccctcatgcccagcctgacttctggtgaggtggcccactgtgccaagtccttcgccttactcaagtggctcagcctgcccctgtttgaggcctttgcccagcacgtcctgaacagagcgcaggacatcaccctgccccacctgtgcagcgtacttctggcttttgcgcgtctgaacttccatccagaccaagaggatcagttcttcagcctggtacatgagaagctggggtcagagctgccaggcctggagccagccctgcaggtggacctggtgtgggccctgtgtgtgctgcagcaggcacgggaagcagagctgcaagccgtcctccaccctgaatttcacatccaatttctagggggcaagtctcagaaggatcagaacaccttccagaagctgctccacatcaacgccactgccctgctggagtaccccgagtactcgggtccccttctgcctgcctcggctgtggcccctgggccctcagcccttgacaggaaggtgacccccctgcaaaaggagctgcaggagacgctgaaggggctgctggggagcgccgacaagggcagcctcgaggtggccacgcagtatggctgggtgctggatgctgaggtgctgctggacagtgacggcgagtttctgcccgtaagggactttgtggcacctcaccttgcccagccaactgggagccagtcaccacctccagggtctaagaggctagcgttcttgcggtgggagttccccaacttcaacagccgaagcaaggacttgctgggtcgctttgttctggcccggcgacacatagtggctgcaggcttcctgatagtggacgtcccattctatgagtggctggaactcaagtctgaatggcagaaaggcgcctacctcaaggacaagatgcgcaaagcggtggctgaggagctggccaagtgacttgtgccagcagcatggactgcgtgcctctccgccggaggtctagctgtgggcggccaagaagggtcacccttgaggacaaacctctgtgcaggaccttggccactctgagggacagaacgtcctcttgtgtataataaacctttaattttggtgttggacccctggggccttcccaggcttggtcaccctctgcactgtcagcacttgtctgtctgctttgttgagcagggcgtggttctccagtctgccctgtgcactcccccgccacgcccagcccaagagggctgctttagggacagacctgggttgttacctgcctgtctctcccagcttcttccctccatgagtgcttattcacatatgccggcctcttgcgtaggggtctgtatcagccccagcaggcaggtggagtcctagaattctgaacctccagagcagaggagcttcccagggaagctgattggagattcagtgcatggctgggggttctgatggagctgtggctactgaaccacagccatcctgggaggctttctcccatcagttgtctcacacttagctgagtgaaaggcaccctgacagcatgtggtgacaggtgatgtgagggctgggtgagcacttgggaggcgctggctctgggagaggagaagatcccacttggctgacaccacggcaccaagagccaaactccatcgttgtcttcaccaccctgaccagagccttgtgctgtcatctaggaactggctgcccaaacaggaccctggcagcctccctgctgctgcggggattaccaggtgctgggaggcaacaagctttctaccttccagcctctccttagagacacctattggcagaacctgactaaatagcagtcagggaactgggttgcctccagccatacagaacagagagtaggacagtggggtggagctgagatggagaggcccacagccctcagcactgtaggctcccaaccctaggctgtttccccaaaaagaaaaagtctagtcactgctctgatgcttggccactcacccaagcattggggtagtttgtgctggcttcactgggcaccatcaggcacacccagcctgtagtttttgttttatattacctaagtcggccaggtgtggtgggatcacgcctgtaatcccagcacttagggaggctggggcgggcgaatcgcctgaggccaggaattcaagaccaacctggccaacattgtgaaaccctgtctctactaaaaatataaaaattagtcgggcatgatgacaggcacctgtaatcccagctactcaggaggctgaggcaggtgaatcacttgaacccgggaggtggaggctgcagtgagttaagattgtgccactgcactccagcctgggtaacagagcaagactctgtctcaaaaaatatatatgtgtgtgtgtgtgtgtgtatatatatgtacatgtgtatataagtatatatgtgtgtatatatgtatatatacacgtatatacacacacacccctaagtcatgattttggagcaattgtaagtggtgtagtgcttaattttggcattcacacattgattgttagcatatagaaatgggattgatttttatgtgatcttgctaaactttatgcatttttaaaattcctttggatttcctatgtagatatttatgtcctgaaaacaggaatgtatttatcctttcaaatcaatatgctttttattttgttatttatgaccacttcattaaaatataattcacatgccatacacttcacccatttaaaatgtataattaggccaggtgtggtggctcacgtctgtaatcccagcagtttgggaggccaaggccctcagatcttgagcccaggagttcaagaccaccctgggcaacaggcaaaaccctgtctctattttttaaaatacaagaattagccgcagtggcacgcacctgtcgtcccagcaacccaggaggctgaggtaggaggatcacttaagcctgggaagtcaagcctgcagtgaaccatgatagcaccactgcagtccagcctgggcgacagagtgagaccccatctcgaaaacaaaaatgtataattcagtggtttttagtctctttgcagatacatgcaaccatcaccacaatttgcacattttctaagcctcatatactgatgtgatattttggtgttttgtgactggcttcatttacttagcatattgttttcatgtttcattcatgtcgcatgtatgagtattcattcctttatttggctgaataatattccattatagtttgtgccacattttgtttatccattcatccattgatggacatgtggattgtttccaccttctggataatatgaactgatacagtttggatattttgtcccctccaaatctcatgaaataggatcaccagtgttggagaatggggcctgttaggaagtgtttggatcataggaacatctgtcataaatggcttggtgccatccttgtaatgagtgagttcttgctctatattagttcacttgaaagctggttgttgggaactcctgccctatctgttctgccctctctcgtcatgtgacatgcctgctccttgttcaccttctgtcatgagtaaaagcttcctaaggccttcccaggagccaagcagatgtcagtaccatgcttgtacagcctgcagaactgtgagccaaataaacttctttataaatta

SEQ ID NO: 294682 - DNA, 4764 bp, Homo sapiens
tcgtttccgccggcgctccgagtgacgtagggaagcgcgccgcgcacctcatggttccggggacagttagggcggcggatggaggtcagcggtggtgctcgctgcggtttggaatcacttgctaggagtcttgtctctctgccacccaggacatcatggcagctcacctggtaaagcgatgcacgtgcctcctgagagaagctgctcgtcaggcccctgccatggctccagttggccgactgagacttgcctgggtagcccataagactctgacttcctcagccacctcacccatttcccacctcccaggttccttgatggagccggtggagaaggaacgagcatctactccctacatagagaagcaggtggaccacctcatcaagaaggccacaaggccagaggagctcctggagctacttggtggcagtcacgacttggacagcaatcaagcagcaatggtacttatccggctctctcacttgctgtctgagaagccagaagataaaggcttgctcatacaggatgcccactttcatcaacttctctgtctgctcaacagtcagattgcctcggtctggcatggtaccctctcgaagctgctgggaagcctgtatgctctgggcatccccaaggcctccaaggagctgcagtcggtggagcaggaggtccgctggcgcatgcggaagctcaagtacaagcacctggccttcctggcagagtcctgtgccaccctctcacaggagcagcactcgcaggagctgctggctgagctgctcacacacctggaaaggcgttggacagaaattgaagattcccacacattagtgaccgtcatgatgaaggtgggacacctctcggagccactaatgaaccgcctggaagacaagtgcctggagttggtggagcactttggccccaatgagctgcggaaggtgctggtgatgctggcagctcagagccggcggtccgtgcccttgctgcgggccatctcctaccacctggtgcagaagcccttctctctgacgaaagatgtgctcttggacgtggcctatgcctatggcaaactcagctttcaccagacccaggtgtcccagcgcctggccaccgacctgctatccctcatgcccagcctgacttctggtgaggtggcccactgtgccaagtccttcgccttactcaagtggctcagcctgcccctgtttgaggcctttgcccagcacgtcctgaacagagcgcaggacatcaccctgccccacctgtgcagcgtacttctggcttttgcgcgtctgaacttccatccagaccaagaggatcagttcttcagcctggtacatgagaagctggggtcagagctgccaggcctggagccagccctgcaggtggacctggtgtgggccctgtgtgtgctgcagcaggcacgggaagcagagctgcaagccgtcctccaccctgaatttcacatccaatttctagggggcaagtctcagaaggatcagaacaccttccagaagctgctccacatcaacgccactgccctgctggagtaccccgagtactcgggtccccttctgcctgcctcggctgtggcccctgggccctcagcccttgacaggaaggtgacccccctgcaaaaggagctgcaggagacgctgaaggggctgctggggagcgccgacaagggcagcctcgagatgctgaggtgctgctggacagtgacggcgagtttctgcccgtaagggactttgtggcacctcaccttgcccagccaactgggagccagtcaccacctccagggtctaagaggctagcgttcttgcggtgggagttccccaacttcaacagccgaagcaaggacttgctgggtcgctttgttctggcccggcgacacatagtggctgcaggcttcctgatagtggacgtcccattctatgagtggctggaactcaagtctgaatggcagaaaggcgcctacctcaaggacaagatgcgcaaagcggtggctgaggagctggccaagtgacttgtgccagcagcatggactgcgtgcctctccgccggaggtctagctgtgggcggccaagaagggtcacccttgaggacaaacctctgtgcaggaccttggccagagtggggagggtggccagccactctgagggacagaacgtcctcttgtgtataataaacctttaattttggtgttggacccctggggccttcccaggcttggtcaccctctgcactgtcagcacttgtctgtctgctttgttgagcagggcgtggttctccagtctgccctgtgcactcccccgccacgcccagcccaagagggctgctttagggacagacctgggttgttacctgcctgtctctcccagcttcttccctccatgagtgcttattcacatatgccggcctcttgcgtaggggtctgtatcagccccagcaggcaggtggagtcctagaattctgaacctccagagcagaggagcttcccagggaagctgattggagattcagtgcatggctgggggttctgatggagctgtggctactgaaccacagccatcctgggaggctttctcccatcagttgtctcacacttagctgagtgaaaggcaccctgacagcatgtggtgacaggtgatgtgagggctgggtgagcacttgggaggcgctggctctgggagaggagaagatcccacttggctgacaccacggcaccaagagccaaactccatcgttgtcttcaccaccctgaccagagccttgtgctgtcatctaggaactggctgcccaaacaggaccctggcagcctccctgctgctgcggggattaccaggtgctgggaggcaacaagctttctaccttccagcctctccttagagacacctattggcagaacctgactaaatagcagtcagggaactgggttgcctccagccatacagaacagagagtaggacagtggggtggagctgagatggagaggcccacagccctcagcactgtaggctcccaaccctaggctgtttccccaaaaagaaaaagtctagtcactgctctgatgcttggccactcacccaagcattggggtagtttgtgctggcttcactgggcaccatcaggcacacccagcctgtagtttttgttttatattacctaagtcggccaggtgtggtgggatcacgcctgtaatcccagcacttagggaggctggggcgggcgaatcgcctgaggccaggaattcaagaccaacctggccaacattgtgaaaccctgtctctactaaaaatataaaaattagtcgggcatgatgacaggcacctgtaatcccagctactcaggaggctgaggcaggtgaatcacttgaacccgggaggtggaggctgcagtgagttaagattgtgccactgcactccagcctgggtaacagagcaagactctgtctcaaaaaatatatatgtgtgtgtgtgtgtgtgtatatatatgtacatgtgtatataagtatatatgtgtgtatatatgtatatatacacgtatatacacacacacccctaagtcatgattttggagcaattgtaagtggtgtagtgcttaattttggcattcacacattgattgttagcatatagaaatgggattgatttttatgtgatcttgctaaactttatgcatttttaaaattcctttggatttcctatgtagatatttatgtcctgaaaacaggaatgtatttatcctttcaaatcaatatgctttttattttgttatttatgaccacttcattaaaatataattcacatgccatacacttcacccatttaaaatgtataattaggccaggtgtggtggctcacgtctgtaatcccagcagtttgggaggccaaggccctcagatcttgagcccaggagttcaagaccaccctgggcaacaggcaaaaccctgtctctattttttaaaatacaagaattagccgcagtggcacgcacctgtcgtcccagcaacccaggaggctgaggtaggaggatcacttaagcctgggaagtcaagcctgcagtgaaccatgatagcaccactgcagtccagcctgggcgacagagtgagaccccatctcgaaaacaaaaatgtataattcagtggtttttagtctctttgcagatacatgcaaccatcaccacaatttgcacattttctaagcctcatatactgatgtgatattttggtgttttgtgactggcttcatttacttagcatattgttttcatgtttcattcatgtcgcatgtatgagtattcattcctttatttggctgaataatattccattatagtttgtgccacattttgtttatccattcatccattgatggacatgtggattgtttccaccttctggataatatgaactgatacagtttggatattttgtcccctccaaatctcatgaaataggatcaccagtgttggagaatggggcctgttaggaagtgtttggatcataggaacatctgtcataaatggcttggtgccatccttgtaatgagtgagttcttgctctatattagttcacttgaaagctggttgttgggaactcctgccctatctgttctgccctctctcgtcatgtgacatgcctgctccttgttcaccttctgtcatgagtaaaagcttcctaaggccttcccaggagccaagcagatgtcagtaccatgcttgtacagcctgcagaactgtgagccaaataaacttctttataaatta

SEQ ID NO: 294683 - DNA, 4741 bp, Homo sapiens
cgccgcccctgttgaccgtccatgaccccagcgagccagttttcgtgacttagtggtttggaatcacttgctaggagtcttgtctctctgccacccaggacatcatggcagctcacctggtaaagcgatgcacgtgcctcctgagagaagctgctcgtcaggcccctgccatggctccagttggccgactgagacttgcctgggtagcccataagactctgacttcctcagccacctcacccatttcccacctcccaggttccttgatggagccggtggagaaggaacgagcatctactccctacatagagaagcaggtggaccacctcatcaagaaggccacaaggccagaggagctcctggagctacttggtggcagtcacgacttggacagcaatcaagcagcaatggtacttatccggctctctcacttgctgtctgagaagccagaagataaaggcttgctcatacaggatgcccactttcatcaacttctctgtctgctcaacagtcagattgcctcggtctggcatggtaccctctcgaagctgctgggaagcctgtatgctctgggcatccccaaggcctccaaggagctgcagtcggtggagcaggaggtccgctggcgcatgcggaagctcaagtacaagcacctggccttcctggcagagtcctgtgccaccctctcacaggagcagcactcgcaggagctgctggctgagctgctcacacacctggaaaggcgttggacagaaattgaagattcccacacattagtgaccgtcatgatgaaggtgggacacctctcggagccactaatgaaccgcctggaagacaagtgcctggagttggtggagcactttggccccaatgagctgcggaaggtgctggtgatgctggcagctcagagccggcggtccgtgcccttgctgcgggccatctcctaccacctggtgcagaagcccttctctctgacgaaagatgtgctcttggacgtggcctatgcctatggcaaactcagctttcaccagacccaggtgtcccagcgcctggccaccgacctgctatccctcatgcccagcctgacttctggtgaggtggcccactgtgccaagtccttcgccttactcaagtggctcagcctgcccctgtttgaggcctttgcccagcacgtcctgaacagagcgcaggacatcaccctgccccacctgtgcagcgtacttctggcttttgcgcgtctgaacttccatccagaccaagaggatcagttcttcagcctggtacatgagaagctggggtcagagctgccaggcctggagccagccctgcaggtggacctggtgtgggccctgtgtgtgctgcagcaggcacgggaagcagagctgcaagccgtcctccaccctgaatttcacatccaatttctagggggcaagtctcagaaggatcagaacaccttccagaagctgctccacatcaacgccactgccctgctggagtaccccgagtactcgggtccccttctgcctgcctcggctgtggcccctgggccctcagcccttgacaggaaggtgacccccctgcaaaaggagctgcaggagacgctgaaggggctgctggggagcgccgacaagggcagcctcgaggtggccacgcagtatggctgggtgctggatgctgaggtgctgctggacagtgacggcgagtttctgcccgtaagggactttgtggcacctcaccttgcccagccaactgggagccagtcaccacctccagggtctaagaggctagcgttcttgcggtgggagttccccaacttcaacagccgaagcaaggacttgctgggtcgctttgttctggcccggcgacacatagtggctgcaggcttcctgatagtggacgtcccattctatgagtggctggaactcaagtctgaatggcagaaaggcgcctacctcaaggacaagatgcgcaaagcggtggctgaggagctggccaagtgacttgtgccagcagcatggactgcgtgcctctccgccggaggtctagctgtgggcggccaagaagggtcacccttgaggacaaacctctgtgcaggaccttggccagagtggggagggtggccagccactctgagggacagaacgtcctcttgtgtataataaacctttaattttggtgttggacccctggggccttcccaggcttggtcaccctctgcactgtcagcacttgtctgtctgctttgttgagcagggcgtggttctccagtctgccctgtgcactcccccgccacgcccagcccaagagggctgctttagggacagacctgggttgttacctgcctgtctctcccagcttcttccctccatgagtgcttattcacatatgccggcctcttgcgtaggggtctgtatcagccccagcaggcaggtggagtcctagaattctgaacctccagagcagaggagcttcccagggaagctgattggagattcagtgcatggctgggggttctgatggagctgtggctactgaaccacagccatcctgggaggctttctcccatcagttgtctcacacttagctgagtgaaaggcaccctgacagcatgtggtgacaggtgatgtgagggctgggtgagcacttgggaggcgctggctctgggagaggagaagatcccacttggctgacaccacggcaccaagagccaaactccatcgttgtcttcaccaccctgaccagagccttgtgctgtcatctaggaactggctgcccaaacaggaccctggcagcctccctgctgctgcggggattaccaggtgctgggaggcaacaagctttctaccttccagcctctccttagagacacctattggcagaacctgactaaatagcagtcagggaactgggttgcctccagccatacagaacagagagtaggacagtggggtggagctgagatggagaggcccacagccctcagcactgtaggctcccaaccctaggctgtttccccaaaaagaaaaagtctagtcactgctctgatgcttggccactcacccaagcattggggtagtttgtgctggcttcactgggcaccatcaggcacacccagcctgtagtttttgttttatattacctaagtcggccaggtgtggtgggatcacgcctgtaatcccagcacttagggaggctggggcgggcgaatcgcctgaggccaggaattcaagaccaacctggccaacattgtgaaaccctgtctctactaaaaatataaaaattagtcgggcatgatgacaggcacctgtaatcccagctactcaggaggctgaggcaggtgaatcacttgaacccgggaggtggaggctgcagtgagttaagattgtgccactgcactccagcctgggtaacagagcaagactctgtctcaaaaaatatatatgtgtgtgtgtgtgtgtgtatatatatgtacatgtgtatataagtatatatgtgtgtatatatgtatatatacacgtatatacacacacacccctaagtcatgattttggagcaattgtaagtggtgtagtgcttaattttggcattcacacattgattgttagcatatagaaatgggattgatttttatgtgatcttgctaaactttatgcatttttaaaattcctttggatttcctatgtagatatttatgtcctgaaaacaggaatgtatttatcctttcaaatcaatatgctttttattttgttatttatgaccacttcattaaaatataattcacatgccatacacttcacccatttaaaatgtataattaggccaggtgtggtggctcacgtctgtaatcccagcagtttgggaggccaaggccctcagatcttgagcccaggagttcaagaccaccctgggcaacaggcaaaaccctgtctctattttttaaaatacaagaattagccgcagtggcacgcacctgtcgtcccagcaacccaggaggctgaggtaggaggatcacttaagcctgggaagtcaagcctgcagtgaaccatgatagcaccactgcagtccagcctgggcgacagagtgagaccccatctcgaaaacaaaaatgtataattcagtggtttttagtctctttgcagatacatgcaaccatcaccacaatttgcacattttctaagcctcatatactgatgtgatattttggtgttttgtgactggcttcatttacttagcatattgttttcatgtttcattcatgtcgcatgtatgagtattcattcctttatttggctgaataatattccattatagtttgtgccacattttgtttatccattcatccattgatggacatgtggattgtttccaccttctggataatatgaactgatacagtttggatattttgtcccctccaaatctcatgaaataggatcaccagtgttggagaatggggcctgttaggaagtgtttggatcataggaacatctgtcataaatggcttggtgccatccttgtaatgagtgagttcttgctctatattagttcacttgaaagctggttgttgggaactcctgccctatctgttctgccctctctcgtcatgtgacatgcctgctccttgttcaccttctgtcatgagtaaaagcttcctaaggccttcccaggagccaagcagatgtcagtaccatgcttgtacagcctgcagaactgtgagccaaataaacttctttataaatta

SEQ ID NO: 294684 - DNA, 4441 bp, Homo sapiens
tcgtttccgccggcgctccgagtgacgtagggaagcgcgccgcgcacctcatggttccggggacagttagggcggcggatggagggtttggaatcacttgctaggagtcttgtctctctgccacccaggacatcatggcagctcacctggtaaagcgatgcacgtgcctcctgagagaagctgctcgtcaggcccctgccatggctccagttggccgactgagacttgcctgggtagcccataagactctgacttcctcagccacctcacccatttcccacctcccaggttccttgatggagccggtggagaaggaacgagcatctactccctacatagagaagcaggtggaccacctcatcaagaaggccacaaggccagaggagctcctggagctacttggtggcagtcacgacttggacagcaatcaagcagcaatggtacttatccggctctctcacttgctgtctgagaagccagaagataaaggcttgctcatacaggatgcccactttcatcaacttctctgtctgctcaacagtcagattgcctcggtctggcatggtaccctctcgaagctgctgggaagcctgtatgctctgggcatccccaaggcctccaaggagctgcagtcggtggagcaggaggtccgctggcgcatgcggaagctcaagtacaagcacctggccttcctggcagagtcctgtgccaccctctcacaggagcagcactcgcaggagctgctggctgagctgctcacacacctggaaaggcgttggacagaaattgaagattcccacacattagtgaccgtcatgatgaaggtgggacacctctcggagccactaatgaaccgcctggaagacaagcacgtcctgaacagagcgcaggacatcaccctgccccacctgtgcagcgtacttctggcttttgcgcgtctgaacttccatccagaccaagaggatcagttcttcagcctggtacatgagaagctggggtcagagctgccaggcctggagccagccctgcaggtggacctggtgtgggccctgtgtgtgctgcagcaggcacgggaagcagagctgcaagccgtcctccaccctgaatttcacatccaatttctagggggcaagtctcagaaggatcagaacaccttccagaagctgctccacatcaacgccactgccctgctggagtaccccgagtactcgggtccccttctgcctgcctcggctgtggcccctgggccctcagcccttgacaggaaggtgacccccctgcaaaaggagctgcaggagacgctgaaggggctgctggggagcgccgacaagggcagcctcgaggtggccacgcagtatggctgggtgctggatgctgaggtgctgctggacagtgacggcgagtttctgcccgtaagggactttgtggcacctcaccttgcccagccaactgggagccagtcaccacctccagggtctaagaggctagcgttcttgcggtgggagttccccaacttcaacagccgaagcaaggacttgctgggtcgctttgttctggcccggcgacacatagtggctgcaggcttcctgatagtggacgtcccattctatgagtggctggaactcaagtctgaatggcagaaaggcgcctacctcaaggacaagatgcgcaaagcggtggctgaggagctggccaagtgacttgtgccagcagcatggactgcgtgcctctccgccggaggtctagctgtgggcggccaagaagggtcacccttgaggacaaacctctgtgcaggaccttggccagagtggggagggtggccagccactctgagggacagaacgtcctcttgtgtataataaacctttaattttggtgttggacccctggggccttcccaggcttggtcaccctctgcactgtcagcacttgtctgtctgctttgttgagcagggcgtggttctccagtctgccctgtgcactcccccgccacgcccagcccaagagggctgctttagggacagacctgggttgttacctgcctgtctctcccagcttcttccctccatgagtgcttattcacatatgccggcctcttgcgtaggggtctgtatcagccccagcaggcaggtggagtcctagaattctgaacctccagagcagaggagcttcccagggaagctgattggagattcagtgcatggctgggggttctgatggagctgtggctactgaaccacagccatcctgggaggctttctcccatcagttgtctcacacttagctgagtgaaaggcaccctgacagcatgtggtgacaggtgatgtgagggctgggtgagcacttgggaggcgctggctctgggagaggagaagatcccacttggctgacaccacggcaccaagagccaaactccatcgttgtcttcaccaccctgaccagagccttgtgctgtcatctaggaactggctgcccaaacaggaccctggcagcctccctgctgctgcggggattaccaggtgctgggaggcaacaagctttctaccttccagcctctccttagagacacctattggcagaacctgactaaatagcagtcagggaactgggttgcctccagccatacagaacagagagtaggacagtggggtggagctgagatggagaggcccacagccctcagcactgtaggctcccaaccctaggctgtttccccaaaaagaaaaagtctagtcactgctctgatgcttggccactcacccaagcattggggtagtttgtgctggcttcactgggcaccatcaggcacacccagcctgtagtttttgttttatattacctaagtcggccaggtgtggtgggatcacgcctgtaatcccagcacttagggaggctggggcgggcgaatcgcctgaggccaggaattcaagaccaacctggccaacattgtgaaaccctgtctctactaaaaatataaaaattagtcgggcatgatgacaggcacctgtaatcccagctactcaggaggctgaggcaggtgaatcacttgaacccgggaggtggaggctgcagtgagttaagattgtgccactgcactccagcctgggtaacagagcaagactctgtctcaaaaaatatatatgtgtgtgtgtgtgtgtgtatatatatgtacatgtgtatataagtatatatgtgtgtatatatgtatatatacacgtatatacacacacacccctaagtcatgattttggagcaattgtaagtggtgtagtgcttaattttggcattcacacattgattgttagcatatagaaatgggattgatttttatgtgatcttgctaaactttatgcatttttaaaattcctttggatttcctatgtagatatttatgtcctgaaaacaggaatgtatttatcctttcaaatcaatatgctttttattttgttatttatgaccacttcattaaaatataattcacatgccatacacttcacccatttaaaatgtataattaggccaggtgtggtggctcacgtctgtaatcccagcagtttgggaggccaaggccctcagatcttgagcccaggagttcaagaccaccctgggcaacaggcaaaaccctgtctctattttttaaaatacaagaattagccgcagtggcacgcacctgtcgtcccagcaacccaggaggctgaggtaggaggatcacttaagcctgggaagtcaagcctgcagtgaaccatgatagcaccactgcagtccagcctgggcgacagagtgagaccccatctcgaaaacaaaaatgtataattcagtggtttttagtctctttgcagatacatgcaaccatcaccacaatttgcacattttctaagcctcatatactgatgtgatattttggtgttttgtgactggcttcatttacttagcatattgttttcatgtttcattcatgtcgcatgtatgagtattcattcctttatttggctgaataatattccattatagtttgtgccacattttgtttatccattcatccattgatggacatgtggattgtttccaccttctggataatatgaactgatacagtttggatattttgtcccctccaaatctcatgaaataggatcaccagtgttggagaatggggcctgttaggaagtgtttggatcataggaacatctgtcataaatggcttggtgccatccttgtaatgagtgagttcttgctctatattagttcacttgaaagctggttgttgggaactcctgccctatctgttctgccctctctcgtcatgtgacatgcctgctccttgttcaccttctgtcatgagtaaaagcttcctaaggccttcccaggagccaagcagatgtcagtaccatgcttgtacagcctgcagaactgtgagccaaataaacttctttataaatta

SEQ ID NO: 294685 - DNA, 4776 bp, Homo sapiens
tcgtttccgccggcgctccgagtgacgtagggaagcgcgccgcgcacctcatggttccggggacagttagggcggcggatggaggtcagcggtggtgctcgctgcggtttggaatcacttgctaggagtcttgtctctctgccacccaggacatcatggcagctcacctggtaaagcgatgcacgtgcctcctgagagaagctgctcgtcaggcccctgccatggctccagttggccgactgagacttgcctgggtagcccataagactctgacttcctcagccacctcacccatttcccacctcccaggttccttgatggagccggtggagaaggaacgagcatctactccctacatagagaagcaggtggaccacctcatcaagaaggccacaaggccagaggagctcctggagctacttggtggcagtcacgacttggacagcaatcaagcagcaatggtacttatccggctctctcacttgctgtctgagaagccagaagataaaggcttgctcatacaggatgcccactttcatcaacttctctgtctgctcaacagtcagattgcctcggtctggcatggtaccctctcgaagctgctgggaagcctgtatgctctgggcatccccaaggcctccaaggagctgcagtcggtggagcaggaggtccgctggcgcatgcggaagctcaagtacaagcacctggccttcctggcagagtcctgtgccaccctctcacaggagcagcactcgcaggagctgctggctgagctgctcacacacctggaaaggcgttggacagaaattgaagattcccacacattagtgaccgtcatgatgaaggtgggacacctctcggagccactaatgaaccgcctggaagacaagtgcctggagttggtggagcactttggccccaatgagctgcggaaggtgctggtgatgctggcagctcagagccggcggtccgtgcccttgctgcgggccatctcctaccacctggtgcagaagcccttctctctgacgaaagatgtgctcttggacgtggcctatgcctatggcaaactcagctttcaccagacccaggtgtcccagcgcctggccaccgacctgctatccctcatgcccagcctgacttctggtgaggtggcccactgtgccaagtccttcgccttactcaagtggctcagcctgcccctgtttgaggcctttgcccagcacgtcctgaacagagcgcaggacatcaccctgccccacctgtgcagcgtacttctggcttttgcgcgtctgaacttccatccagaccaagaggatcagttcttcagcctggtacatgagaagctggggtcagagctgccaggcctggagccagccctgcaggtggacctggtgtgggccctgtgtgtgctgcagcaggcacgggaagcagagctgcaagccgtcctccaccctgaatttcacatccaatttctagggggcaagtctcagaaggatcagaacaccttccagaagctgctccacatcaacgccactgccctgctggagtaccccgagtactcgggtccccttctgcctgcctcggctgtggcccctgggccctcagcccttgacaggaaggtgacccccctgcaaaaggagctgcaggagacgctgaaggggctgctggggagcgccgacaagggcagcctcgaggtggccacgcagtatggctgggtgctgggtgagggctccccctggttggcacagggcctggcattgcctgagtctaacgggactcttctaacccaccccgtctgcagcaagtactgacctagggagctgcagggtgtcagcctgggctccccacagtcccatctttgttcatctttcctgtgggggggtttctgagggatgtcccccaacatgttctcatcccacaccccttccccagatgctgaggtgctgctggacagtgacggcgagtttctgcccgtaagggactttgtggcacctcaccttgcccagccaactgggagccagtcaccacctccagggtctaagaggctagcgttcttgcggtgggagttccccaacttcaacagccgaagcaaggacttgctgggtcgctttgttctggcccggcgacacatagtggctgcaggcttcctgatagtggacccactctgagggacagaacgtcctcttgtgtataataaacctttaattttggtgttggacccctggggccttcccaggcttggtcaccctctgcactgtcagcacttgtctgtctgctttgttgagcagggcgtggttctccagtctgccctgtgcactcccccgccacgcccagcccaagagggctgctttagggacagacctgggttgttacctgcctgtctctcccagcttcttccctccatgagtgcttattcacatatgccggcctcttgcgtaggggtctgtatcagccccagcaggcaggtggagtcctagaattctgaacctccagagcagaggagcttcccagggaagctgattggagattcagtgcatggctgggggttctgatggagctgtggctactgaaccacagccatcctgggaggctttctcccatcagttgtctcacacttagctgagtgaaaggcaccctgacagcatgtggtgacaggtgatgtgagggctgggtgagcacttgggaggcgctggctctgggagaggagaagatcccacttggctgacaccacggcaccaagagccaaactccatcgttgtcttcaccaccctgaccagagccttgtgctgtcatctaggaactggctgcccaaacaggaccctggcagcctccctgctgctgcggggattaccaggtgctgggaggcaacaagctttctaccttccagcctctccttagagacacctattggcagaacctgactaaatagcagtcagggaactgggttgcctccagccatacagaacagagagtaggacagtggggtggagctgagatggagaggcccacagccctcagcactgtaggctcccaaccctaggctgtttccccaaaaagaaaaagtctagtcactgctctgatgcttggccactcacccaagcattggggtagtttgtgctggcttcactgggcaccatcaggcacacccagcctgtagtttttgttttatattacctaagtcggccaggtgtggtgggatcacgcctgtaatcccagcacttagggaggctggggcgggcgaatcgcctgaggccaggaattcaagaccaacctggccaacattgtgaaaccctgtctctactaaaaatataaaaattagtcgggcatgatgacaggcacctgtaatcccagctactcaggaggctgaggcaggtgaatcacttgaacccgggaggtggaggctgcagtgagttaagattgtgccactgcactccagcctgggtaacagagcaagactctgtctcaaaaaatatatatgtgtgtgtgtgtgtgtgtatatatatgtacatgtgtatataagtatatatgtgtgtatatatgtatatatacacgtatatacacacacacccctaagtcatgattttggagcaattgtaagtggtgtagtgcttaattttggcattcacacattgattgttagcatatagaaatgggattgatttttatgtgatcttgctaaactttatgcatttttaaaattcctttggatttcctatgtagatatttatgtcctgaaaacaggaatgtatttatcctttcaaatcaatatgctttttattttgttatttatgaccacttcattaaaatataattcacatgccatacacttcacccatttaaaatgtataattaggccaggtgtggtggctcacgtctgtaatcccagcagtttgggaggccaaggccctcagatcttgagcccaggagttcaagaccaccctgggcaacaggcaaaaccctgtctctattttttaaaatacaagaattagccgcagtggcacgcacctgtcgtcccagcaacccaggaggctgaggtaggaggatcacttaagcctgggaagtcaagcctgcagtgaaccatgatagcaccactgcagtccagcctgggcgacagagtgagaccccatctcgaaaacaaaaatgtataattcagtggtttttagtctctttgcagatacatgcaaccatcaccacaatttgcacattttctaagcctcatatactgatgtgatattttggtgttttgtgactggcttcatttacttagcatattgttttcatgtttcattcatgtcgcatgtatgagtattcattcctttatttggctgaataatattccattatagtttgtgccacattttgtttatccattcatccattgatggacatgtggattgtttccaccttctggataatatgaactgatacagtttggatattttgtcccctccaaatctcatgaaataggatcaccagtgttggagaatggggcctgttaggaagtgtttggatcataggaacatctgtcataaatggcttggtgccatccttgtaatgagtgagttcttgctctatattagttcacttgaaagctggttgttgggaactcctgccctatctgttctgccctctctcgtcatgtgacatgcctgctccttgttcaccttctgtcatgagtaaaagcttcctaaggccttcccaggagccaagcagatgtcagtaccatgcttgtacagcctgcagaactgtgagccaaataaacttctttataaatta

SEQ ID NO: 294686 - DNA, 4363 bp, Homo sapiens
tcgtttccgccggcgctccgagtgacgtagggaagcgcgccgcgcacctcatggttccggggacagttagggcggcggatggaggtcagcggtggtgctcgctgcggtttggaatcacttgctaggagtcttgtctctctgccacccaggacatcatggcagctcacctggtaaagcgatgcacgtgcctcctgagagaagctgctcgtcaggcccctgccatggctccagttggccgactgagacttgcctgggtagcccataagactctgacttcctcagccacctcacccatttcccacctcccaggttccttgatggagccggtggagaaggaacgagcatctactccctacatagagaagcaggtggaccacctcatcaagaaggccacaaggccagaggagctcctggagctacttggtggcagtcacgacttggacagcaatcaagcagcaatggtacttatccggctctctcacttgctgtctgagaagccagaagataaaggcttgctcatacaggatgcccactttcatcaacttctctgtctgctcaacagtcagattgcctcggtctggcatggtaccctctcgaagctgctgggaagcctgtatgctctgggcatccccaaggcctccaaggagctgcagtcggtggagcaggaggtccgctggcgcatgcggaagctcaagtacaagcacctggccttcctggcagagtcctgtgccaccctctcacaggagcagcactcgcaggagctgctggctgagctgctcacacacctggaaaggcgttggacagaaattgaagattcccacacattagtgaccgtcatgatgaaggtgggacacctctcggagccactaatgaaccgcctggaagacaagtgcctggagttggtggagcactttggccccaatgagctgcggaaggtgctggtgatgctggcagctcagagccggcggtccgtgcccttgctgcgggccatctcctaccacctggtgcagaagcccttctctctgacgaaagatgtgctcttggacgtggcctatgcctatggcaaactcagctttcaccagacccaggtgtcccagcgcctggccaccgacctgctatccctcatgcccagcctgacttctggtgaggtggcccactgtgccaagtccttcgccttactcaagtggctcagcctgcccctgtttgaggcctttgcccagcacgtcctgaacagagcgcaggacatcaccctgccccacctgtgcagcgtacttctggcttttgcgcgtctgaacttccatccagaccaagaggatcagttcttcagcctggtacatgagaagctggggtcagagctgccaggcctggagccagccctgcaggtggacctggtgtgggccctgtgtgtgctgcagcaggcacgggaagcagagctgcaagccgtcctccaccctgaatttcacatccaatttctagggggcaagtctcagaaggatcagaacaccttccagaagctgctcgtcccattctatgagtggctggaactcaagtctgaatggcagaaaggcgcctacctcaaggacaagatgcgcaaagcggtggctgaggagctggccaagtgacttgtgccagcagcatggactgcgtgcctctccgccggaggtctagctgtgggcggccaagaagggtcacccttgaggacaaacctctgtgcaggaccttggccagagtggggagggtggccagccactctgagggacagaacgtcctcttgtgtataataaacctttaattttggtgttggacccctggggccttcccaggcttggtcaccctctgcactgtcagcacttgtctgtctgctttgttgagcagggcgtggttctccagtctgccctgtgcactcccccgccacgcccagcccaagagggctgctttagggacagacctgggttgttacctgcctgtctctcccagcttcttccctccatgagtgcttattcacatatgccggcctcttgcgtaggggtctgtatcagccccagcaggcaggtggagtcctagaattctgaacctccagagcagaggagcttcccagggaagctgattggagattcagtgcatggctgggggttctgatggagctgtggctactgaaccacagccatcctgggaggctttctcccatcagttgtctcacacttagctgagtgaaaggcaccctgacagcatgtggtgacaggtgatgtgagggctgggtgagcacttgggaggcgctggctctgggagaggagaagatcccacttggctgacaccacggcaccaagagccaaactccatcgttgtcttcaccaccctgaccagagccttgtgctgtcatctaggaactggctgcccaaacaggaccctggcagcctccctgctgctgcggggattaccaggtgctgggaggcaacaagctttctaccttccagcctctccttagagacacctattggcagaacctgactaaatagcagtcagggaactgggttgcctccagccatacagaacagagagtaggacagtggggtggagctgagatggagaggcccacagccctcagcactgtaggctcccaaccctaggctgtttccccaaaaagaaaaagtctagtcactgctctgatgcttggccactcacccaagcattggggtagtttgtgctggcttcactgggcaccatcaggcacacccagcctgtagtttttgttttatattacctaagtcggccaggtgtggtgggatcacgcctgtaatcccagcacttagggaggctggggcgggcgaatcgcctgaggccaggaattcaagaccaacctggccaacattgtgaaaccctgtctctactaaaaatataaaaattagtcgggcatgatgacaggcacctgtaatcccagctactcaggaggctgaggcaggtgaatcacttgaacccgggaggtggaggctgcagtgagttaagattgtgccactgcactccagcctgggtaacagagcaagactctgtctcaaaaaatatatatgtgtgtgtgtgtgtgtgtatatatatgtacatgtgtatataagtatatatgtgtgtatatatgtatatatacacgtatatacacacacacccctaagtcatgattttggagcaattgtaagtggtgtagtgcttaattttggcattcacacattgattgttagcatatagaaatgggattgatttttatgtgatcttgctaaactttatgcatttttaaaattcctttggatttcctatgtagatatttatgtcctgaaaacaggaatgtatttatcctttcaaatcaatatgctttttattttgttatttatgaccacttcattaaaatataattcacatgccatacacttcacccatttaaaatgtataattaggccaggtgtggtggctcacgtctgtaatcccagcagtttgggaggccaaggccctcagatcttgagcccaggagttcaagaccaccctgggcaacaggcaaaaccctgtctctattttttaaaatacaagaattagccgcagtggcacgcacctgtcgtcccagcaacccaggaggctgaggtaggaggatcacttaagcctgggaagtcaagcctgcagtgaaccatgatagcaccactgcagtccagcctgggcgacagagtgagaccccatctcgaaaacaaaaatgtataattcagtggtttttagtctctttgcagatacatgcaaccatcaccacaatttgcacattttctaagcctcatatactgatgtgatattttggtgttttgtgactggcttcatttacttagcatattgttttcatgtttcattcatgtcgcatgtatgagtattcattcctttatttggctgaataatattccattatagtttgtgccacattttgtttatccattcatccattgatggacatgtggattgtttccaccttctggataatatgaactgatacagtttggatattttgtcccctccaaatctcatgaaataggatcaccagtgttggagaatggggcctgttaggaagtgtttggatcataggaacatctgtcataaatggcttggtgccatccttgtaatgagtgagttcttgctctatattagttcacttgaaagctggttgttgggaactcctgccctatctgttctgccctctctcgtcatgtgacatgcctgctccttgttcaccttctgtcatgagtaaaagcttcctaaggccttcccaggagccaagcagatgtcagtaccatgcttgtacagcctgcagaactgtgagccaaataaacttctttataaatta

SEQ ID NO: 294687 - DNA, 4411 bp, Homo sapiens
cgccgcccctgttgaccgtccatgaccccagcgagccagttttcgtgacttagtggtttggaatcacttgctaggagtcttgtctctctgccacccaggacatcatggcagctcacctggtaaagcgatgcacgtgcctcctgagagaagctgctcgtcaggcccctgccatggctccagttggccgactgagacttgcctgggtagcccataagactctgacttcctcagccacctcacccatttcccacctcccaggttccttgatggagccggtggagaaggaacgagcatctactccctacatagagaagcaggtggaccacctcatcaagaaggccacaaggccagaggagctcctggagctacttggtggcagtcacgacttggacagcaatcaagcagcaatggtacttatccggctctctcacttgctgtctgagaagccagaagataaaggcttgctcatacaggatgcccactttcatcaacttctctgtctgctcaacagtcagattgcctcggtctggcatggtaccctctcgaagctgctgggaagcctgtatgctctgggcatccccaaggcctccaaggagctgcagtcggtggagcaggaggtccgctggcgcatgcggaagctcaagtacaagcacctggccttcctggcagagtcctgtgccaccctctcacaggagcagcactcgcaggagctgctggctgagctgctcacacacctggaaaggcgttggacagaaattgaagattcccacacattagtgaccgtcatgatgaaggtgggacacctctcggagccactaatgaaccgcctggaagacaagcacgtcctgaacagagcgcaggacatcaccctgccccacctgtgcagcgtacttctggcttttgcgcgtctgaacttccatccagaccaagaggatcagttcttcagcctggtacatgagaagctggggtcagagctgccaggcctggagccagccctgcaggtggacctggtgtgggccctgtgtgtgctgcagcaggcacgggaagcagagctgcaagccgtcctccaccctgaatttcacatccaatttctagggggcaagtctcagaaggatcagaacaccttccagaagctgctccacatcaacgccactgccctgctggagtaccccgagtactcgggtccccttctgcctgcctcggctgtggcccctgggccctcagcccttgacaggaaggtgacccccctgcaaaaggagctgcaggagacgctgaaggggctgctggggagcgccgacaagggcagcctcgaggtggccacgcagtatggctgggtgctggatgctgaggtgctgctggacagtgacggcgagtttctgcccgtaagggactttgtggcacctcaccttgcccagccaactgggagccagtcaccacctccagggtctaagaggctagcgttcttgcggtgggagttccccaacttcaacagccgaagcaaggacttgctgggtcgctttgttctggcccggcgacacatagtggctgcaggcttcctgatagtggacgtcccattctatgagtggctggaactcaagtctgaatggcagaaaggcgcctacctcaaggacaagatgcgcaaagcggtggctgaggagctggccaagtgacttgtgccagcagcatggactgcgtgcctctccgccggaggtctagctgtgggcggccaagaagggtcacccttgaggacaaacctctgtgcaggaccttggccagagtggggagggtggccagccactctgagggacagaacgtcctcttgtgtataataaacctttaattttggtgttggacccctggggccttcccaggcttggtcaccctctgcactgtcagcacttgtctgtctgctttgttgagcagggcgtggttctccagtctgccctgtgcactcccccgccacgcccagcccaagagggctgctttagggacagacctgggttgttacctgcctgtctctcccagcttcttccctccatgagtgcttattcacatatgccggcctcttgcgtaggggtctgtatcagccccagcaggcaggtggagtcctagaattctgaacctccagagcagaggagcttcccagggaagctgattggagattcagtgcatggctgggggttctgatggagctgtggctactgaaccacagccatcctgggaggctttctcccatcagttgtctcacacttagctgagtgaaaggcaccctgacagcatgtggtgacaggtgatgtgagggctgggtgagcacttgggaggcgctggctctgggagaggagaagatcccacttggctgacaccacggcaccaagagccaaactccatcgttgtcttcaccaccctgaccagagccttgtgctgtcatctaggaactggctgcccaaacaggaccctggcagcctccctgctgctgcggggattaccaggtgctgggaggcaacaagctttctaccttccagcctctccttagagacacctattggcagaacctgactaaatagcagtcagggaactgggttgcctccagccatacagaacagagagtaggacagtggggtggagctgagatggagaggcccacagccctcagcactgtaggctcccaaccctaggctgtttccccaaaaagaaaaagtctagtcactgctctgatgcttggccactcacccaagcattggggtagtttgtgctggcttcactgggcaccatcaggcacacccagcctgtagtttttgttttatattacctaagtcggccaggtgtggtgggatcacgcctgtaatcccagcacttagggaggctggggcgggcgaatcgcctgaggccaggaattcaagaccaacctggccaacattgtgaaaccctgtctctactaaaaatataaaaattagtcgggcatgatgacaggcacctgtaatcccagctactcaggaggctgaggcaggtgaatcacttgaacccgggaggtggaggctgcagtgagttaagattgtgccactgcactccagcctgggtaacagagcaagactctgtctcaaaaaatatatatgtgtgtgtgtgtgtgtgtatatatatgtacatgtgtatataagtatatatgtgtgtatatatgtatatatacacgtatatacacacacacccctaagtcatgattttggagcaattgtaagtggtgtagtgcttaattttggcattcacacattgattgttagcatatagaaatgggattgatttttatgtgatcttgctaaactttatgcatttttaaaattcctttggatttcctatgtagatatttatgtcctgaaaacaggaatgtatttatcctttcaaatcaatatgctttttattttgttatttatgaccacttcattaaaatataattcacatgccatacacttcacccatttaaaatgtataattaggccaggtgtggtggctcacgtctgtaatcccagcagtttgggaggccaaggccctcagatcttgagcccaggagttcaagaccaccctgggcaacaggcaaaaccctgtctctattttttaaaatacaagaattagccgcagtggcacgcacctgtcgtcccagcaacccaggaggctgaggtaggaggatcacttaagcctgggaagtcaagcctgcagtgaaccatgatagcaccactgcagtccagcctgggcgacagagtgagaccccatctcgaaaacaaaaatgtataattcagtggtttttagtctctttgcagatacatgcaaccatcaccacaatttgcacattttctaagcctcatatactgatgtgatattttggtgttttgtgactggcttcatttacttagcatattgttttcatgtttcattcatgtcgcatgtatgagtattcattcctttatttggctgaataatattccattatagtttgtgccacattttgtttatccattcatccattgatggacatgtggattgtttccaccttctggataatatgaactgatacagtttggatattttgtcccctccaaatctcatgaaataggatcaccagtgttggagaatggggcctgttaggaagtgtttggatcataggaacatctgtcataaatggcttggtgccatccttgtaatgagtgagttcttgctctatattagttcacttgaaagctggttgttgggaactcctgccctatctgttctgccctctctcgtcatgtgacatgcctgctccttgttcaccttctgtcatgagtaaaagcttcctaaggccttcccaggagccaagcagatgtcagtaccatgcttgtacagcctgcagaactgtgagccaaataaacttctttataaatta

SEQ ID NO: 294688 - DNA, 4012 bp, Homo sapiens
tcgtttccgccggcgctccgagtgacgtagggaagcgcgccgcgcacctcatggttccggggacagttagggcggcggatggaggtcagcggtggtgctcgctgcggtttggaatcacttgctaggagtcttgtctctctgccacccaggacatcatggcagctcacctggtaaagcgatgcacgtgcctcctgagagaagctgctcgtcaggcccctgccatggctccagttggccgactgagacttgcctgggtagcccataagactctgacttcctcagccacctcacccatttcccacctcccaggttccttgatggagccggtggagaaggaacgagcatctactccctacatagagaagcaggtggcccactgtgccaagtccttcgccttactcaagtggctcagcctgcccctgtttgaggcctttgcccagcacgtcctgaacagagcgcaggacatcaccctgccccacctgtgcagcgtacttctggcttttgcgcgtctgaacttccatccagaccaagaggatcagttcttcagcctggtacatgagaagctggggtcagagctgccaggcctggagccagccctgcaggtggacctggtgtgggccctgtgtgtgctgcagcaggcacgggaagcagagctgcaagccgtcctccaccctgaatttcacatccaatttctagggggcaagtctcagaaggatcagaacaccttccagaagctgctccacatcaacgccactgccctgctggagtaccccgagtactcgggtccccttctgcctgcctcggctgtggcccctgggccctcagcccttgacaggaaggtgacccccctgcaaaaggagctgcaggagacgctgaaggggctgctggggagcgccgacaagggcagcctcgaggtggccacgcagtatggctgggtgctggatgctgaggtgctgctggacagtgacggcgagtttctgcccgtaagggactttgtggcacctcaccttgcccagccaactgggagccagtcaccacctccagggtctaagaggctagcgttcttgcggtgggagttccccaacttcaacagccgaagcaaggacttgctgggtcgctttgttctggcccggcgacacatagtggctgcaggcttcctgatagtggacgtcccattctatgagtggctggaactcaagtctgaatggcagaaaggcgcctacctcaaggacaagatgcgcaaagcggtggctgaggagctggccaagtgacttgtgccagcagcatggactgcgtgcctctccgccggaggtctagctgtgggcggccaagaagggtcacccttgaggacaaacctctgtgcaggaccttggccagagtggggagggtggccagccactctgagggacagaacgtcctcttgtgtataataaacctttaattttggtgttggacccctggggccttcccaggcttggtcaccctctgcactgtcagcacttgtctgtctgctttgttgagcagggcgtggttctccagtctgccctgtgcactcccccgccacgcccagcccaagagggctgctttagggacagacctgggttgttacctgcctgtctctcccagcttcttccctccatgagtgcttattcacatatgccggcctcttgcgtaggggtctgtatcagccccagcaggcaggtggagtcctagaattctgaacctccagagcagaggagcttcccagggaagctgattggagattcagtgcatggctgggggttctgatggagctgtggctactgaaccacagccatcctgggaggctttctcccatcagttgtctcacacttagctgagtgaaaggcaccctgacagcatgtggtgacaggtgatgtgagggctgggtgagcacttgggaggcgctggctctgggagaggagaagatcccacttggctgacaccacggcaccaagagccaaactccatcgttgtcttcaccaccctgaccagagccttgtgctgtcatctaggaactggctgcccaaacaggaccctggcagcctccctgctgctgcggggattaccaggtgctgggaggcaacaagctttctaccttccagcctctccttagagacacctattggcagaacctgactaaatagcagtcagggaactgggttgcctccagccatacagaacagagagtaggacagtggggtggagctgagatggagaggcccacagccctcagcactgtaggctcccaaccctaggctgtttccccaaaaagaaaaagtctagtcactgctctgatgcttggccactcacccaagcattggggtagtttgtgctggcttcactgggcaccatcaggcacacccagcctgtagtttttgttttatattacctaagtcggccaggtgtggtgggatcacgcctgtaatcccagcacttagggaggctggggcgggcgaatcgcctgaggccaggaattcaagaccaacctggccaacattgtgaaaccctgtctctactaaaaatataaaaattagtcgggcatgatgacaggcacctgtaatcccagctactcaggaggctgaggcaggtgaatcacttgaacccgggaggtggaggctgcagtgagttaagattgtgccactgcactccagcctgggtaacagagcaagactctgtctcaaaaaatatatatgtgtgtgtgtgtgtgtgtatatatatgtacatgtgtatataagtatatatgtgtgtatatatgtatatatacacgtatatacacacacacccctaagtcatgattttggagcaattgtaagtggtgtagtgcttaattttggcattcacacattgattgttagcatatagaaatgggattgatttttatgtgatcttgctaaactttatgcatttttaaaattcctttggatttcctatgtagatatttatgtcctgaaaacaggaatgtatttatcctttcaaatcaatatgctttttattttgttatttatgaccacttcattaaaatataattcacatgccatacacttcacccatttaaaatgtataattaggccaggtgtggtggctcacgtctgtaatcccagcagtttgggaggccaaggccctcagatcttgagcccaggagttcaagaccaccctgggcaacaggcaaaaccctgtctctattttttaaaatacaagaattagccgcagtggcacgcacctgtcgtcccagcaacccaggaggctgaggtaggaggatcacttaagcctgggaagtcaagcctgcagtgaaccatgatagcaccactgcagtccagcctgggcgacagagtgagaccccatctcgaaaacaaaaatgtataattcagtggtttttagtctctttgcagatacatgcaaccatcaccacaatttgcacattttctaagcctcatatactgatgtgatattttggtgttttgtgactggcttcatttacttagcatattgttttcatgtttcattcatgtcgcatgtatgagtattcattcctttatttggctgaataatattccattatagtttgtgccacattttgtttatccattcatccattgatggacatgtggattgtttccaccttctggataatatgaactgatacagtttggatattttgtcccctccaaatctcatgaaataggatcaccagtgttggagaatggggcctgttaggaagtgtttggatcataggaacatctgtcataaatggcttggtgccatccttgtaatgagtgagttcttgctctatattagttcacttgaaagctggttgttgggaactcctgccctatctgttctgccctctctcgtcatgtgacatgcctgctccttgttcaccttctgtcatgagtaaaagcttcctaaggccttcccaggagccaagcagatgtcagtaccatgcttgtacagcctgcagaactgtgagccaaataaacttctttataaatta

SEQ ID NO: 294689 - DNA, 4186 bp, Homo sapiens
tggccatctgctgggaaccattgccttagtcgggaaagtaaagccagtctgaaaatgctcacttgtgggggcaaatacatatttcttgcattttggcttattttgaaagggctgctattcagttctcaaaaaagtgtttgagaactgtttcctctgttctttcactgaccattataagtgcttccatccattttggggtagctgtagcaggtagcagcatggctgatgagactgagaatccactgagaactgtctactgaatcactgatccccctcgcaaagtggaactgtacagaaagatgacacctgcagttacgtttatgtgtgaccagtctaaactaagtttactggttggagaatatttctaaatcccttatcagaaagaagcagcttctaggtgtccccagcctctgtgggtagttgctgccaggcgaaggagtgtctgggcctgtgtaagtccttctctgttcccgacacagctcatgggccctggatggagggtcctgccattgcccctggccatgcaggctctcctcagactcagagccaggcaggaggacagcgtgctgggcagagagcttattctgtccctctgctatttctgacccacccagcacgtcctgaacagagcgcaggacatcaccctgccccacctgtgcagcgtacttctggcttttgcgcgtctgaacttccatccagaccaagaggatcagttcttcagcctggtacatgagaagctggggtcagagctgccaggcctggagccagccctgcaggtggacctggtgtgggccctgtgtgtgctgcagcaggcacgggaagcagagctgcaagccgtcctccaccctgaatttcacatccaatttctagggggcaagtctcagaaggatcagaacaccttccagaagctgctccacatcaacgccactgccctgctggagtaccccgagtactcgggtccccttctgcctgcctcggctgtggcccctgggccctcagcccttgacaggaaggtgacccccctgcaaaaggagctgcaggagacgctgaaggggctgctggggagcgccgacaagggcagcctcgaggtggccacgcagtatggctgggtgctggatgctgaggtgctgctggacagtgacggcgagtttctgcccgtaagggactttgtggcacctcaccttgcccagccaactgggagccagtcaccacctccagggtctaagaggctagcgttcttgcggtgggagttccccaacttcaacagccgaagcaaggacttgctgggtcgctttgttctggcccggcgacacatagtggctgcaggcttcctgatagtggacgtcccattctatgagtggctggaactcaagtctgaatggcagaaaggcgcctacctcaaggacaagatgcgcaaagcggtggctgaggagctggccaagtgacttgtgccagcagcatggactgcgtgcctctccgccggaggtctagctgtgggcggccaagaagggtcacccttgaggacaaacctctgtgcaggaccttggccagagtggggagggtggccagccactctgagggacagaacgtcctcttgtgtataataaacctttaattttggtgttggacccctggggccttcccaggcttggtcaccctctgcactgtcagcacttgtctgtctgctttgttgagcagggcgtggttctccagtctgccctgtgcactcccccgccacgcccagcccaagagggctgctttagggacagacctgggttgttacctgcctgtctctcccagcttcttccctccatgagtgcttattcacatatgccggcctcttgcgtaggggtctgtatcagccccagcaggcaggtggagtcctagaattctgaacctccagagcagaggagcttcccagggaagctgattggagattcagtgcatggctgggggttctgatggagctgtggctactgaaccacagccatcctgggaggctttctcccatcagttgtctcacacttagctgagtgaaaggcaccctgacagcatgtggtgacaggtgatgtgagggctgggtgagcacttgggaggcgctggctctgggagaggagaagatcccacttggctgacaccacggcaccaagagccaaactccatcgttgtcttcaccaccctgaccagagccttgtgctgtcatctaggaactggctgcccaaacaggaccctggcagcctccctgctgctgcggggattaccaggtgctgggaggcaacaagctttctaccttccagcctctccttagagacacctattggcagaacctgactaaatagcagtcagggaactgggttgcctccagccatacagaacagagagtaggacagtggggtggagctgagatggagaggcccacagccctcagcactgtaggctcccaaccctaggctgtttccccaaaaagaaaaagtctagtcactgctctgatgcttggccactcacccaagcattggggtagtttgtgctggcttcactgggcaccatcaggcacacccagcctgtagtttttgttttatattacctaagtcggccaggtgtggtgggatcacgcctgtaatcccagcacttagggaggctggggcgggcgaatcgcctgaggccaggaattcaagaccaacctggccaacattgtgaaaccctgtctctactaaaaatataaaaattagtcgggcatgatgacaggcacctgtaatcccagctactcaggaggctgaggcaggtgaatcacttgaacccgggaggtggaggctgcagtgagttaagattgtgccactgcactccagcctgggtaacagagcaagactctgtctcaaaaaatatatatgtgtgtgtgtgtgtgtgtatatatatgtacatgtgtatataagtatatatgtgtgtatatatgtatatatacacgtatatacacacacacccctaagtcatgattttggagcaattgtaagtggtgtagtgcttaattttggcattcacacattgattgttagcatatagaaatgggattgatttttatgtgatcttgctaaactttatgcatttttaaaattcctttggatttcctatgtagatatttatgtcctgaaaacaggaatgtatttatcctttcaaatcaatatgctttttattttgttatttatgaccacttcattaaaatataattcacatgccatacacttcacccatttaaaatgtataattaggccaggtgtggtggctcacgtctgtaatcccagcagtttgggaggccaaggccctcagatcttgagcccaggagttcaagaccaccctgggcaacaggcaaaaccctgtctctattttttaaaatacaagaattagccgcagtggcacgcacctgtcgtcccagcaacccaggaggctgaggtaggaggatcacttaagcctgggaagtcaagcctgcagtgaaccatgatagcaccactgcagtccagcctgggcgacagagtgagaccccatctcgaaaacaaaaatgtataattcagtggtttttagtctctttgcagatacatgcaaccatcaccacaatttgcacattttctaagcctcatatactgatgtgatattttggtgttttgtgactggcttcatttacttagcatattgttttcatgtttcattcatgtcgcatgtatgagtattcattcctttatttggctgaataatattccattatagtttgtgccacattttgtttatccattcatccattgatggacatgtggattgtttccaccttctggataatatgaactgatacagtttggatattttgtcccctccaaatctcatgaaataggatcaccagtgttggagaatggggcctgttaggaagtgtttggatcataggaacatctgtcataaatggcttggtgccatccttgtaatgagtgagttcttgctctatattagttcacttgaaagctggttgttgggaactcctgccctatctgttctgccctctctcgtcatgtgacatgcctgctccttgttcaccttctgtcatgagtaaaagcttcctaaggccttcccaggagccaagcagatgtcagtaccatgcttgtacagcctgcagaactgtgagccaaataaacttctttataaatta

SEQ ID NO: 294690 - DNA, 3501 bp, Homo sapiens
ggacgcgtgggtccggacgcgtgggcagttcttcagcctggtacatgagaagctggggtcagagctgccaggcctggagccagccctgcaggtggacctggtgtgggccctgtgtgtgctgcagcaggcacgggaagcagagctgcaagccgtcctccaccctgaatttcacatccaatttctagggggcaagtctcagaaggatcagaacaccttccagaagctgctccacatcaacgccactgccctgctggagtaccccgagtactcgggtccccttctgcctgcctcggctgtggcccctgggccctcagcccttgacaggaaggtgacccccctgcaaaaggagctgcaggagacgctgaaggggctgctggggagcgccgacaagggcagcctcgaggtggccacgcagtatggctgggtgctggatgctgaggtgctgctggacagtgacggcgagtttctgcccgtaagggactttgtggcacctcaccttgcccagccaactgggagccagtcaccacctccagggtctaagaggctagcgttcttgcggtgggagttccccaacttcaacagccgaagcaaggacttgctgggtcgctttgttctggcccggcgacacatagtggctgcaggcttcctgatagtggacgtcccattctatgagtggctggaactcaagtctgaatggcagaaaggcgcctacctcaaggacaagatgcgcaaagcggtggctgaggagctggccaagtgacttgtgccagcagcatggactgcgtgcctctccgccggaggtctagctgtgggcggccaagaagggtcacccttgaggacaaacctctgtgcaggaccttggccagagtggggagggtggccagccactctgagggacagaacgtcctcttgtgtataataaacctttaattttggtgttggacccctggggccttcccaggcttggtcaccctctgcactgtcagcacttgtctgtctgctttgttgagcagggcgtggttctccagtctgccctgtgcactcccccgccacgcccagcccaagagggctgctttagggacagacctgggttgttacctgcctgtctctcccagcttcttccctccatgagtgcttattcacatatgccggcctcttgcgtaggggtctgtatcagccccagcaggcaggtggagtcctagaattctgaacctccagagcagaggagcttcccagggaagctgattggagattcagtgcatggctgggggttctgatggagctgtggctactgaaccacagccatcctgggaggctttctcccatcagttgtctcacacttagctgagtgaaaggcaccctgacagcatgtggtgacaggtgatgtgagggctgggtgagcacttgggaggcgctggctctgggagaggagaagatcccacttggctgacaccacggcaccaagagccaaactccatcgttgtcttcaccaccctgaccagagccttgtgctgtcatctaggaactggctgcccaaacaggaccctggcagcctccctgctgctgcggggattaccaggtgctgggaggcaacaagctttctaccttccagcctctccttagagacacctattggcagaacctgactaaatagcagtcagggaactgggttgcctccagccatacagaacagagagtaggacagtggggtggagctgagatggagaggcccacagccctcagcactgtaggctcccaaccctaggctgtttccccaaaaagaaaaagtctagtcactgctctgatgcttggccactcacccaagcattggggtagtttgtgctggcttcactgggcaccatcaggcacacccagcctgtagtttttgttttatattacctaagtcggccaggtgtggtgggatcacgcctgtaatcccagcacttagggaggctggggcgggcgaatcgcctgaggccaggaattcaagaccaacctggccaacattgtgaaaccctgtctctactaaaaatataaaaattagtcgggcatgatgacaggcacctgtaatcccagctactcaggaggctgaggcaggtgaatcacttgaacccgggaggtggaggctgcagtgagttaagattgtgccactgcactccagcctgggtaacagagcaagactctgtctcaaaaaatatatatgtgtgtgtgtgtgtgtgtatatatatgtacatgtgtatataagtatatatgtgtgtatatatgtatatatacacgtatatacacacacacccctaagtcatgattttggagcaattgtaagtggtgtagtgcttaattttggcattcacacattgattgttagcatatagaaatgggattgatttttatgtgatcttgctaaactttatgcatttttaaaattcctttggatttcctatgtagatatttatgtcctgaaaacaggaatgtatttatcctttcaaatcaatatgctttttattttgttatttatgaccacttcattaaaatataattcacatgccatacacttcacccatttaaaatgtataattaggccaggtgtggtggctcacgtctgtaatcccagcagtttgggaggccaaggccctcagatcttgagcccaggagttcaagaccaccctgggcaacaggcaaaaccctgtctctattttttaaaatacaagaattagccgcagtggcacgcacctgtcgtcccagcaacccaggaggctgaggtaggaggatcacttaagcctgggaagtcaagcctgcagtgaaccatgatagcaccactgcagtccagcctgggcgacagagtgagaccccatctcgaaaacaaaaatgtataattcagtggtttttagtctctttgcagatacatgcaaccatcaccacaatttgcacattttctaagcctcatatactgatgtgatattttggtgttttgtgactggcttcatttacttagcatattgttttcatgtttcattcatgtcgcatgtatgagtattcattcctttatttggctgaataatattccattatagtttgtgccacattttgtttatccattcatccattgatggacatgtggattgtttccaccttctggataatatgaactgatacagtttggatattttgtcccctccaaatctcatgaaataggatcaccagtgttggagaatggggcctgttaggaagtgtttggatcataggaacatctgtcataaatggcttggtgccatccttgtaatgagtgagttcttgctctatattagttcacttgaaagctggttgttgggaactcctgccctatctgttctgccctctctcgtcatgtgacatgcctgctccttgttcaccttctgtcatgagtaaaagcttcctaaggccttcccaggagccaagcagatgtcagtaccatgcttgtacagcctgcagaactgtgagccaaataaacttctttataaatta

SEQ ID NO: 294691 - DNA, 3622 bp, Homo sapiens
tcgtttccgccggcgctccgagtgacgtagggaagcgcgccgcgcacctcatggttccggggacagttagggcggcggatggagggtttggaatcacttgctaggagtcttgtctctctgccacccaggacatcatggcagctcacctggtaaagcgatgcacgtgcctcctgagagaagctgctcgtcaggcccctgccatggctccagttggccgactgagacttgccctgtgtgtgctgcagcaggcacgggaagcagagctgcaagccgtcctccaccctgaatttcacatccaatttctagggggcaagtctcagaaggatcagaacaccttccagaagctgctccacatcaacgccactgccctgctggagtaccccgagtactcgggtccccttctgcctgcctcggctgtggcccctgggccctcagcccttgacaggaaggtgacccccctgcaaaaggagctgcaggagacgctgaaggggctgctggggagcgccgacaagggcagcctcgaggtggccacgcagtatggctgggtgctggatgctgaggtgctgctggacagtgacggcgagtttctgcccgtaagggactttgtggcacctcaccttgcccagccaactgggagccagtcaccacctccagggtctaagaggctagcgttcttgcggtgggagttccccaacttcaacagccgaagcaaggacttgctgggtcgctttgttctggcccggcgacacatagtggctgcaggcttcctgatagtggacgtcccattctatgagtggctggaactcaagtctgaatggcagaaaggcgcctacctcaaggacaagatgcgcaaagcggtggctgaggagctggccaagtgacttgtgccagcagcatggactgcgtgcctctccgccggaggtctagctgtgggcggccaagaagggtcacccttgaggacaaacctctgtgcaggaccttggccagagtggggagggtggccagccactctgagggacagaacgtcctcttgtgtataataaacctttaattttggtgttggacccctggggccttcccaggcttggtcaccctctgcactgtcagcacttgtctgtctgctttgttgagcagggcgtggttctccagtctgccctgtgcactcccccgccacgcccagcccaagagggctgctttagggacagacctgggttgttacctgcctgtctctcccagcttcttccctccatgagtgcttattcacatatgccggcctcttgcgtaggggtctgtatcagccccagcaggcaggtggagtcctagaattctgaacctccagagcagaggagcttcccagggaagctgattggagattcagtgcatggctgggggttctgatggagctgtggctactgaaccacagccatcctgggaggctttctcccatcagttgtctcacacttagctgagtgaaaggcaccctgacagcatgtggtgacaggtgatgtgagggctgggtgagcacttgggaggcgctggctctgggagaggagaagatcccacttggctgacaccacggcaccaagagccaaactccatcgttgtcttcaccaccctgaccagagccttgtgctgtcatctaggaactggctgcccaaacaggaccctggcagcctccctgctgctgcggggattaccaggtgctgggaggcaacaagctttctaccttccagcctctccttagagacacctattggcagaacctgactaaatagcagtcagggaactgggttgcctccagccatacagaacagagagtaggacagtggggtggagctgagatggagaggcccacagccctcagcactgtaggctcccaaccctaggctgtttccccaaaaagaaaaagtctagtcactgctctgatgcttggccactcacccaagcattggggtagtttgtgctggcttcactgggcaccatcaggcacacccagcctgtagtttttgttttatattacctaagtcggccaggtgtggtgggatcacgcctgtaatcccagcacttagggaggctggggcgggcgaatcgcctgaggccaggaattcaagaccaacctggccaacattgtgaaaccctgtctctactaaaaatataaaaattagtcgggcatgatgacaggcacctgtaatcccagctactcaggaggctgaggcaggtgaatcacttgaacccgggaggtggaggctgcagtgagttaagattgtgccactgcactccagcctgggtaacagagcaagactctgtctcaaaaaatatatatgtgtgtgtgtgtgtgtgtatatatatgtacatgtgtatataagtatatatgtgtgtatatatgtatatatacacgtatatacacacacacccctaagtcatgattttggagcaattgtaagtggtgtagtgcttaattttggcattcacacattgattgttagcatatagaaatgggattgatttttatgtgatcttgctaaactttatgcatttttaaaattcctttggatttcctatgtagatatttatgtcctgaaaacaggaatgtatttatcctttcaaatcaatatgctttttattttgttatttatgaccacttcattaaaatataattcacatgccatacacttcacccatttaaaatgtataattaggccaggtgtggtggctcacgtctgtaatcccagcagtttgggaggccaaggccctcagatcttgagcccaggagttcaagaccaccctgggcaacaggcaaaaccctgtctctattttttaaaatacaagaattagccgcagtggcacgcacctgtcgtcccagcaacccaggaggctgaggtaggaggatcacttaagcctgggaagtcaagcctgcagtgaaccatgatagcaccactgcagtccagcctgggcgacagagtgagaccccatctcgaaaacaaaaatgtataattcagtggtttttagtctctttgcagatacatgcaaccatcaccacaatttgcacattttctaagcctcatatactgatgtgatattttggtgttttgtgactggcttcatttacttagcatattgttttcatgtttcattcatgtcgcatgtatgagtattcattcctttatttggctgaataatattccattatagtttgtgccacattttgtttatccattcatccattgatggacatgtggattgtttccaccttctggataatatgaactgatacagtttggatattttgtcccctccaaatctcatgaaataggatcaccagtgttggagaatggggcctgttaggaagtgtttggatcataggaacatctgtcataaatggcttggtgccatccttgtaatgagtgagttcttgctctatattagttcacttgaaagctggttgttgggaactcctgccctatctgttctgccctctctcgtcatgtgacatgcctgctccttgttcaccttctgtcatgagtaaaagcttcctaaggccttcccaggagccaagcagatgtcagtaccatgcttgtacagcctgcagaactgtgagccaaataaacttctttataaatta

SEQ ID NO: 294692 - DNA, 2895 bp, Homo sapiens
  misc_feature (66)..(66): n is a, c, g, or t
  misc_feature (73)..(73): n is a, c, g, or t
atgttgggtggcgcatgtacccatttcccggcgcgaggagaaaagttctgtggcaactctatgagnggtttgnaggtgaatacctgaatggcagaaaggcgcctacctcaaggacaagatgcgcaaagcggtggctgaggagctggccaagtgacttgtgccagcagcatggactgcgtgcctctccgccggaggtctagctgtgggcggccaagaagggtcacccttgaggacaaacctctgtgcaggaccttggccagagtggggagggtggccagccactctgagggacagaacgtcctcttgtgtataataaacctttaattttggtgttggacccctggggccttcccaggcttggtcaccctctgcactgtcagcacttgtctgtctgctttgttgagcagggcgtggttctccagtctgccctgtgcactcccccgccacgcccagcccaagagggctgctttagggacagacctgggttgttacctgcctgtctctcccagcttcttccctccatgagtgcttattcacatatgccggcctcttgcgtaggggtctgtatcagccccagcaggcaggtggagtcctagaattctgaacctccagagcagaggagcttcccagggaagctgattggagattcagtgcatggctgggggttctgatggagctgtggctactgaaccacagccatcctgggaggctttctcccatcagttgtctcacacttagctgagtgaaaggcaccctgacagcatgtggtgacaggtgatgtgagggctgggtgagcacttgggaggcgctggctctgggagaggagaagatcccacttggctgacaccacggcaccaagagccaaactccatcgttgtcttcaccaccctgaccagagccttgtgctgtcatctaggaactggctgcccaaacaggaccctggcagcctccctgctgctgcggggattaccaggtgctgggaggcaacaagctttctaccttccagcctctccttagagacacctattggcagaacctgactaaatagcagtcagggaactgggttgcctccagccatacagaacagagagtaggacagtggggtggagctgagatggagaggcccacagccctcagcactgtaggctcccaaccctaggctgtttccccaaaaagaaaaagtctagtcactgctctgatgcttggccactcacccaagcattggggtagtttgtgctggcttcactgggcaccatcaggcacacccagcctgtagtttttgttttatattacctaagtcggccaggtgtggtgggatcacgcctgtaatcccagcacttagggaggctggggcgggcgaatcgcctgaggccaggaattcaagaccaacctggccaacattgtgaaaccctgtctctactaaaaatataaaaattagtcgggcatgatgacaggcacctgtaatcccagctactcaggaggctgaggcaggtgaatcacttgaacccgggaggtggaggctgcagtgagttaagattgtgccactgcactccagcctgggtaacagagcaagactctgtctcaaaaaatatatatgtgtgtgtgtgtgtgtgtatatatatgtacatgtgtatataagtatatatgtgtgtatatatgtatatatacacgtatatacacacacacccctaagtcatgattttggagcaattgtaagtggtgtagtgcttaattttggcattcacacattgattgttagcatatagaaatgggattgatttttatgtgatcttgctaaactttatgcatttttaaaattcctttggatttcctatgtagatatttatgtcctgaaaacaggaatgtatttatcctttcaaatcaatatgctttttattttgttatttatgaccacttcattaaaatataattcacatgccatacacttcacccatttaaaatgtataattaggccaggtgtggtggctcacgtctgtaatcccagcagtttgggaggccaaggccctcagatcttgagcccaggagttcaagaccaccctgggcaacaggcaaaaccctgtctctattttttaaaatacaagaattagccgcagtggcacgcacctgtcgtcccagcaacccaggaggctgaggtaggaggatcacttaagcctgggaagtcaagcctgcagtgaaccatgatagcaccactgcagtccagcctgggcgacagagtgagaccccatctcgaaaacaaaaatgtataattcagtggtttttagtctctttgcagatacatgcaaccatcaccacaatttgcacattttctaagcctcatatactgatgtgatattttggtgttttgtgactggcttcatttacttagcatattgttttcatgtttcattcatgtcgcatgtatgagtattcattcctttatttggctgaataatattccattatagtttgtgccacattttgtttatccattcatccattgatggacatgtggattgtttccaccttctggataatatgaactgatacagtttggatattttgtcccctccaaatctcatgaaataggatcaccagtgttggagaatggggcctgttaggaagtgtttggatcataggaacatctgtcataaatggcttggtgccatccttgtaatgagtgagttcttgctctatattagttcacttgaaagctggttgttgggaactcctgccctatctgttctgccctctctcgtcatgtgacatgcctgctccttgttcaccttctgtcatgagtaaaagcttcctaaggccttcccaggagccaagcagatgtcagtaccatgcttgtacagcctgcagaactgtgagccaaataaacttctttataaatta

SEQ ID NO: 294693 - DNA, 479 bp, Homo sapiens
gtggccacgcagtatggctgggtgctgggtgagggctccccctggttggcacagggcctggcattgcctgagtctaacgggactcttctaacccaccccgtctgcagcaagtactgacctagggagctgcagggtgtcagcctgggctccccacagtcccatctttgttcatctttcctgtgggggggtttctgagggatgtcccccaacatgttctcatcccacaccccttccccagatgctgaggtgctgctggacagtgacggcgagtttctgcccgtaagggactttgtggcacctcaccttgcccagccaactgggagccagtcaccacctccagggtctaagaggtaggtggccagggacctgttggccatgggggcaccatggctgttggactgcatattctttgctttccatctttcccctccgaggggctgggagagtggaagcatgtcagccacctcttcttccttcca

SEQ ID NO: 294694 - DNA, 4792 bp, Homo sapiens
tcgtttccgccggcgctccgagtgacgtagggaagcgcgccgcgcacctcatggttccggggacagttagggcggcggatggaggtcagcggtggtgctcgctgcggtttggaatcacttgctaggagtcttgtctctctgccacccaggacatcatggcagctcacctggtaaagcgatgcacgtgcctcctgagagaagctgctcgtcaggcccctgccatggctccagttggccgactgagacttgcctgggtagcccataagactctgacttcctcagccacctcacccatttcccacctcccaggttccttgatggagccggtggagaaggaacgagcatctactccctacatagagaagcaggtggaccacctcatcaagaaggccacaaggccagaggagctcctggagctacttggtggcagtcacgacttggacagcaatcaagcagcaatggtacttatccggctctctcacttgctgtctgagaagccagaagataaaggcttgctcatacaggatgcccactttcatcaacttctctgtctgctcaacagtcagattgcctcggtctggcatggtaccctctcgaagctgctgggaagcctgtatgctctgggcatccccaaggcctccaaggagctgcagtcggtggagcaggaggtccgctggcgcatgcggaagctcaagtacaagcacctggccttcctggcagagtcctgtgccaccctctcacaggagcagcactcgcaggagctgctggctgagctgctcacacacctggaaaggcgttggacagaaattgaagattcccacacattagtgaccgtcatgatgaaggtgggacacctctcggagccactaatgaaccgcctggaagacaagtgcctggagttggtggagcactttggccccaatgagctgcggaaggtgctggtgatgctggcagctcagagccggcggtccgtgcccttgctgcgggccatctcctaccacctggtgcagaagcccttctctctgacgaaagatgtgctcttggacgtggcctatgcctatggcaaactcagctttcaccagacccaggtgtcccagcgcctggccaccgacctgctatccctcatgcccagcctgacttctggtgaggtggcccactgtgccaagtccttcgccttactcaagtggctcagcctgcccctgtttgaggcctttgcccagcacgtcctgaacagagcgcaggacatcaccctgccccacctgtgcagcgtacttctggcttttgcgcgtctgaacttccatccagaccaagaggatcagttcttcagcctggtacatgagaagctggggtcagagctgccaggcctggagccagccctgcaggtggacctggtgtgggccctgtgtgtgctgcagcaggcacgggaagcagagctgcaagccgtcctccaccctgaatttcacatccaatttctagggggcaagtctcagaaggatcagaacaccttccagaagctgctccacatcaacgccactgccctgctggagtaccccgagtactcgggtccccttctgcctgcctcggctgtggcccctgggccctcagcccttgacaggaaggtgacccccctgcaaaaggagctgcaggagacgctgaaggggctgctggggagcgccgacaagggcagcctcgaggtggccacgcagtatggctgggtgctggatgctgaggtgctgctggacagtgacggcgagtttctgcccgtaagggactttgtggcacctcaccttgcccagccaactgggagccagtcaccacctccagggtctaagaggctagcgttcttgcggtgggagttccccaacttcaacagccgaagcaaggacttgctgggtcgctttgttctggcccggcgacacatagtggctgcaggcttcctgatagtggacgtcccattctatgagtggctggaactcaagtctgaatggcagaaaggcgcctacctcaaggacaagatgcgcaaagcggtggctgaggagctggccaagtgacttgtgccagcagcatggactgcgtgcctctccgccggaggtctagctgtgggcggccaagaagggtcacccttgaggacaaacctctgtgcaggaccttggccagagtggggagggtggccagccactctgagggacagaacgtcctcttgtgtataataaacctttaattttggtgttggacccctggggccttcccaggcttggtcaccctctgcactgtcagcacttgtctgtctgctttgttgagcagggcgtggttctccagtctgccctgtgcactcccccgccacgcccagcccaagagggctgctttagggacagacctgggttgttacctgcctgtctctcccagcttcttccctccatgagtgcttattcacatatgccggcctcttgcgtaggggtctgtatcagccccagcaggcaggtggagtcctagaattctgaacctccagagcagaggagcttcccagggaagctgattggagattcagtgcatggctgggggttctgatggagctgtggctactgaaccacagccatcctgggaggctttctcccatcagttgtctcacacttagctgagtgaaaggcaccctgacagcatgtggtgacaggtgatgtgagggctgggtgagcacttgggaggcgctggctctgggagaggagaagatcccacttggctgacaccacggcaccaagagccaaactccatcgttgtcttcaccaccctgaccagagccttgtgctgtcatctaggaactggctgcccaaacaggaccctggcagcctccctgctgctgcggggattaccaggtgctgggaggcaacaagctttctaccttccagcctctccttagagacacctattggcagaacctgactaaatagcagtcagggaactgggttgcctccagccatacagaacagagagtaggacagtggggtggagctgagatggagaggcccacagccctcagcactgtaggctcccaaccctaggctgtttccccaaaaagaaaaagtctagtcactgctctgatgcttggccactcacccaagcattggggtagtttgtgctggcttcactgggcaccatcaggcacacccagcctgtagtttttgttttatattacctaagtcggccaggtgtggtgggatcacgcctgtaatcccagcacttagggaggctggggcgggcgaatcgcctgaggccaggaattcaagaccaacctggccaacattgtgaaaccctgtctctactaaaaatataaaaattagtcgggcatgatgacaggcacctgtaatcccagctactcaggaggctgaggcaggtgaatcacttgaacccgggaggtggaggctgcagtgagttaagattgtgccactgcactccagcctgggtaacagagcaagactctgtctcaaaaaatatatatgtgtgtgtgtgtgtgtgtatatatatgtacatgtgtatataagtatatatgtgtgtatatatgtatatatacacgtatatacacacacacccctaagtcatgattttggagcaattgtaagtggtgtagtgcttaattttggcattcacacattgattgttagcatatagaaatgggattgatttttatgtgatcttgctaaactttatgcatttttaaaattcctttggatttcctatgtagatatttatgtcctgaaaacaggaatgtatttatcctttcaaatcaatatgctttttattttgttatttatgaccacttcattaaaatataattcacatgccatacacttcacccatttaaaatgtataattaggccaggtgtggtggctcacgtctgtaatcccagcagtttgggaggccaaggccctcagatcttgagcccaggagttcaagaccaccctgggcaacaggcaaaaccctgtctctattttttaaaatacaagaattagccgcagtggcacgcacctgtcgtcccagcaacccaggaggctgaggtaggaggatcacttaagcctgggaagtcaagcctgcagtgaaccatgatagcaccactgcagtccagcctgggcgacagagtgagaccccatctcgaaaacaaaaatgtataattcagtggtttttagtctctttgcagatacatgcaaccatcaccacaatttgcacattttctaagcctcatatactgatgtgatattttggtgttttgtgactggcttcatttacttagcatattgttttcatgtttcattcatgtcgcatgtatgagtattcattcctttatttggctgaataatattccattatagtttgtgccacattttgtttatccattcatccattgatggacatgtggattgtttccaccttctggataatatgaactgatacagtttggatattttgtcccctccaaatctcatgaaataggatcaccagtgttggagaatggggcctgttaggaagtgtttggatcataggaacatctgtcataaatggcttggtgccatccttgtaatgagtgagttcttgctctatattagttcacttgaaagctggttgttgggaactcctgccctatctgttctgccctctctcgtcatgtgacatgcctgctccttgttcaccttctgtcatgagtaaaagcttcctaaggccttcccaggagccaagcagatgtcagtaccatgcttgtacagcctgcagaactgtgagccaaataaacttctttataaatta

SEQ ID NO: 294695 - DNA, 4858 bp, Homo sapiens
tcgtttccgccggcgctccgagtgacgtagggaagcgcgccgcgcacctcatggttccggggacagttagggcggcggatggaggtcagcggtggtgctcgctgcggtttggaatcacttgctaggagtcttgtctctctgccacccaggacatcatggcagctcacctggtaaagcgatgcacgtgcctcctgagagaagctgctcgtcaggcccctgccatggctccagttggccgactgagacttgcctgggtagcccataagactctgacttcctcagccacctcacccatttcccacctcccaggttccttgatggagccggtggagaaggaacgagcatctactccctacatagagaagcaggtggaccacctcatcaagaaggccacaaggccagaggagctcctggagctacttggtggcagtcacgacttggacagcaatcaagcagcaatggtacttatccggctctctcacttgctgtctgagaagccagaagataaaggcttgctcatacaggatgcccactttcatcaacttctctgtctgctcaacagtcagattgcctcggtctggcatggtaccctctcgaagctgctgggaagcctgtatgctctgggcatccccaaggcctccaaggagctgcagtcggtggagcaggaggtccgctggcgcatgcggaagctcaagtacaagcacctggccttcctggcagagtcctgtgccaccctctcacaggagcagcactcgcaggagctgctggctgagctgctcacacacctggaaaggcgttggacagaaattgaagattcccacacattagtgaccgtcatgatgaaggtgggacacctctcggagccactaatgaaccgcctggaagacaagtgcctggagttggtggagcactttggccccaatgagctgcggaaggtgctggtgatgctggcagctcagagccggcggtccgtgcccttgctgcgggccatctcctaccacctggtgcagaagcccttctctctgacgaaagatgtgctcttggacgtggcctatgcctatggcaaactcagctttcaccagacccaggtgtcccagcgcctggccaccgacctgctatccctcatgcccagcctgacttctggtgaggtggcccactgtgccaagtccttcgccttactcaagtggctcagcctgcccctgtttgaggcctttgcccagcacgtcctgaacagagcgcaggacatcaccctgccccacctgtgcagcgtacttctggcttttgcgcgtctgaacttccatccagaccaagaggatcagttcttcagcctggtacatgagaagctggggtcagagctgccaggcctggagccagccctgcaggtggacctggtgtgggccctgtgtgtgctgcagcaggcacgggaagcagagctgcaagccgtcctccaccctgaatttcacatccaatttctaggtgagccccctgcccctagtactactggaactgggaaactgcctggtcttgtctgcctagtgccagggggcaagtctcagaaggatcagaacaccttccagaagctgctccacatcaacgccactgccctgctggagtaccccgagtactcgggtccccttctgcctgcctcggctgtggcccctgggccctcagcccttgacaggaaggtgacccccctgcaaaaggagctgcaggagacgctgaaggggctgctggggagcgccgacaagggcagcctcgaggtggccacgcagtatggctgggtgctggatgctgaggtgctgctggacagtgacggcgagtttctgcccgtaagggactttgtggcacctcaccttgcccagccaactgggagccagtcaccacctccagggtctaagaggctagcgttcttgcggtgggagttccccaacttcaacagccgaagcaaggacttgctgggtcgctttgttctggcccggcgacacatagtggctgcaggcttcctgatagtggacgtcccattctatgagtggctggaactcaagtctgaatggcagaaaggcgcctacctcaaggacaagatgcgcaaagcggtggctgaggagctggccaagtgacttgtgccagcagcatggactgcgtgcctctccgccggaggtctagctgtgggcggccaagaagggtcacccttgaggacaaacctctgtgcaggaccttggccagagtggggagggtggccagccactctgagggacagaacgtcctcttgtgtataataaacctttaattttggtgttggacccctggggccttcccaggcttggtcaccctctgcactgtcagcacttgtctgtctgctttgttgagcagggcgtggttctccagtctgccctgtgcactcccccgccacgcccagcccaagagggctgctttagggacagacctgggttgttacctgcctgtctctcccagcttcttccctccatgagtgcttattcacatatgccggcctcttgcgtaggggtctgtatcagccccagcaggcaggtggagtcctagaattctgaacctccagagcagaggagcttcccagggaagctgattggagattcagtgcatggctgggggttctgatggagctgtggctactgaaccacagccatcctgggaggctttctcccatcagttgtctcacacttagctgagtgaaaggcaccctgacagcatgtggtgacaggtgatgtgagggctgggtgagcacttgggaggcgctggctctgggagaggagaagatcccacttggctgacaccacggcaccaagagccaaactccatcgttgtcttcaccaccctgaccagagccttgtgctgtcatctaggaactggctgcccaaacaggaccctggcagcctccctgctgctgcggggattaccaggtgctgggaggcaacaagctttctaccttccagcctctccttagagacacctattggcagaacctgactaaatagcagtcagggaactgggttgcctccagccatacagaacagagagtaggacagtggggtggagctgagatggagaggcccacagccctcagcactgtaggctcccaaccctaggctgtttccccaaaaagaaaaagtctagtcactgctctgatgcttggccactcacccaagcattggggtagtttgtgctggcttcactgggcaccatcaggcacacccagcctgtagtttttgttttatattacctaagtcggccaggtgtggtgggatcacgcctgtaatcccagcacttagggaggctggggcgggcgaatcgcctgaggccaggaattcaagaccaacctggccaacattgtgaaaccctgtctctactaaaaatataaaaattagtcgggcatgatgacaggcacctgtaatcccagctactcaggaggctgaggcaggtgaatcacttgaacccgggaggtggaggctgcagtgagttaagattgtgccactgcactccagcctgggtaacagagcaagactctgtctcaaaaaatatatatgtgtgtgtgtgtgtgtgtatatatatgtacatgtgtatataagtatatatgtgtgtatatatgtatatatacacgtatatacacacacacccctaagtcatgattttggagcaattgtaagtggtgtagtgcttaattttggcattcacacattgattgttagcatatagaaatgggattgatttttatgtgatcttgctaaactttatgcatttttaaaattcctttggatttcctatgtagatatttatgtcctgaaaacaggaatgtatttatcctttcaaatcaatatgctttttattttgttatttatgaccacttcattaaaatataattcacatgccatacacttcacccatttaaaatgtataattaggccaggtgtggtggctcacgtctgtaatcccagcagtttgggaggccaaggccctcagatcttgagcccaggagttcaagaccaccctgggcaacaggcaaaaccctgtctctattttttaaaatacaagaattagccgcagtggcacgcacctgtcgtcccagcaacccaggaggctgaggtaggaggatcacttaagcctgggaagtcaagcctgcagtgaaccatgatagcaccactgcagtccagcctgggcgacagagtgagaccccatctcgaaaacaaaaatgtataattcagtggtttttagtctctttgcagatacatgcaaccatcaccacaatttgcacattttctaagcctcatatactgatgtgatattttggtgttttgtgactggcttcatttacttagcatattgttttcatgtttcattcatgtcgcatgtatgagtattcattcctttatttggctgaataatattccattatagtttgtgccacattttgtttatccattcatccattgatggacatgtggattgtttccaccttctggataatatgaactgatacagtttggatattttgtcccctccaaatctcatgaaataggatcaccagtgttggagaatggggcctgttaggaagtgtttggatcataggaacatctgtcataaatggcttggtgccatccttgtaatgagtgagttcttgctctatattagttcacttgaaagctggttgttgggaactcctgccctatctgttctgccctctctcgtcatgtgacatgcctgctccttgttcaccttctgtcatgagtaaaagcttcctaaggccttcccaggagccaagcagatgtcagtaccatgcttgtacagcctgcagaactgtgagccaaataaacttctttataaatta

SEQ ID NO: 294696 - DNA, 5002 bp, Homo sapiens
tcgtttccgccggcgctccgagtgacgtagggaagcgcgccgcgcacctcatggttccggggacagttagggcggcggatggaggtcagcggtggtgctcgctgcggtttggaatcacttgctaggagtcttgtctctctgccacccaggacatcatggcagctcacctggtaaagcgatgcacgtgcctcctgagagaagctgctcgtcaggcccctgccatggctccagttggccgactgagacttgcctgggtagcccataagactctgacttcctcagccacctcacccatttcccacctcccaggttccttgatggagccggtggagaaggaacgagcatctactccctacatagagaagcaggtggaccacctcatcaagaaggccacaaggccagaggagctcctggagctacttggtggcagtcacgacttggacagcaatcaagcagcaatggtacttatccggctctctcacttgctgtctgagaagccagaagataaaggcttgctcatacaggatgcccactttcatcaacttctctgtctgctcaacagtcagattgcctcggtctggcatggtaccctctcgaagctgctgggaagcctgtatgctctgggcatccccaaggcctccaaggagctgcagtcggtggagcaggaggtccgctggcgcatgcggaagctcaagtacaagcacctggccttcctggcagagtcctgtgccaccctctcacaggagcagcactcgcaggagctgctggctgagctgctcacacacctggaaaggcgttggacagaaattgaagattcccacacattagtgaccgtcatgatgaaggtgggacacctctcggagccactaatgaaccgcctggaagacaagtgcctggagttggtggagcactttggccccaatgagctgcggaaggtgctggtgatgctggcagctcagagccggcggtccgtgcccttgctgcgggccatctcctaccacctggtgcagaagcccttctctctgacgaaagatgtgctcttggacgtggcctatgcctatggcaaactcagctttcaccagacccaggtgtcccagcgcctggccaccgacctgctatccctcatgcccagcctgacttctggtgaggtggcccactgtgccaagtccttcgccttactcaagtggctcagcctgcccctgtttgaggcctttgcccagcacgtcctgaacagagcgcaggacatcaccctgccccacctgtgcagcgtacttctggcttttgcgcgtctgaacttccatccagaccaagaggatcagttcttcagcctggtacatgagaagctggggtcagagctgccaggcctggagccagccctgcaggtggacctggtgtgggccctgtgtgtgctgcagcaggcacgggaagcagagctgcaagccgtcctccaccctgaatttcacatccaatttctagggggcaagtctcagaaggatcagaacaccttccagaagctgctccacatcaacgccactgccctgctggagtaccccgagtactcgggtccccttctgcctgcctcggctgtggcccctgggccctcagcccttgacaggaaggtgacccccctgcaaaaggagctgcaggagacgctgaaggggctgctggggagcgccgacaagggcagcctcgaggtggccacgcagtatggctgggtgctgggtgagggctccccctggttggcacagggcctggcattgcctgagtctaacgggactcttctaacccaccccgtctgcagcaagtactgacctagggagctgcagggtgtcagcctgggctccccacagtcccatctttgttcatctttcctgtgggggggtttctgagggatgtcccccaacatgttctcatcccacaccccttccccagatgctgaggtgctgctggacagtgacggcgagtttctgcccgtaagggactttgtggcacctcaccttgcccagccaactgggagccagtcaccacctccagggtctaagaggctagcgttcttgcggtgggagttccccaacttcaacagccgaagcaaggacttgctgggtcgctttgttctggcccggcgacacatagtggctgcaggcttcctgatagtggacgtcccattctatgagtggctggaactcaagtctgaatggcagaaaggcgcctacctcaaggacaagatgcgcaaagcggtggctgaggagctggccaagtgacttgtgccagcagcatggactgcgtgcctctccgccggaggtctagctgtgggcggccaagaagggtcacccttgaggacaaacctctgtgcaggaccttggccagagtggggagggtggccagccactctgagggacagaacgtcctcttgtgtataataaacctttaattttggtgttggacccctggggccttcccaggcttggtcaccctctgcactgtcagcacttgtctgtctgctttgttgagcagggcgtggttctccagtctgccctgtgcactcccccgccacgcccagcccaagagggctgctttagggacagacctgggttgttacctgcctgtctctcccagcttcttccctccatgagtgcttattcacatatgccggcctcttgcgtaggggtctgtatcagccccagcaggcaggtggagtcctagaattctgaacctccagagcagaggagcttcccagggaagctgattggagattcagtgcatggctgggggttctgatggagctgtggctactgaaccacagccatcctgggaggctttctcccatcagttgtctcacacttagctgagtgaaaggcaccctgacagcatgtggtgacaggtgatgtgagggctgggtgagcacttgggaggcgctggctctgggagaggagaagatcccacttggctgacaccacggcaccaagagccaaactccatcgttgtcttcaccaccctgaccagagccttgtgctgtcatctaggaactggctgcccaaacaggaccctggcagcctccctgctgctgcggggattaccaggtgctgggaggcaacaagctttctaccttccagcctctccttagagacacctattggcagaacctgactaaatagcagtcagggaactgggttgcctccagccatacagaacagagagtaggacagtggggtggagctgagatggagaggcccacagccctcagcactgtaggctcccaaccctaggctgtttccccaaaaagaaaaagtctagtcactgctctgatgcttggccactcacccaagcattggggtagtttgtgctggcttcactgggcaccatcaggcacacccagcctgtagtttttgttttatattacctaagtcggccaggtgtggtgggatcacgcctgtaatcccagcacttagggaggctggggcgggcgaatcgcctgaggccaggaattcaagaccaacctggccaacattgtgaaaccctgtctctactaaaaatataaaaattagtcgggcatgatgacaggcacctgtaatcccagctactcaggaggctgaggcaggtgaatcacttgaacccgggaggtggaggctgcagtgagttaagattgtgccactgcactccagcctgggtaacagagcaagactctgtctcaaaaaatatatatgtgtgtgtgtgtgtgtgtatatatatgtacatgtgtatataagtatatatgtgtgtatatatgtatatatacacgtatatacacacacacccctaagtcatgattttggagcaattgtaagtggtgtagtgcttaattttggcattcacacattgattgttagcatatagaaatgggattgatttttatgtgatcttgctaaactttatgcatttttaaaattcctttggatttcctatgtagatatttatgtcctgaaaacaggaatgtatttatcctttcaaatcaatatgctttttattttgttatttatgaccacttcattaaaatataattcacatgccatacacttcacccatttaaaatgtataattaggccaggtgtggtggctcacgtctgtaatcccagcagtttgggaggccaaggccctcagatcttgagcccaggagttcaagaccaccctgggcaacaggcaaaaccctgtctctattttttaaaatacaagaattagccgcagtggcacgcacctgtcgtcccagcaacccaggaggctgaggtaggaggatcacttaagcctgggaagtcaagcctgcagtgaaccatgatagcaccactgcagtccagcctgggcgacagagtgagaccccatctcgaaaacaaaaatgtataattcagtggtttttagtctctttgcagatacatgcaaccatcaccacaatttgcacattttctaagcctcatatactgatgtgatattttggtgttttgtgactggcttcatttacttagcatattgttttcatgtttcattcatgtcgcatgtatgagtattcattcctttatttggctgaataatattccattatagtttgtgccacattttgtttatccattcatccattgatggacatgtggattgtttccaccttctggataatatgaactgatacagtttggatattttgtcccctccaaatctcatgaaataggatcaccagtgttggagaatggggcctgttaggaagtgtttggatcataggaacatctgtcataaatggcttggtgccatccttgtaatgagtgagttcttgctctatattagttcacttgaaagctggttgttgggaactcctgccctatctgttctgccctctctcgtcatgtgacatgcctgctccttgttcaccttctgtcatgagtaaaagcttcctaaggccttcccaggagccaagcagatgtcagtaccatgcttgtacagcctgcagaactgtgagccaaataaacttctttataaatta

SEQ ID NO: 294697 - DNA, 4748 bp, Homo sapiens
tcgtttccgccggcgctccgagtgacgtagggaagcgcgccgcgcacctcatggttccggggacagttagggcggcggatggaggtcagcggtggtgctcgctgcgacatcatggcagctcacctggtaaagcgatgcacgtgcctcctgagagaagctgctcgtcaggcccctgccatggctccagttggccgactgagacttgcctgggtagcccataagactctgacttcctcagccacctcacccatttcccacctcccaggttccttgatggagccggtggagaaggaacgagcatctactccctacatagagaagcaggtggaccacctcatcaagaaggccacaaggccagaggagctcctggagctacttggtggcagtcacgacttggacagcaatcaagcagcaatggtacttatccggctctctcacttgctgtctgagaagccagaagataaaggcttgctcatacaggatgcccactttcatcaacttctctgtctgctcaacagtcagattgcctcggtctggcatggtaccctctcgaagctgctgggaagcctgtatgctctgggcatccccaaggcctccaaggagctgcagtcggtggagcaggaggtccgctggcgcatgcggaagctcaagtacaagcacctggccttcctggcagagtcctgtgccaccctctcacaggagcagcactcgcaggagctgctggctgagctgctcacacacctggaaaggcgttggacagaaattgaagattcccacacattagtgaccgtcatgatgaaggtgggacacctctcggagccactaatgaaccgcctggaagacaagtgcctggagttggtggagcactttggccccaatgagctgcggaaggtgctggtgatgctggcagctcagagccggcggtccgtgcccttgctgcgggccatctcctaccacctggtgcagaagcccttctctctgacgaaagatgtgctcttggacgtggcctatgcctatggcaaactcagctttcaccagacccaggtgtcccagcgcctggccaccgacctgctatccctcatgcccagcctgacttctggtgaggtggcccactgtgccaagtccttcgccttactcaagtggctcagcctgcccctgtttgaggcctttgcccagcacgtcctgaacagagcgcaggacatcaccctgccccacctgtgcagcgtacttctggcttttgcgcgtctgaacttccatccagaccaagaggatcagttcttcagcctggtacatgagaagctggggtcagagctgccaggcctggagccagccctgcaggtggacctggtgtgggccctgtgtgtgctgcagcaggcacgggaagcagagctgcaagccgtcctccaccctgaatttcacatccaatttctagggggcaagtctcagaaggatcagaacaccttccagaagctgctccacatcaacgccactgccctgctggagtaccccgagtactcgggtccccttctgcctgcctcggctgtggcccctgggccctcagcccttgacaggaaggtgacccccctgcaaaaggagctgcaggagacgctgaaggggctgctggggagcgccgacaagggcagcctcgaggtggccacgcagtatggctgggtgctggatgctgaggtgctgctggacagtgacggcgagtttctgcccgtaagggactttgtggcacctcaccttgcccagccaactgggagccagtcaccacctccagggtctaagaggctagcgttcttgcggtgggagttccccaacttcaacagccgaagcaaggacttgctgggtcgctttgttctggcccggcgacacatagtggctgcaggcttcctgatagtggacgtcccattctatgagtggctggaactcaagtctgaatggcagaaaggcgcctacctcaaggacaagatgcgcaaagcggtggctgaggagctggccaagtgacttgtgccagcagcatggactgcgtgcctctccgccggaggtctagctgtgggcggccaagaagggtcacccttgaggacaaacctctgtgcaggaccttggccagagtggggagggtggccagccactctgagggacagaacgtcctcttgtgtataataaacctttaattttggtgttggacccctggggccttcccaggcttggtcaccctctgcactgtcagcacttgtctgtctgctttgttgagcagggcgtggttctccagtctgccctgtgcactcccccgccacgcccagcccaagagggctgctttagggacagacctgggttgttacctgcctgtctctcccagcttcttccctccatgagtgcttattcacatatgccggcctcttgcgtaggggtctgtatcagccccagcaggcaggtggagtcctagaattctgaacctccagagcagaggagcttcccagggaagctgattggagattcagtgcatggctgggggttctgatggagctgtggctactgaaccacagccatcctgggaggctttctcccatcagttgtctcacacttagctgagtgaaaggcaccctgacagcatgtggtgacaggtgatgtgagggctgggtgagcacttgggaggcgctggctctgggagaggagaagatcccacttggctgacaccacggcaccaagagccaaactccatcgttgtcttcaccaccctgaccagagccttgtgctgtcatctaggaactggctgcccaaacaggaccctggcagcctccctgctgctgcggggattaccaggtgctgggaggcaacaagctttctaccttccagcctctccttagagacacctattggcagaacctgactaaatagcagtcagggaactgggttgcctccagccatacagaacagagagtaggacagtggggtggagctgagatggagaggcccacagccctcagcactgtaggctcccaaccctaggctgtttccccaaaaagaaaaagtctagtcactgctctgatgcttggccactcacccaagcattggggtagtttgtgctggcttcactgggcaccatcaggcacacccagcctgtagtttttgttttatattacctaagtcggccaggtgtggtgggatcacgcctgtaatcccagcacttagggaggctggggcgggcgaatcgcctgaggccaggaattcaagaccaacctggccaacattgtgaaaccctgtctctactaaaaatataaaaattagtcgggcatgatgacaggcacctgtaatcccagctactcaggaggctgaggcaggtgaatcacttgaacccgggaggtggaggctgcagtgagttaagattgtgccactgcactccagcctgggtaacagagcaagactctgtctcaaaaaatatatatgtgtgtgtgtgtgtgtgtatatatatgtacatgtgtatataagtatatatgtgtgtatatatgtatatatacacgtatatacacacacacccctaagtcatgattttggagcaattgtaagtggtgtagtgcttaattttggcattcacacattgattgttagcatatagaaatgggattgatttttatgtgatcttgctaaactttatgcatttttaaaattcctttggatttcctatgtagatatttatgtcctgaaaacaggaatgtatttatcctttcaaatcaatatgctttttattttgttatttatgaccacttcattaaaatataattcacatgccatacacttcacccatttaaaatgtataattaggccaggtgtggtggctcacgtctgtaatcccagcagtttgggaggccaaggccctcagatcttgagcccaggagttcaagaccaccctgggcaacaggcaaaaccctgtctctattttttaaaatacaagaattagccgcagtggcacgcacctgtcgtcccagcaacccaggaggctgaggtaggaggatcacttaagcctgggaagtcaagcctgcagtgaaccatgatagcaccactgcagtccagcctgggcgacagagtgagaccccatctcgaaaacaaaaatgtataattcagtggtttttagtctctttgcagatacatgcaaccatcaccacaatttgcacattttctaagcctcatatactgatgtgatattttggtgttttgtgactggcttcatttacttagcatattgttttcatgtttcattcatgtcgcatgtatgagtattcattcctttatttggctgaataatattccattatagtttgtgccacattttgtttatccattcatccattgatggacatgtggattgtttccaccttctggataatatgaactgatacagtttggatattttgtcccctccaaatctcatgaaataggatcaccagtgttggagaatggggcctgttaggaagtgtttggatcataggaacatctgtcataaatggcttggtgccatccttgtaatgagtgagttcttgctctatattagttcacttgaaagctggttgttgggaactcctgccctatctgttctgccctctctcgtcatgtgacatgcctgctccttgttcaccttctgtcatgagtaaaagcttcctaaggccttcccaggagccaagcagatgtcagtaccatgcttgtacagcctgcagaactgtgagccaaataaacttctttataaatta

SEQ ID NO: 294698 - DNA, 4724 bp, Homo sapiens
tcgtttccgccggcgctccgagtgacgtagggaagcgcgccgcgcacctcatggttccggggacagttagggcggcggatggaggtcagcggtggtgctcgctgcggtttggaatcacttgctaggagtcttgtctctctgccacccaggacatcatggcagctcacctggtaaagcgatgcacgtgcctcctgagagaagctgctcgtcaggcccctgccatggctccagttggccgactgagacttgcctgggtagcccataagactctgacttcctcagccacctcacccatttcccacctcccaggttccttgatggagccggtggagaaggaacgagcatctactccctacatagagaagcaggtggaccacctcatcaagaaggccacaaggccagaggagctcctggagctacttggtggcagtcacgacttggacagcaatcaagcagcaatggtacttatccggctctctcacttgctgtctgagaagccagaagataaaggcttgctcatacaggatgcccactttcatcaacttctctgtctgctcaacagtcagattgcctcggtctggcatggtaccctctcgaagctgctgggaagcctgtatgctctgggcatccccaaggcctccaaggagctgcagtcggtggagcaggaggtccgctggcgcatgcggaagctcaagtacaagcacctggccttcctggcagagtcctgtgccaccctctcacaggagcagcactcgcaggagctgctggctgagctgctcacacacctggaaaggcgttggacagaaattgaagattcccacacattagtgaccgtcatgatgaaggtgggacacctctcggagccactaatgaaccgcctggaagacaagtgcctggagttggtggagcactttggccccaatgagctgcggaaggtgctggtgatgctggcagctcagagccggcggtccgtgcccttgctgcgggccatctcctaccacctggtgcagaagcccttctctctgacgaaagatgtgctcttggacgtggcctatgcctatggcaaactcagctttcaccagacccaggtgtcccagcgcctggccaccgacctgctatccctcatgcccagcctgacttctggtgaggtggcccactgtgccaagtccttcgccttactcaagtggctcagcctgcccctgtttgaggcctttgcccagcacgtcctgaacagagcgcaggacatcaccctgccccacctgtgcagcgtacttctggcttttgcgcgtctgaacttccatccagaccaagaggatcagttcttcagcctggtacatgagaagctggggtcagagctgccaggcctggagccagccctgcaggtggacctggtgtgggccctgtgtgtgctgcagcaggcacgggaagcagagctgcaagccgtcctccaccctgaatttcacatccaatttctagggggcaagtctcagaaggatcagaacaccttccagaagctgctccacatcaacgccactgccctgctggagtaccccgagtactcgggtccccttctgcctgcctcggctgtggcccctgggccctcagcccttgacaggaaggtgacccccctgcaaaaggagctgcaggagacgctgaaggggctgctggggagcgccgacaagggcagcctcgaggtggccacgcagtatggctgggtgctggatgctgaggtgctgctggacagtgacggcgagtttctgcccgtaagggactttgtggcacctcaccttgcccagccaactgggagccagtcaccacctccagggtctaagaggctagcgttcttgcggtgggagttccccaacttcaacagccgaagcaaggacttgctgggtcgctttgttctggcccggcgacacatagtggctgcaggcttcctgatagtggacgtcccattctatgagtggctggaactcaagttgacttgtgccagcagcatggactgcgtgcctctccgccggaggtctagctgtgggcggccaagaagggtcacccttgaggacaaacctctgtgcaggaccttggccagagtggggagggtggccagccactctgagggacagaacgtcctcttgtgtataataaacctttaattttggtgttggacccctggggccttcccaggcttggtcaccctctgcactgtcagcacttgtctgtctgctttgttgagcagggcgtggttctccagtctgccctgtgcactcccccgccacgcccagcccaagagggctgctttagggacagacctgggttgttacctgcctgtctctcccagcttcttccctccatgagtgcttattcacatatgccggcctcttgcgtaggggtctgtatcagccccagcaggcaggtggagtcctagaattctgaacctccagagcagaggagcttcccagggaagctgattggagattcagtgcatggctgggggttctgatggagctgtggctactgaaccacagccatcctgggaggctttctcccatcagttgtctcacacttagctgagtgaaaggcaccctgacagcatgtggtgacaggtgatgtgagggctgggtgagcacttgggaggcgctggctctgggagaggagaagatcccacttggctgacaccacggcaccaagagccaaactccatcgttgtcttcaccaccctgaccagagccttgtgctgtcatctaggaactggctgcccaaacaggaccctggcagcctccctgctgctgcggggattaccaggtgctgggaggcaacaagctttctaccttccagcctctccttagagacacctattggcagaacctgactaaatagcagtcagggaactgggttgcctccagccatacagaacagagagtaggacagtggggtggagctgagatggagaggcccacagccctcagcactgtaggctcccaaccctaggctgtttccccaaaaagaaaaagtctagtcactgctctgatgcttggccactcacccaagcattggggtagtttgtgctggcttcactgggcaccatcaggcacacccagcctgtagtttttgttttatattacctaagtcggccaggtgtggtgggatcacgcctgtaatcccagcacttagggaggctggggcgggcgaatcgcctgaggccaggaattcaagaccaacctggccaacattgtgaaaccctgtctctactaaaaatataaaaattagtcgggcatgatgacaggcacctgtaatcccagctactcaggaggctgaggcaggtgaatcacttgaacccgggaggtggaggctgcagtgagttaagattgtgccactgcactccagcctgggtaacagagcaagactctgtctcaaaaaatatatatgtgtgtgtgtgtgtgtgtatatatatgtacatgtgtatataagtatatatgtgtgtatatatgtatatatacacgtatatacacacacacccctaagtcatgattttggagcaattgtaagtggtgtagtgcttaattttggcattcacacattgattgttagcatatagaaatgggattgatttttatgtgatcttgctaaactttatgcatttttaaaattcctttggatttcctatgtagatatttatgtcctgaaaacaggaatgtatttatcctttcaaatcaatatgctttttattttgttatttatgaccacttcattaaaatataattcacatgccatacacttcacccatttaaaatgtataattaggccaggtgtggtggctcacgtctgtaatcccagcagtttgggaggccaaggccctcagatcttgagcccaggagttcaagaccaccctgggcaacaggcaaaaccctgtctctattttttaaaatacaagaattagccgcagtggcacgcacctgtcgtcccagcaacccaggaggctgaggtaggaggatcacttaagcctgggaagtcaagcctgcagtgaaccatgatagcaccactgcagtccagcctgggcgacagagtgagaccccatctcgaaaacaaaaatgtataattcagtggtttttagtctctttgcagatacatgcaaccatcaccacaatttgcacattttctaagcctcatatactgatgtgatattttggtgttttgtgactggcttcatttacttagcatattgttttcatgtttcattcatgtcgcatgtatgagtattcattcctttatttggctgaataatattccattatagtttgtgccacattttgtttatccattcatccattgatggacatgtggattgtttccaccttctggataatatgaactgatacagtttggatattttgtcccctccaaatctcatgaaataggatcaccagtgttggagaatggggcctgttaggaagtgtttggatcataggaacatctgtcataaatggcttggtgccatccttgtaatgagtgagttcttgctctatattagttcacttgaaagctggttgttgggaactcctgccctatctgttctgccctctctcgtcatgtgacatgcctgctccttgttcaccttctgtcatgagtaaaagcttcctaaggccttcccaggagccaagcagatgtcagtaccatgcttgtacagcctgcagaactgtgagccaaataaacttctttataaatta

SEQ ID NO: 294699 - DNA, 2362 bp, Homo sapiens
tcgtttccgccggcgctccgagtgacgtagggaagcgcgccgcgcacctcatggttccggggacagttagggcggcggatggaggtcagcggtggtgctcgctgcggtttggaatcacttgctaggagtcttgtctctctgccacccaggacatcatggcagctcacctggtaaagcgatgcacgtgcctcctgagagaagctgctcgtcaggcccctgccatggctccagttggccgactgagacttgcctgggtagcccataagactctgacttcctcagccacctcacccatttcccacctcccaggttccttgatggagccggtggagaaggaacgagcatctactccctacatagagaagcaggtggaccacctcatcaagaaggccacaaggccagaggagctcctggagctacttggtggcagtcacgacttggacagcaatcaagcagcaatggtacttatccggctctctcacttgctgtctgagaagccagaagataaaggcttgctcatacaggatgcccactttcatcaacttctctgtctgctcaacagtcagattgcctcggtctggcatggtaccctctcgaagctgctgggaagcctgtatgctctgggcatccccaaggcctccaaggagctgcagtcggtggagcaggaggtccgctggcgcatgcggaagctcaagtacaagcacctggccttcctggcagagtcctgtgccaccctctcacaggagcagcactcgcaggagctgctggctgagctgctcacacacctggaaaggcgttggacagaaattgaagattcccacacattagtgaccgtcatgatgaaggtgggacacctctcggagccactaatgaaccgcctggaagacaagtgcctggagttggtggagcactttggccccaatgagctgcggaaggtgctggtgatgctggcagctcagagccggcggtccgtgcccttgctgcgggccatctcctaccacctggtgcagaagcccttctctctgacgaaagatgtgctcttggacgtggcctatgcctatggcaaactcagctttcaccagacccaggtgtcccagcgcctggccaccgacctgctatccctcatgcccagcctgacttctggtgaggtggcccactgtgccaagtccttcgccttactcaagtggctcagcctgcccctgtttgaggcctttgcccagcacgtcctgaacagagcgcaggacatcaccctgccccacctgtgcagcgtacttctggcttttgcgcgtctgaacttccatccagaccaagaggatcagttcttcagcctggtacatgagaagctggggtcagagctgccaggcctggagccagccctgcaggtggacctggtgtgggccctgtgtgtgctgcagcaggcacgggaagcagagctgcaagccgtcctccaccctgaatttcacatccaatttctagggggcaagtctcagaaggatcagaacaccttccagaagctgctccacatcaacgccactgccctgctggagtaccccgagtactcgggtccccttctgcctgcctcggctgtggcccctgggccctcagcccttgacaggaaggtgacccccctgcaaaaggagctgcaggagacgctgaaggggctgctggggagcgccgacaagggcagcctcgagatgctgaggtgctgctggacagtgacggcgagtttctgcccgtaagggactttgtggcacctcaccttgcccagccaactgggagccagtcaccacctccagggtctaagaggctagcgttcttgcggtgggagttccccaacttcaacagccgaagcaaggacttgctgggtcgctttgttctggcccggcgacacatagtggctgcaggcttcctgatagtggacccactctgagggacagaacgtcctcttgtgtataataaacctttaattttggtgttggacccctggggccttcccaggcttggtcaccctctgcactgaaaaaaaaaaaaaaaaaaaaacgtttgcggggcggaggggaggggggaaagaggagcgcagggtgagagtgagccgcaggcttcgggaggcgagggggcggggggagcagcgccgaggccgccgcctccgcctccgccgcctaggactagggggtgggggacggacaagccccgatgccgggggagacggaagagccgagacccccggagcagcaggaccaggaagggggagaggcggccaaggcggctccggaggagccccaacaacggccccctgaggcggtcgcggcggcgcctgcagggaccactagcagccgcgtgctgaggggaggtcgggaccgag

SEQ ID NO: 294700 - DNA, 4666 bp, Homo sapiens
tcgtttccgccggcgctccgagtgacgtagggaagcgcgccgcgcacctcatggttccggggacagttagggcggcggatggagggtttggaatcacttgctaggagtcttgtctctctgccacccaggacatcatggcagctcacctggtaaagcgatgcacgtgcctcctgagagaagctgctcgtcaggcccctgccatggctccagttggccgactgagacttgcctgggtagcccataagactctgacttcctcagccacctcacccatttcccacctcccaggttccttgatggagccggtggagaaggaacgagcatctactccctacatagagaagcaggtggaccacctcatcaagaaggccacaaggccagaggagctcctggagctacttggtggcagtcacgacttggacagcaatcaagcagcaatgattgcctcggtctggcatggtaccctctcgaagctgctgggaagcctgtatgctctgggcatccccaaggcctccaaggagctgcagtcggtggagcaggaggtccgctggcgcatgcggaagctcaagtacaagcacctggccttcctggcagagtcctgtgccaccctctcacaggagcagcactcgcaggagctgctggctgagctgctcacacacctggaaaggcgttggacagaaattgaagattcccacacattagtgaccgtcatgatgaaggtgggacacctctcggagccactaatgaaccgcctggaagacaagtgcctggagttggtggagcactttggccccaatgagctgcggaaggtgctggtgatgctggcagctcagagccggcggtccgtgcccttgctgcgggccatctcctaccacctggtgcagaagcccttctctctgacgaaagatgtgctcttggacgtggcctatgcctatggcaaactcagctttcaccagacccaggtgtcccagcgcctggccaccgacctgctatccctcatgcccagcctgacttctggtgaggtggcccactgtgccaagtccttcgccttactcaagtggctcagcctgcccctgtttgaggcctttgcccagcacgtcctgaacagagcgcaggacatcaccctgccccacctgtgcagcgtacttctggcttttgcgcgtctgaacttccatccagaccaagaggatcagttcttcagcctggtacatgagaagctggggtcagagctgccaggcctggagccagccctgcaggtggacctggtgtgggccctgtgtgtgctgcagcaggcacgggaagcagagctgcaagccgtcctccaccctgaatttcacatccaatttctagggggcaagtctcagaaggatcagaacaccttccagaagctgctccacatcaacgccactgccctgctggagtaccccgagtactcgggtccccttctgcctgcctcggctgtggcccctgggccctcagcccttgacaggaaggtgacccccctgcaaaaggagctgcaggagacgctgaaggggctgctggggagcgccgacaagggcagcctcgaggtggccacgcagtatggctgggtgctggatgctgaggtgctgctggacagtgacggcgagtttctgcccgtaagggactttgtggcacctcaccttgcccagccaactgggagccagtcaccacctccagggtctaagaggctagcgttcttgcggtgggagttccccaacttcaacagccgaagcaaggacttgctgggtcgctttgttctggcccggcgacacatagtggctgcaggcttcctgatagtggacgtcccattctatgagtggctggaactcaagtctgaatggcagaaaggcgcctacctcaaggacaagatgcgcaaagcggtggctgaggagctggccaagtgacttgtgccagcagcatggactgcgtgcctctccgccggaggtctagctgtgggcggccaagaagggtcacccttgaggacaaacctctgtgcaggaccttggccagagtggggagggtggccagccactctgagggacagaacgtcctcttgtgtataataaacctttaattttggtgttggacccctggggccttcccaggcttggtcaccctctgcactgtcagcacttgtctgtctgctttgttgagcagggcgtggttctccagtctgccctgtgcactcccccgccacgcccagcccaagagggctgctttagggacagacctgggttgttacctgcctgtctctcccagcttcttccctccatgagtgcttattcacatatgccggcctcttgcgtaggggtctgtatcagccccagcaggcaggtggagtcctagaattctgaacctccagagcagaggagcttcccagggaagctgattggagattcagtgcatggctgggggttctgatggagctgtggctactgaaccacagccatcctgggaggctttctcccatcagttgtctcacacttagctgagtgaaaggcaccctgacagcatgtggtgacaggtgatgtgagggctgggtgagcacttgggaggcgctggctctgggagaggagaagatcccacttggctgacaccacggcaccaagagccaaactccatcgttgtcttcaccaccctgaccagagccttgtgctgtcatctaggaactggctgcccaaacaggaccctggcagcctccctgctgctgcggggattaccaggtgctgggaggcaacaagctttctaccttccagcctctccttagagacacctattggcagaacctgactaaatagcagtcagggaactgggttgcctccagccatacagaacagagagtaggacagtggggtggagctgagatggagaggcccacagccctcagcactgtaggctcccaaccctaggctgtttccccaaaaagaaaaagtctagtcactgctctgatgcttggccactcacccaagcattggggtagtttgtgctggcttcactgggcaccatcaggcacacccagcctgtagtttttgttttatattacctaagtcggccaggtgtggtgggatcacgcctgtaatcccagcacttagggaggctggggcgggcgaatcgcctgaggccaggaattcaagaccaacctggccaacattgtgaaaccctgtctctactaaaaatataaaaattagtcgggcatgatgacaggcacctgtaatcccagctactcaggaggctgaggcaggtgaatcacttgaacccgggaggtggaggctgcagtgagttaagattgtgccactgcactccagcctgggtaacagagcaagactctgtctcaaaaaatatatatgtgtgtgtgtgtgtgtgtatatatatgtacatgtgtatataagtatatatgtgtgtatatatgtatatatacacgtatatacacacacacccctaagtcatgattttggagcaattgtaagtggtgtagtgcttaattttggcattcacacattgattgttagcatatagaaatgggattgatttttatgtgatcttgctaaactttatgcatttttaaaattcctttggatttcctatgtagatatttatgtcctgaaaacaggaatgtatttatcctttcaaatcaatatgctttttattttgttatttatgaccacttcattaaaatataattcacatgccatacacttcacccatttaaaatgtataattaggccaggtgtggtggctcacgtctgtaatcccagcagtttgggaggccaaggccctcagatcttgagcccaggagttcaagaccaccctgggcaacaggcaaaaccctgtctctattttttaaaatacaagaattagccgcagtggcacgcacctgtcgtcccagcaacccaggaggctgaggtaggaggatcacttaagcctgggaagtcaagcctgcagtgaaccatgatagcaccactgcagtccagcctgggcgacagagtgagaccccatctcgaaaacaaaaatgtataattcagtggtttttagtctctttgcagatacatgcaaccatcaccacaatttgcacattttctaagcctcatatactgatgtgatattttggtgttttgtgactggcttcatttacttagcatattgttttcatgtttcattcatgtcgcatgtatgagtattcattcctttatttggctgaataatattccattatagtttgtgccacattttgtttatccattcatccattgatggacatgtggattgtttccaccttctggataatatgaactgatacagtttggatattttgtcccctccaaatctcatgaaataggatcaccagtgttggagaatggggcctgttaggaagtgtttggatcataggaacatctgtcataaatggcttggtgccatccttgtaatgagtgagttcttgctctatattagttcacttgaaagctggttgttgggaactcctgccctatctgttctgccctctctcgtcatgtgacatgcctgctccttgttcaccttctgtcatgagtaaaagcttcctaaggccttcccaggagccaagcagatgtcagtaccatgcttgtacagcctgcagaactgtgagccaaataaacttctttataaatta

SEQ ID NO: 294701 - DNA, 4223 bp, Homo sapiens
tagtaggtagggacactggtaatctcgttcatccattattgcgcgtcactaagtagatgtagaggcatttggctaccgtaagagagtcatagttactccccccgtttacccgcgcgtcattgaatttcttcactttgacattcagagcactgggcagaaatcacatcgcgtcaacacccgccgccgggcctttcgcgatgctttgttttaattctgtaagcggatcagcgctgatcgctaagggggagcgctggccctgcagatgcctgcagccgtgtcaaattcagtacctgtcctatgcatggtaggcactggcccagaaggctgccacagaaacactgtgactcatgggccctgttcctgtgtcccaggctcagggataaatttggttacagacatcaaatatctagacctcgaggctgaggtggggtggagctgctgggtgattgctgactctctccagctaaaccctgtgatctgctctgtcctgaaggcaaactcagctttcaccagacccaggtgtcccagcgcctggccaccgacctgctatccctcatgcccagcctgacttctggtgaggtggcccactgtgccaagtccttcgccttactcaagtggctcagcctgcccctgtttgaggcctttgcccagcacgtcctgaacagagcgcaggacatcaccctgccccacctgtgcagcgtacttctggcttttgcgcgtctgaacttccatccagaccaagaggatcagttcttcagcctggtacatgagaagctggggtcagagctgccaggcctggagccagccctgcaggtggacctggtgtgggccctgtgtgtgctgcagcaggcacgggaagcagagctgcaagccgtcctccaccctgaatttcacatccaatttctagggggcaagtctcagaaggatcagaacaccttccagaagctgctccacatcaacgccactgccctgctggagtaccccgagtactcgggtccccttctgcctgcctcggctgtggcccctgggccctcagcccttgacaggaaggtgacccccctgcaaaaggagctgcaggagacgctgaaggggctgctggggagcgccgacaagggcagcctcgaggtggccacgcagtatggctgggtgctggatgctgaggtgctgctggacagtgacggcgagtttctgcccgtaagggactttgtggcacctcaccttgcccagccaactgggagccagtcaccacctccagggtctaagaggctagcgttcttgcggtgggagttccccaacttcaacagccgaagcaaggacttgctgggtcgctttgttctggcccggcgacacatagtggctgcaggcttcctgatagtggacgtcccattctatgagtggctggaactcaagtctgaatggcagaaaggcgcctacctcaaggacaagatgcgcaaagcggtggctgaggagctggccaagtgacttgtgccagcagcatggactgcgtgcctctccgccggaggtctagctgtgggcggccaagaagggtcacccttgaggacaaacctctgtgcaggaccttggccagagtggggagggtggccagccactctgagggacagaacgtcctcttgtgtataataaacctttaattttggtgttggacccctggggccttcccaggcttggtcaccctctgcactgtcagcacttgtctgtctgctttgttgagcagggcgtggttctccagtctgccctgtgcactcccccgccacgcccagcccaagagggctgctttagggacagacctgggttgttacctgcctgtctctcccagcttcttccctccatgagtgcttattcacatatgccggcctcttgcgtaggggtctgtatcagccccagcaggcaggtggagtcctagaattctgaacctccagagcagaggagcttcccagggaagctgattggagattcagtgcatggctgggggttctgatggagctgtggctactgaaccacagccatcctgggaggctttctcccatcagttgtctcacacttagctgagtgaaaggcaccctgacagcatgtggtgacaggtgatgtgagggctgggtgagcacttgggaggcgctggctctgggagaggagaagatcccacttggctgacaccacggcaccaagagccaaactccatcgttgtcttcaccaccctgaccagagccttgtgctgtcatctaggaactggctgcccaaacaggaccctggcagcctccctgctgctgcggggattaccaggtgctgggaggcaacaagctttctaccttccagcctctccttagagacacctattggcagaacctgactaaatagcagtcagggaactgggttgcctccagccatacagaacagagagtaggacagtggggtggagctgagatggagaggcccacagccctcagcactgtaggctcccaaccctaggctgtttccccaaaaagaaaaagtctagtcactgctctgatgcttggccactcacccaagcattggggtagtttgtgctggcttcactgggcaccatcaggcacacccagcctgtagtttttgttttatattacctaagtcggccaggtgtggtgggatcacgcctgtaatcccagcacttagggaggctggggcgggcgaatcgcctgaggccaggaattcaagaccaacctggccaacattgtgaaaccctgtctctactaaaaatataaaaattagtcgggcatgatgacaggcacctgtaatcccagctactcaggaggctgaggcaggtgaatcacttgaacccgggaggtggaggctgcagtgagttaagattgtgccactgcactccagcctgggtaacagagcaagactctgtctcaaaaaatatatatgtgtgtgtgtgtgtgtgtatatatatgtacatgtgtatataagtatatatgtgtgtatatatgtatatatacacgtatatacacacacacccctaagtcatgattttggagcaattgtaagtggtgtagtgcttaattttggcattcacacattgattgttagcatatagaaatgggattgatttttatgtgatcttgctaaactttatgcatttttaaaattcctttggatttcctatgtagatatttatgtcctgaaaacaggaatgtatttatcctttcaaatcaatatgctttttattttgttatttatgaccacttcattaaaatataattcacatgccatacacttcacccatttaaaatgtataattaggccaggtgtggtggctcacgtctgtaatcccagcagtttgggaggccaaggccctcagatcttgagcccaggagttcaagaccaccctgggcaacaggcaaaaccctgtctctattttttaaaatacaagaattagccgcagtggcacgcacctgtcgtcccagcaacccaggaggctgaggtaggaggatcacttaagcctgggaagtcaagcctgcagtgaaccatgatagcaccactgcagtccagcctgggcgacagagtgagaccccatctcgaaaacaaaaatgtataattcagtggtttttagtctctttgcagatacatgcaaccatcaccacaatttgcacattttctaagcctcatatactgatgtgatattttggtgttttgtgactggcttcatttacttagcatattgttttcatgtttcattcatgtcgcatgtatgagtattcattcctttatttggctgaataatattccattatagtttgtgccacattttgtttatccattcatccattgatggacatgtggattgtttccaccttctggataatatgaactgatacagtttggatattttgtcccctccaaatctcatgaaataggatcaccagtgttggagaatggggcctgttaggaagtgtttggatcataggaacatctgtcataaatggcttggtgccatccttgtaatgagtgagttcttgctctatattagttcacttgaaagctggttgttgggaactcctgccctatctgttctgccctctctcgtcatgtgacatgcctgctccttgttcaccttctgtcatgagtaaaagcttcctaaggccttcccaggagccaagcagatgtcagtaccatgcttgtacagcctgcagaactgtgagccaaataaacttctttataaatta

SEQ ID NO: 294702 - DNA, 920 bp, Homo sapiens
tcgtttccgccggcgctccgagtgacgtagggaagcgcgccgcgcacctcatggttccggggacagttagggcggcggatggaggtcagcggtggtgctcgctgcggtttggaatcacttgctaggagtcttgtctctctgccacccaggacatcatggcagctcacctggtaaagcgatgcacgtgcctcctgagagaagctgctcgtcaggcccctgccatggctccagttggccgactgagacttgcctgggtagcccataagactctgacttcctcagccacctcacccatttcccacctcccaggttccttgatggagccggtggagaaggaacgagcatctactccctacatagagaagcaggtggaccacctcatcaagaaggccacaaggccagaggagctcctggagctacttggtggcagtcacgacttggacagcaatcaagcagcaatggtacttatccggctctctcacttgctgtctgagaagccagaagataaaggcttgctcatacaggatgcccactttcatcaacttctctgtctgctcaacagtcagattgcctcggtctggcatggtaccctctcgaagctgctgggaagcctgtatgctctgggcatccccaaggcctccaaggagctgcagtcggtggagcaggaggtccgctggcgcatgcggaagctcaagtacaagcacctggccttcctggcagagtcctgtgccaccctctcacaggagcagcactcgcaggagctgctggctgagctgctcacacacctggaaaggcgttggacagaaattgaagattcccacacattagtgaccgtcatgatgaaggtgggacacctctcggagccactaatgaaccgcctggaagacaaggccattgagctgacctctgcgcggctgtgg

SEQ ID NO: 294703 - DNA, 789 bp, Homo sapiens
cagttctcaaaaaagtgtttgagaactgtttcctctgttctttcactgaccattataagtgcttccatccattttggggtagctgtagcaggtagcagcatggctgatgagactgagaatccactgagaactgtctactgaatcactgatccccctcgcaaagtggaactgtacagaaagatgacacctgcagttacgtttatgtgtgaccagtctaaactaagtttactggttggagaatatttctaaatcccttatcagaaagaagcagcttctaggtgtccccagcctctgtgggtagttgctgccaggcgaaggagtgtctgggcctgtgtaagtccttctctgttcccgacacagctcatgggccctggatggagggtcctgccattgcccctggccatgcaggctctcctcagactcagagccaggcaggaggacagcgtgctgggcagagagcttattctgtccctctgctatttctgacccacccagcacgtcctgaacagagcgcaggacatcaccctgccccacctgtgcagcgtacttctggcttttgcgcgtctgaacttccatccagaccaagaggatcagttcttcagcctggtagggcctctgggctcccactgctcgacctttatcctccccttcagctaatggctcatgaaccgtcctcccaagatcagctcgggctaggtggaggcgggaggggccactatgtgtggcatgggagggcagggggaactgattggagccaggcatcctagggattactgagaacacatgaaa

SEQ ID NO: 294704 - DNA, 243 bp, Homo sapiens
cgatggctccgctcagaatcccgataggaaggcgtcggggagggcgattcccactgtgagcgccttgaggagccatagccactgtcctcttcctcccaggaaccatatccaccccaagtgcagagctgtgcccacctgactcagaaccaactatcccaagatgttcatggtagaatcgggaattctgactcaatgcctcagcaatctcactgaagacgagagtcactcactctgccttttata

SEQ ID NO: 294705 - DNA, 469 bp, Homo sapiens
aaataaaaacaaattcatagcagagctggaaattgaggttaaaaagagaatttaaaaaataaatgcgttttcctagaacagtataaattttcagttataaagggattttgataacttgagtaattcattttccctgccccagattttcttaatgatccagaccacctgactttagattaaattaagcttgctgagatccttttgtggatcataagcctgatgattgggttttcacactgtgtgagacaggcctctctcaaaccttgttgcattgtgcacacattacctgtctgacatgggggaagaaattcagcttgatgagataccaaaatgtgaggtgtattctcttgacagagagaaacttatgctaaaaacatttctgcatttttgggtgacttacttaaatatgggactgttatccacccttttacagctggctttagagtagaaggtctcaagtagcatgcgt

SEQ ID NO: 294706 - DNA, 784 bp, Homo sapiens
cctctccattacactggctatgggcctcagtttccccatatgttttttagaggttgtggtgtgacctcttaagatctttgcagtaaaatcagctcagattcaaatccctgctcccctgtctactagccatgtgactttgagcaagactttgagcaagcctcagtttccccatctgttaaaagggaatcataatactcttcatggtggtgagaattccatacagtaacgagtgtgctgggcacactggtaggtgctcagtagcttcactctgcctggcctcccttttggaccaccagggctgctcacagcttggcaacaacattccttcctcccagcttttgcacaagctgttccctctgcctggaatgacggaaccgtggcacaggctccactggtgttttaagagggttaagcctcttcttcaaatggtgccattttctctccagagtgacccccagcctcgagtgttttagttgttagaagggagtgaggtggacacatgggcctggcatagagccagcagccccatcctcttcttcccggcctcttttgcatccacttggcttccctgccccccatgcgtggattgccagctggcaatccacggatggagtgcagtggcacaatctcggctcactgcaatctctgcctcccaggttcaagtgattctcctgtcccagcctcctgagtagctgggactacaggtgcgctccaccatacctggctaatttttgtatttttagtagagaagggttttgccatgttggccatgcgtggatttaat

SEQ ID NO: 294707 - DNA, 595 bp, Homo sapiens
  misc_feature (75)..(75): n is a, c, g, or t
ccacagtggagtggaggaatctccaaggcaggggtccatgccatgcgtggattgccagctggcaatccacgcatngactctgcctggcctcccttttggaccaccagggctgctcacagcttggcaacaacattccttcctcccagcttttgcacaagctgttccctctgcctggaatgacggaaccgtggcacaggctccactggtgttttaagagggttaagcctcttcttcaaatggtgccattttctctccagagtgacccccagcctcgagtgttttagttgttagaagggagtgaggtggacacatgggcctggcatagagccagcagccccatcctcttcttcccggcctcttttgcatccacttggcttccctgccccccatgcgtggattgccagctggcaatccacggatggagtgcagtggcacaatctcggctcactgcaatctctgcctcccaggttcaagtgattctcctgtcccagcctcctgagtagctgggactacaggtgcgctccaccatacctggctaatttttgtatttttagtagagaagggttttgccatgttggccatgcgtggatttaat

SEQ ID NO: 294708 - DNA, 567 bp, Homo sapiens
atctgtcactcccgctgaggctgggaagattgaaaggggccatggagaggctgcagtcacaatgaggcctccagattcatgtcatcaaagtgcttcatgatgactggattttcacaccatttatccaagggccctagtcaatggcagcagcaagaatgaaagtagacacattggaagctagagagtcactgggtgacttttggaggtagcaacaagctcatgaagaaggcattcagtggcttgcactccccacccatcctctcaagtgttgaaaagtctcctctagagctttggaaggctgaatgcactaaacatgaagagcttgaaagcgaagttcaggaagagtgacgtaaattaaataaaactcatagagtgcaaagagacttcgacagaaaactagctgttggccagagtgaaagtcctggtcatccgacttccgagaaacctccttcaacctcatcgtctgctggctgtatgttatgcagcctacatatctcccgtggctttcagctaaggagaaaaaggcaattaaatggaaaatgttgcccaattcagcagaaaggggtt

SEQ ID NO: 294709 - DNA, 4902 bp, Homo sapiens
gggaagcggcgggcggggtggagcagccagctgggtccggggagcgccgccgccgcctcgatggggtgttgaaaagtctcctctagagctttggaaggctgaatgcactaaacatgaagagcttgaaagcgaagttcaggaagagtgacaccaatgagtggaacaagaatgatgaccggctactgcaggccgtggagaatggagatgcggagaaggtggcctcactgctcggcaagaagggggccagtgccaccaaacacgacagtgagggcaagaccgctttccatcttgctgctgcaaaaggacacgtggaatgcctcagggtcatgattacacatggtgtggatgtgacagcccaagatactaccggacacagcgccttacatctcgcagccaagaacagccaccatgaatgcatcaggaagctgcttcagtctaaatgcccagccgaaagtgtcgacagctctgggaaaacagctttacattatgcagcggctcagggctgccttcaagctgtgcagattctctgcgaacacaagagccccataaacctcaaagatttggatgggaatataccgctgcttcttgctgtacaaaatggtcacagtgagatctgtcactttctcctggatcatggagcagatgtcaattccaggaacaaaagtggaagaactgctctcatgctggcctgtgagattggcagctctaacgctgtggaagccttaattaaaaagggtgcagacctaaaccttgtagattctcttggatacaatgccttacattattccaaactctcagaaaatgcaggaattcaaagccttctattatcaaaaatctctcaggatgctgatttaaagaccccaacaaaaccaaagcagcatgaccaagtctctaaaataagctcagaaagaagtggaactccaaaaaaacgcaaagctccaccacctcctatcagtcctacccagttgagtgatgtctcttccccaagatcaataacttcgactccactatcgggaaaggaatcggtattttttgctgaaccacccttcaaggctgagatcagttctatacgagaaaacaaagacagactaagtgacagtactacaggtgctgatagcttattggatataagttctgaagctgaccaacaagatcttctctctctattgcaagcaaaagttgcttcccttaccttacacaataaggagttacaagataaattacaggccaaatcacccaaggaggcggaagcagacctaagctttgactcataccattccacccaaactgacttgggcccatccctgggaaaacctggtgaaacctctcccccagactccaaatcatctccatctgtcttaatacattctttaggtaaatccactactgacaatgatgtcagaattcagcaactgcaagagattttgcaagatctacagaagagattagagagctctgaagcagagagaaaacagctacaggtcgaactccaatcccgaagggcagaactggtatgcttaaacaacactgagatttcagagaacagctctgacctcagccagaaacttaaagaaactcagagcaaatacgaggaggctatgaaagaagtccttagtgtgcagaagcagatgaaactcggtcttgtctcacctgaaagcatggataattattcacatttccacgagctgagggtcacggaagaggaaataaatgtgctaaagcaggatctgcagaatgcattagaagaaagtgaaagaaataaagagaaagtgagagagttagaggaaaaactggtagagagggagaaaggtacagtgattaagccacctgtggaagagtacgaggaaatgaaaagttcatattgctctgttattgagaatatgaataaggagaaagcatttttgtttgagaaataccaagaagcccaagaagaaatcatgaaattaaaagacacactaaaaagtcagatgacacaggaagccagtgatgaagctgaggacatgaaagaagccatgaataggatgatagatgaactcaataaacaggtgagcgagctgtcacagctgtacaaagaagcccaggctgagctggaggattacaggaagaggaaatctctagaggatgtcacagctgaatatatccataaagcagagcatgagaaactgatgcaattgacaaacgtgtccagggctaaagcagaagatgcactgtctgaaatgaagtctcagtattcaaaagtgttgaatgagttgacccagctcaaacaactggtggatgcacaaaaagagaactctgtctctatcacagaacatttgcaagtgataaccacgctgcggactgcagcaaaagagatggaagaaaaaataagcaatcttaaggaacaccttgcaagcaaggaagtggaagtagcaaagctggagaaacaactcttagaagagaaagctgctatgactgatgcaatggtacctcggtcttcctatgaaaaactccagtcatccttagagagtgaagtgagtgtgttggcatcgaaattaaaggaatctgtgaaagagaaagagaaggtccattcagaggttgtccagattagaagtgaggtctcacaggtgaaaagagaaaaggaaaatattcagactctcttgaaatccaaagagcaagaagtaaatgaacttctgcaaaaattccagcaagctcaggaagaacttgcagaaatgaaaagatacgctgagagctcttcaaaactggaggaagataaagataaaaagataaatgagatgtcgaaggaagtcaccaaattgaaggaggccttgaacagcctctcccagctctcctactcaacaagctcatccaaaaggcagagtcagcagctggaggcgctgcagcagcaagtcaaacagctccagaaccagctggcggaatgcaagaaacaacaccaggaggtcatatcagtttacagaatgcatcttctgtatgctgtgcagggccagatggatgaagatgtccagaaagtactgaagcaaatccttaccatgtgtaaaaaccagtctcaaaagaagtaaagtggattccttggcaggacactgccccttgtcatctgtctttgtgttagatccagagttgtcggcagccgctgccattgttctcattcgtggtatgcactgtggcctagcgtagcttcttccctttccaaaggtttctgaggacttctcccaggagaagactgcccgcctcagaactgcttagagacttcaaaccagcagaggtgaaagtccctgtcatcccttcagattccagagctgggatcagccatgcccagaggtctggtcctgatgctggcaggggggccccctcctccatccctgactggctgagtggctttatcaccaccgagtgatgtgctgaggcctcctgcagtgaatgctccttccattcctgtactcgggcagtgccattcagcacaggagagctctttttgcctttggctttcaattccaaaacatgatttaatttctaactaaattagtatggcactagttatgaagtatctgcttaaaacccttcatcatgatatcctgtggatttaaaaactctaattccatgttttcttcccatctgccttatatatctcatcaccctgcttatcaatattcagtttgatgagcactattaactaaaatatgaaacttaaaaacaaaagcaagttgtccttaaaagttctttttttaagtaaattgttgacatactgcaaattttctatgcaaacttgcctcctgctgttatctgtgaagctcaggaaatccaaacatttgtgtttcaacaagggacagtaaactgtgtgtttacagccaaaagaaatgcctcatagttcttaacctcaacttttgtagaagtatttttttctctgtaatatttttattggctcataaagatgttttcatatctgaactcctaaataagtgaaattacagtagattatattaacaaaatactttttaggtagccatgcttgagactttttaaaaatataactttttccttaaagttttcagctatagcaaaaggtagttatgtatgccagacctaatatgagctgccaccaacacccctagaactttcagccatggtgtcttcagaattgtagcgcatttctgaatctagcaaatcctccttttacccgttgaatgttttgaatgccctgactctaccagcgcccataaatgatctctagaaggactgttagtaccaatctgtttttcaactttgaagctaaaaaccctgatatggtaatattatggtgcatagcagaggtctcggaaaaaaaatatttctgttcactttactttcaggttaaaaatgtttctaacacgcttgcaacttcccttatggcattaatcttgttgagggagagagacagaatcctggactctccaaagtatttaactgaaagtagggcctgctctgacagggcccatgtcccacaaggctgcttggcctcagtgggtgcttggctgtgctggatgatatgttgatctgtattggataaggaccaatgacagcaaagcaaaaatggctttaaagcttggtgttacttttcttaagttgtttaattatagttaagcaatttcaaaaatgctccaaagaaatgtgaaaggaccttttgtcacagcacttcagaaaatacacaacagccccttctgcccccgcacagaaatgctgcagagtatataaaacttgagacatttttgtaggatgcctgacgaggtgtagccttttatcttgtttccggatgcatatttattacgagtactctggttaaatattgaaaagttatatgctgtagtttttagtattttgtctttgtaatttacagaagttattggagaaaataaacttgtttcattttgc

SEQ ID NO: 294710 - DNA, 5043 bp, Homo sapiens
ggagttgggaggctcccggcgcggggtcccgggctcgtgtccccgcctttgtgtctggagctcgggcgcgggaggcgctggggacggcgcccgggcggagcggctgagcgggctgcagccggggtcccgccacctctccctggtccaccgccggcagcccactgtctgcggagagcagatctggggacaagaggaaggagaggaaggtgttgaaaagtctcctctagagctttggaaggctgaatgcactaaacatgaagagcttgaaagcgaagttcaggaagagtgacaccaatgagtggaacaagaatgatgaccggctactgcaggccgtggagaatggagatgcggagaaggtggcctcactgctcggcaagaagggggccagtgccaccaaacacgacagtgagggcaagaccgctttccatcttgctgctgcaaaaggacacgtggaatgcctcagggtcatgattacacatggtgtggatgtgacagcccaagatactaccggacacagcgccttacatctcgcagccaagaacagccaccatgaatgcatcaggaagctgcttcagtctaaatgcccagccgaaagtgtcgacagctctgggaaaacagctttacattatgcagcggctcagggctgccttcaagctgtgcagattctctgcgaacacaagagccccataaacctcaaagatttggatgggaatataccgctgcttcttgctgtacaaaatggtcacagtgagatctgtcactttctcctggatcatggagcagatgtcaattccaggaacaaaagtggaagaactgctctcatgctggcctgtgagattggcagctctaacgctgtggaagccttaattaaaaagggtgcagacctaaaccttgtagattctcttggatacaatgccttacattattccaaactctcagaaaatgcaggaattcaaagccttctattatcaaaaatctctcaggatgctgatttaaagaccccaacaaaaccaaagcagcatgaccaagtctctaaaataagctcagaaagaagtggaactccaaaaaaacgcaaagctccaccacctcctatcagtcctacccagttgagtgatgtctcttccccaagatcaataacttcgactccactatcgggaaaggaatcggtattttttgctgaaccacccttcaaggctgagatcagttctatacgagaaaacaaagacagactaagtgacagtactacaggtgctgatagcttattggatataagttctgaagctgaccaacaagatcttctctctctattgcaagcaaaagttgcttcccttaccttacacaataaggagttacaagataaattacaggccaaatcacccaaggaggcggaagcagacctaagctttgactcataccattccacccaaactgacttgggcccatccctgggaaaacctggtgaaacctctcccccagactccaaatcatctccatctgtcttaatacattctttaggtaaatccactactgacaatgatgtcagaattcagcaactgcaagagattttgcaagatctacagaagagattagagagctctgaagcagagagaaaacagctacaggtcgaactccaatcccgaagggcagaactggtatgcttaaacaacactgagatttcagagaacagctctgacctcagccagaaacttaaagaaactcagagcaaatacgaggaggctatgaaagaagtccttagtgtgcagaagcagatgaaactcggtcttgtctcacctgaaagcatggataattattcacatttccacgagctgagggtcacggaagaggaaataaatgtgctaaagcaggatctgcagaatgcattagaagaaagtgaaagaaataaagagaaagtgagagagttagaggaaaaactggtagagagggagaaaggtacagtgattaagccacctgtggaagagtacgaggaaatgaaaagttcatattgctctgttattgagaatatgaataaggagaaagcatttttgtttgagaaataccaagaagcccaagaagaaatcatgaaattaaaagacacactaaaaagtcagatgacacaggaagccagtgatgaagctgaggacatgaaagaagccatgaataggatgatagatgaactcaataaacaggtgagcgagctgtcacagctgtacaaagaagcccaggctgagctggaggattacaggaagaggaaatctctagaggatgtcacagctgaatatatccataaagcagagcatgagaaactgatgcaattgacaaacgtgtccagggctaaagcagaagatgcactgtctgaaatgaagtctcagtattcaaaagtgttgaatgagttgacccagctcaaacaactggtggatgcacaaaaagagaactctgtctctatcacagaacatttgcaagtgataaccacgctgcggactgcagcaaaagagatggaagaaaaaataagcaatcttaaggaacaccttgcaagcaaggaagtggaagtagcaaagctggagaaacaactcttagaagagaaagctgctatgactgatgcaatggtacctcggtcttcctatgaaaaactccagtcatccttagagagtgaagtgagtgtgttggcatcgaaattaaaggaatctgtgaaagagaaagagaaggtccattcagaggttgtccagattagaagtgaggtctcacaggtgaaaagagaaaaggaaaatattcagactctcttgaaatccaaagagcaagaagtaaatgaacttctgcaaaaattccagcaagctcaggaagaacttgcagaaatgaaaagatacgctgagagctcttcaaaactggaggaagataaagataaaaagataaatgagatgtcgaaggaagtcaccaaattgaaggaggccttgaacagcctctcccagctctcctactcaacaagctcatccaaaaggcagagtcagcagctggaggcgctgcagcagcaagtcaaacagctccagaaccagctggcggaatgcaagaaacaacaccaggaggtcatatcagtttacagaatgcatcttctgtatgctgtgcagggccagatggatgaagatgtccagaaagtactgaagcaaatccttaccatgtgtaaaaaccagtctcaaaagaagtaaagtggattccttggcaggacactgccccttgtcatctgtctttgtgttagatccagagttgtcggcagccgctgccattgttctcattcgtggtatgcactgtggcctagcgtagcttcttccctttccaaaggtttctgaggacttctcccaggagaagactgcccgcctcagaactgcttagagacttcaaaccagcagaggtgaaagtccctgtcatcccttcagattccagagctgggatcagccatgcccagaggtctggtcctgatgctggcaggggggccccctcctccatccctgactggctgagtggctttatcaccaccgagtgatgtgctgaggcctcctgcagtgaatgctccttccattcctgtactcgggcagtgccattcagcacaggagagctctttttgcctttggctttcaattccaaaacatgatttaatttctaactaaattagtatggcactagttatgaagtatctgcttaaaacccttcatcatgatatcctgtggatttaaaaactctaattccatgttttcttcccatctgccttatatatctcatcaccctgcttatcaatattcagtttgatgagcactattaactaaaatatgaaacttaaaaacaaaagcaagttgtccttaaaagttctttttttaagtaaattgttgacatactgcaaattttctatgcaaacttgcctcctgctgttatctgtgaagctcaggaaatccaaacatttgtgtttcaacaagggacagtaaactgtgtgtttacagccaaaagaaatgcctcatagttcttaacctcaacttttgtagaagtatttttttctctgtaatatttttattggctcataaagatgttttcatatctgaactcctaaataagtgaaattacagtagattatattaacaaaatactttttaggtagccatgcttgagactttttaaaaatataactttttccttaaagttttcagctatagcaaaaggtagttatgtatgccagacctaatatgagctgccaccaacacccctagaactttcagccatggtgtcttcagaattgtagcgcatttctgaatctagcaaatcctccttttacccgttgaatgttttgaatgccctgactctaccagcgcccataaatgatctctagaaggactgttagtaccaatctgtttttcaactttgaagctaaaaaccctgatatggtaatattatggtgcatagcagaggtctcggaaaaaaaatatttctgttcactttactttcaggttaaaaatgtttctaacacgcttgcaacttcccttatggcattaatcttgttgagggagagagacagaatcctggactctccaaagtatttaactgaaagtagggcctgctctgacagggcccatgtcccacaaggctgcttggcctcagtgggtgcttggctgtgctggatgatatgttgatctgtattggataaggaccaatgacagcaaagcaaaaatggctttaaagcttggtgttacttttcttaagttgtttaattatagttaagcaatttcaaaaatgctccaaagaaatgtgaaaggaccttttgtcacagcacttcagaaaatacacaacagccccttctgcccccgcacagaaatgctgcagagtatataaaacttgagacatttttgtaggatgcctgacgaggtgtagccttttatcttgtttccggatgcatatttattacgagtactctggttaaatattgaaaagttatatgctgtagtttttagtattttgtctttgtaatttacagaagttattggagaaaataaacttgtttcattttgc

SEQ ID NO: 294711 - DNA, 768 bp, Homo sapiens
gggaagcggcgggcggggtggagcagccagctgggtccggggagcgccgccgccgcctcgatggggtgttgaaaagtctcctctagagctttggaaggctgaatgcactaaacatgaagagcttgaaagcgaagttcaggaagagtgacaccaatgagtggaacaagaatgatgaccggctactgcaggccgtggagaatggagatgcggagaaggtggcctcactgctcggcaagaagggggccagtgccaccaaacacgacagtgagggcaagaccgcgtaagctgaaacactggtttgcagatatgctggttctgggtttttggggtgttctctggaatccttagtatccataggggaatttcacacgtgctccctctccactcccatgttgaaatatgtaagaagatattttaatctagtgcctttctctccaaattccaagtcacatatggagctctaccttgaatgggtatacatgttcccaagtataagcaaaggttttacctcctaagattgcaaccaattgtagatgagacatgaattctctcttcgataagaaatagcataaaagagaaaaaagtattttcctataaccctcaaaccttactgtgtatttatcttaaactacttgtttatttatttgatcttccttaacatagatcattaagtacatgagtagtatgattttgctttatggtttgctgtatgtagtactcttccttgccataattaaagctgtatatttgattaagtatttgtgtgtg

SEQ ID NO: 294712 - DNA, 507 bp, Homo sapiens
atctgtcactcccgctgaggctgggaagattgaaaggggccatggagaggctgcagtcacaatgaggcctccagattcatgtcatcaaagtgcttcatgatgactggattttcacaccatttatccaagggccctagtcaatggcagcagcaagaatgaaagtagacacattggaagctagagagtcactgggtgacttttggaggtgttgaaaagtctcctctagagctttggaaggctgaatgcactaaacatgaagagcttgaaagcgaagttcaggaagagtgacgtaaattaaataaaactcatagagtgcaaagagacttcgacagaaaactagctgttggccagagtgaaagtcctggtcatccgacttccgagaaacctccttcaacctcatcgtctgctggctgtatgttatgcagcctacatatctcccgtggctttcagctaaggagaaaaaggcaattaaatggaaaatgttgcccaattcagcagaaaggggtt

SEQ ID NO: 294713 - DNA, 377 bp, Homo sapiens
tttcttttttagttgagtgatgtctcttccccaagatcaataacttcgactccactatcgggaaaggaatcggtattttttgctgaaccacccttcaaggtatttcctttctgtattcagttttgttactgtattttaagatacatgatagacttgctttaagttatataacactgggaaaaacagaatatacttctgaatcattggttcacaaccttttcaccatgaagtaccccttgattattttttctggcatggaccccataaagcaagaatgtgtacagctagtttgtatccataataatttaaaatttttaaaaaatcattgagtgaataaattaaatttacaaaccaataattgattttcttcatttaaa

SEQ ID NO: 294714 - DNA, 5152 bp, Homo sapiens
atctgtcactcccgctgaggctgggaagattgaaaggggccatggagaggctgcagtcacaatgaggcctccagattcatgtcatcaaagtgcttcatgatgactggattttcacaccatttatccaagggccctagtcaatggcagcagcaagaatgaaagtagacacattggaagctagagagtcactgggtgacttttggaggtagcaacaagctcatgaagaaggcattcagtggcttgcactccccacccatcctctcaactacatgcgaagttttcacatcttgtacatttccaaatttaatgaaaaaggtgttgaaaagtctcctctagagctttggaaggctgaatgcactaaacatgaagagcttgaaagcgaagttcaggaagagtgacaccaatgagtggaacaagaatgatgaccggctactgcaggccgtggagaatggagatgcggagaaggtggcctcactgctcggcaagaagggggccagtgccaccaaacacgacagtgagggcaagaccgctttccatcttgctgctgcaaaaggacacgtggaatgcctcagggtcatgattacacatggtgtggatgtgacagcccaagatactaccggacacagcgccttacatctcgcagccaagaacagccaccatgaatgcatcaggaagctgcttcagtctaaatgcccagccgaaagtgtcgacagctctgggaaaacagctttacattatgcagcggctcagggctgccttcaagctgtgcagattctctgcgaacacaagagccccataaacctcaaagatttggatgggaatataccgctgcttcttgctgtacaaaatggtcacagtgagatctgtcactttctcctggatcatggagcagatgtcaattccaggaacaaaagtggaagaactgctctcatgctggcctgtgagattggcagctctaacgctgtggaagccttaattaaaaagggtgcagacctaaaccttgtagattctcttggatacaatgccttacattattccaaactctcagaaaatgcaggaattcaaagccttctattatcaaaaatctctcaggatgctgatttaaagaccccaacaaaaccaaagcagcatgaccaagtctctaaaataagctcagaaagaagtggaactccaaaaaaacgcaaagctccaccacctcctatcagtcctacccagttgagtgatgtctcttccccaagatcaataacttcgactccactatcgggaaaggaatcggtattttttgctgaaccacccttcaaggctgagatcagttctatacgagaaaacaaagacagactaagtgacagtactacaggtgctgatagcttattggatataagttctgaagctgaccaacaagatcttctctctctattgcaagcaaaagttgcttcccttaccttacacaataaggagttacaagataaattacaggccaaatcacccaaggaggcggaagcagacctaagctttgactcataccattccacccaaactgacttgggcccatccctgggaaaacctggtgaaacctctcccccagactccaaatcatctccatctgtcttaatacattctttaggtaaatccactactgacaatgatgtcagaattcagcaactgcaagagattttgcaagatctacagaagagattagagagctctgaagcagagagaaaacagctacaggtcgaactccaatcccgaagggcagaactggtatgcttaaacaacactgagatttcagagaacagctctgacctcagccagaaacttaaagaaactcagagcaaatacgaggaggctatgaaagaagtccttagtgtgcagaagcagatgaaactcggtcttgtctcacctgaaagcatggataattattcacatttccacgagctgagggtcacggaagaggaaataaatgtgctaaagcaggatctgcagaatgcattagaagaaagtgaaagaaataaagagaaagtgagagagttagaggaaaaactggtagagagggagaaaggtacagtgattaagccacctgtggaagagtacgaggaaatgaaaagttcatattgctctgttattgagaatatgaataaggagaaagcatttttgtttgagaaataccaagaagcccaagaagaaatcatgaaattaaaagacacactaaaaagtcagatgacacaggaagccagtgatgaagctgaggacatgaaagaagccatgaataggatgatagatgaactcaataaacaggtgagcgagctgtcacagctgtacaaagaagcccaggctgagctggaggattacaggaagaggaaatctctagaggatgtcacagctgaatatatccataaagcagagcatgagaaactgatgcaattgacaaacgtgtccagggctaaagcagaagatgcactgtctgaaatgaagtctcagtattcaaaagtgttgaatgagttgacccagctcaaacaactggtggatgcacaaaaagagaactctgtctctatcacagaacatttgcaagtgataaccacgctgcggactgcagcaaaagagatggaagaaaaaataagcaatcttaaggaacaccttgcaagcaaggaagtggaagtagcaaagctggagaaacaactcttagaagagaaagctgctatgactgatgcaatggtacctcggtcttcctatgaaaaactccagtcatccttagagagtgaagtgagtgtgttggcatcgaaattaaaggaatctgtgaaagagaaagagaaggtccattcagaggttgtccagattagaagtgaggtctcacaggtgaaaagagaaaaggaaaatattcagactctcttgaaatccaaagagcaagaagtaaatgaacttctgcaaaaattccagcaagctcaggaagaacttgcagaaatgaaaagatacgctgagagctcttcaaaactggaggaagataaagataaaaagataaatgagatgtcgaaggaagtcaccaaattgaaggaggccttgaacagcctctcccagctctcctactcaacaagctcatccaaaaggcagagtcagcagctggaggcgctgcagcagcaagtcaaacagctccagaaccagctggcggaatgcaagaaacaacaccaggaggtcatatcagtttacagaatgcatcttctgtatgctgtgcagggccagatggatgaagatgtccagaaagtactgaagcaaatccttaccatgtgtaaaaaccagtctcaaaagaagtaaagtggattccttggcaggacactgccccttgtcatctgtctttgtgttagatccagagttgtcggcagccgctgccattgttctcattcgtggtatgcactgtggcctagcgtagcttcttccctttccaaaggtttctgaggacttctcccaggagaagactgcccgcctcagaactgcttagagacttcaaaccagcagaggtgaaagtccctgtcatcccttcagattccagagctgggatcagccatgcccagaggtctggtcctgatgctggcaggggggccccctcctccatccctgactggctgagtggctttatcaccaccgagtgatgtgctgaggcctcctgcagtgaatgctccttccattcctgtactcgggcagtgccattcagcacaggagagctctttttgcctttggctttcaattccaaaacatgatttaatttctaactaaattagtatggcactagttatgaagtatctgcttaaaacccttcatcatgatatcctgtggatttaaaaactctaattccatgttttcttcccatctgccttatatatctcatcaccctgcttatcaatattcagtttgatgagcactattaactaaaatatgaaacttaaaaacaaaagcaagttgtccttaaaagttctttttttaagtaaattgttgacatactgcaaattttctatgcaaacttgcctcctgctgttatctgtgaagctcaggaaatccaaacatttgtgtttcaacaagggacagtaaactgtgtgtttacagccaaaagaaatgcctcatagttcttaacctcaacttttgtagaagtatttttttctctgtaatatttttattggctcataaagatgttttcatatctgaactcctaaataagtgaaattacagtagattatattaacaaaatactttttaggtagccatgcttgagactttttaaaaatataactttttccttaaagttttcagctatagcaaaaggtagttatgtatgccagacctaatatgagctgccaccaacacccctagaactttcagccatggtgtcttcagaattgtagcgcatttctgaatctagcaaatcctccttttacccgttgaatgttttgaatgccctgactctaccagcgcccataaatgatctctagaaggactgttagtaccaatctgtttttcaactttgaagctaaaaaccctgatatggtaatattatggtgcatagcagaggtctcggaaaaaaaatatttctgttcactttactttcaggttaaaaatgtttctaacacgcttgcaacttcccttatggcattaatcttgttgagggagagagacagaatcctggactctccaaagtatttaactgaaagtagggcctgctctgacagggcccatgtcccacaaggctgcttggcctcagtgggtgcttggctgtgctggatgatatgttgatctgtattggataaggaccaatgacagcaaagcaaaaatggctttaaagcttggtgttacttttcttaagttgtttaattatagttaagcaatttcaaaaatgctccaaagaaatgtgaaaggaccttttgtcacagcacttcagaaaatacacaacagccccttctgcccccgcacagaaatgctgcagagtatataaaacttgagacatttttgtaggatgcctgacgaggtgtagccttttatcttgtttccggatgcatatttattacgagtactctggttaaatattgaaaagttatatgctgtagtttttagtattttgtctttgtaatttacagaagttattggagaaaataaacttgtttcattttgc

SEQ ID NO: 294715 - DNA, 4787 bp, Homo sapiens
ggccttcttgggtgtctccatggtgaaggggaagaccaatgagtggaacaagaatgatgaccggctactgcaggccgtggagaatggagatgcggagaaggtggcctcactgctcggcaagaagggggccagtgccaccaaacacgacagtgagggcaagaccgctttccatcttgctgctgcaaaaggacacgtggaatgcctcagggtcatgattacacatggtgtggatgtgacagcccaagatactaccggacacagcgccttacatctcgcagccaagaacagccaccatgaatgcatcaggaagctgcttcagtctaaatgcccagccgaaagtgtcgacagctctgggaaaacagctttacattatgcagcggctcagggctgccttcaagctgtgcagattctctgcgaacacaagagccccataaacctcaaagatttggatgggaatataccgctgcttcttgctgtacaaaatggtcacagtgagatctgtcactttctcctggatcatggagcagatgtcaattccaggaacaaaagtggaagaactgctctcatgctggcctgtgagattggcagctctaacgctgtggaagccttaattaaaaagggtgcagacctaaaccttgtagattctcttggatacaatgccttacattattccaaactctcagaaaatgcaggaattcaaagccttctattatcaaaaatctctcaggatgctgatttaaagaccccaacaaaaccaaagcagcatgaccaagtctctaaaataagctcagaaagaagtggaactccaaaaaaacgcaaagctccaccacctcctatcagtcctacccagttgagtgatgtctcttccccaagatcaataacttcgactccactatcgggaaaggaatcggtattttttgctgaaccacccttcaaggctgagatcagttctatacgagaaaacaaagacagactaagtgacagtactacaggtgctgatagcttattggatataagttctgaagctgaccaacaagatcttctctctctattgcaagcaaaagttgcttcccttaccttacacaataaggagttacaagataaattacaggccaaatcacccaaggaggcggaagcagacctaagctttgactcataccattccacccaaactgacttgggcccatccctgggaaaacctggtgaaacctctcccccagactccaaatcatctccatctgtcttaatacattctttaggtaaatccactactgacaatgatgtcagaattcagcaactgcaagagattttgcaagatctacagaagagattagagagctctgaagcagagagaaaacagctacaggtcgaactccaatcccgaagggcagaactggtatgcttaaacaacactgagatttcagagaacagctctgacctcagccagaaacttaaagaaactcagagcaaatacgaggaggctatgaaagaagtccttagtgtgcagaagcagatgaaactcggtcttgtctcacctgaaagcatggataattattcacatttccacgagctgagggtcacggaagaggaaataaatgtgctaaagcaggatctgcagaatgcattagaagaaagtgaaagaaataaagagaaagtgagagagttagaggaaaaactggtagagagggagaaaggtacagtgattaagccacctgtggaagagtacgaggaaatgaaaagttcatattgctctgttattgagaatatgaataaggagaaagcatttttgtttgagaaataccaagaagcccaagaagaaatcatgaaattaaaagacacactaaaaagtcagatgacacaggaagccagtgatgaagctgaggacatgaaagaagccatgaataggatgatagatgaactcaataaacaggtgagcgagctgtcacagctgtacaaagaagcccaggctgagctggaggattacaggaagaggaaatctctagaggatgtcacagctgaatatatccataaagcagagcatgagaaactgatgcaattgacaaacgtgtccagggctaaagcagaagatgcactgtctgaaatgaagtctcagtattcaaaagtgttgaatgagttgacccagctcaaacaactggtggatgcacaaaaagagaactctgtctctatcacagaacatttgcaagtgataaccacgctgcggactgcagcaaaagagatggaagaaaaaataagcaatcttaaggaacaccttgcaagcaaggaagtggaagtagcaaagctggagaaacaactcttagaagagaaagctgctatgactgatgcaatggtacctcggtcttcctatgaaaaactccagtcatccttagagagtgaagtgagtgtgttggcatcgaaattaaaggaatctgtgaaagagaaagagaaggtccattcagaggttgtccagattagaagtgaggtctcacaggtgaaaagagaaaaggaaaatattcagactctcttgaaatccaaagagcaagaagtaaatgaacttctgcaaaaattccagcaagctcaggaagaacttgcagaaatgaaaagatacgctgagagctcttcaaaactggaggaagataaagataaaaagataaatgagatgtcgaaggaagtcaccaaattgaaggaggccttgaacagcctctcccagctctcctactcaacaagctcatccaaaaggcagagtcagcagctggaggcgctgcagcagcaagtcaaacagctccagaaccagctggcggaatgcaagaaacaacaccaggaggtcatatcagtttacagaatgcatcttctgtatgctgtgcagggccagatggatgaagatgtccagaaagtactgaagcaaatccttaccatgtgtaaaaaccagtctcaaaagaagtaaagtggattccttggcaggacactgccccttgtcatctgtctttgtgttagatccagagttgtcggcagccgctgccattgttctcattcgtggtatgcactgtggcctagcgtagcttcttccctttccaaaggtttctgaggacttctcccaggagaagactgcccgcctcagaactgcttagagacttcaaaccagcagaggtgaaagtccctgtcatcccttcagattccagagctgggatcagccatgcccagaggtctggtcctgatgctggcaggggggccccctcctccatccctgactggctgagtggctttatcaccaccgagtgatgtgctgaggcctcctgcagtgaatgctccttccattcctgtactcgggcagtgccattcagcacaggagagctctttttgcctttggctttcaattccaaaacatgatttaatttctaactaaattagtatggcactagttatgaagtatctgcttaaaacccttcatcatgatatcctgtggatttaaaaactctaattccatgttttcttcccatctgccttatatatctcatcaccctgcttatcaatattcagtttgatgagcactattaactaaaatatgaaacttaaaaacaaaagcaagttgtccttaaaagttctttttttaagtaaattgttgacatactgcaaattttctatgcaaacttgcctcctgctgttatctgtgaagctcaggaaatccaaacatttgtgtttcaacaagggacagtaaactgtgtgtttacagccaaaagaaatgcctcatagttcttaacctcaacttttgtagaagtatttttttctctgtaatatttttattggctcataaagatgttttcatatctgaactcctaaataagtgaaattacagtagattatattaacaaaatactttttaggtagccatgcttgagactttttaaaaatataactttttccttaaagttttcagctatagcaaaaggtagttatgtatgccagacctaatatgagctgccaccaacacccctagaactttcagccatggtgtcttcagaattgtagcgcatttctgaatctagcaaatcctccttttacccgttgaatgttttgaatgccctgactctaccagcgcccataaatgatctctagaaggactgttagtaccaatctgtttttcaactttgaagctaaaaaccctgatatggtaatattatggtgcatagcagaggtctcggaaaaaaaatatttctgttcactttactttcaggttaaaaatgtttctaacacgcttgcaacttcccttatggcattaatcttgttgagggagagagacagaatcctggactctccaaagtatttaactgaaagtagggcctgctctgacagggcccatgtcccacaaggctgcttggcctcagtgggtgcttggctgtgctggatgatatgttgatctgtattggataaggaccaatgacagcaaagcaaaaatggctttaaagcttggtgttacttttcttaagttgtttaattatagttaagcaatttcaaaaatgctccaaagaaatgtgaaaggaccttttgtcacagcacttcagaaaatacacaacagccccttctgcccccgcacagaaatgctgcagagtatataaaacttgagacatttttgtaggatgcctgacgaggtgtagccttttatcttgtttccggatgcatatttattacgagtactctggttaaatattgaaaagttatatgctgtagtttttagtattttgtctttgtaatttacagaagttattggagaaaataaacttgtttcattttgc

SEQ ID NO: 294716 - DNA, 5166 bp, Homo sapiens
taaaatacatgaagagaaaataatgaatttggaaaattctgtcattctgttttctcagcaggacacaagcattctgcagcataatagttggaaagtccccagaatagagaaaaaaagtcacttattgatctaaactctcaatgggagagggaggacaaaataaaatctctcgctatcacacgatttattaaagcgtatgcaatgaagctttaactaactggatccctgaaaatgtatttcagccatcaaatatataaatttaggttgatatcagggattttcttttacaaagctatgtctaagaaaattcttttgtgggactggaaattgagcgcagcttcctaacacctcacttctgccttgtattgatcgtgggccttccaagtgatgatcctgaaactctgcatttcccaaatcatttgtagaatatcataacacgttcatcagactgcatttaccaatgtacaggagtggcctacaataatgcttcactgtcagatggtctgcagttccagccacccataaaagactatgtaatccagagtttccatcttgctgctgcaaaaggacacgtggaatgcctcagggtcatgattacacatggtgtggatgtgacagcccaagatactaccggacacagcgccttacatctcgcagccaagaacagccaccatgaatgcatcaggaagctgcttcagtctaaatgcccagccgaaagtgtcgacagctctgggaaaacagctttacattatgcagcggctcagggctgccttcaagctgtgcagattctctgcgaacacaagagccccataaacctcaaagatttggatgggaatataccgctgcttcttgctgtacaaaatggtcacagtgagatctgtcactttctcctggatcatggagcagatgtcaattccaggaacaaaagtggaagaactgctctcatgctggcctgtgagattggcagctctaacgctgtggaagccttaattaaaaagggtgcagacctaaaccttgtagattctcttggatacaatgccttacattattccaaactctcagaaaatgcaggaattcaaagccttctattatcaaaaatctctcaggatgctgatttaaagaccccaacaaaaccaaagcagcatgaccaagtctctaaaataagctcagaaagaagtggaactccaaaaaaacgcaaagctccaccacctcctatcagtcctacccagttgagtgatgtctcttccccaagatcaataacttcgactccactatcgggaaaggaatcggtattttttgctgaaccacccttcaaggctgagatcagttctatacgagaaaacaaagacagactaagtgacagtactacaggtgctgatagcttattggatataagttctgaagctgaccaacaagatcttctctctctattgcaagcaaaagttgcttcccttaccttacacaataaggagttacaagataaattacaggccaaatcacccaaggaggcggaagcagacctaagctttgactcataccattccacccaaactgacttgggcccatccctgggaaaacctggtgaaacctctcccccagactccaaatcatctccatctgtcttaatacattctttaggtaaatccactactgacaatgatgtcagaattcagcaactgcaagagattttgcaagatctacagaagagattagagagctctgaagcagagagaaaacagctacaggtcgaactccaatcccgaagggcagaactggtatgcttaaacaacactgagatttcagagaacagctctgacctcagccagaaacttaaagaaactcagagcaaatacgaggaggctatgaaagaagtccttagtgtgcagaagcagatgaaactcggtcttgtctcacctgaaagcatggataattattcacatttccacgagctgagggtcacggaagaggaaataaatgtgctaaagcaggatctgcagaatgcattagaagaaagtgaaagaaataaagagaaagtgagagagttagaggaaaaactggtagagagggagaaaggtacagtgattaagccacctgtggaagagtacgaggaaatgaaaagttcatattgctctgttattgagaatatgaataaggagaaagcatttttgtttgagaaataccaagaagcccaagaagaaatcatgaaattaaaagacacactaaaaagtcagatgacacaggaagccagtgatgaagctgaggacatgaaagaagccatgaataggatgatagatgaactcaataaacaggtgagcgagctgtcacagctgtacaaagaagcccaggctgagctggaggattacaggaagaggaaatctctagaggatgtcacagctgaatatatccataaagcagagcatgagaaactgatgcaattgacaaacgtgtccagggctaaagcagaagatgcactgtctgaaatgaagtctcagtattcaaaagtgttgaatgagttgacccagctcaaacaactggtggatgcacaaaaagagaactctgtctctatcacagaacatttgcaagtgataaccacgctgcggactgcagcaaaagagatggaagaaaaaataagcaatcttaaggaacaccttgcaagcaaggaagtggaagtagcaaagctggagaaacaactcttagaagagaaagctgctatgactgatgcaatggtacctcggtcttcctatgaaaaactccagtcatccttagagagtgaagtgagtgtgttggcatcgaaattaaaggaatctgtgaaagagaaagagaaggtccattcagaggttgtccagattagaagtgaggtctcacaggtgaaaagagaaaaggaaaatattcagactctcttgaaatccaaagagcaagaagtaaatgaacttctgcaaaaattccagcaagctcaggaagaacttgcagaaatgaaaagatacgctgagagctcttcaaaactggaggaagataaagataaaaagataaatgagatgtcgaaggaagtcaccaaattgaaggaggccttgaacagcctctcccagctctcctactcaacaagctcatccaaaaggcagagtcagcagctggaggcgctgcagcagcaagtcaaacagctccagaaccagctggcggaatgcaagaaacaacaccaggaggtcatatcagtttacagaatgcatcttctgtatgctgtgcagggccagatggatgaagatgtccagaaagtactgaagcaaatccttaccatgtgtaaaaaccagtctcaaaagaagtaaagtggattccttggcaggacactgccccttgtcatctgtctttgtgttagatccagagttgtcggcagccgctgccattgttctcattcgtggtatgcactgtggcctagcgtagcttcttccctttccaaaggtttctgaggacttctcccaggagaagactgcccgcctcagaactgcttagagacttcaaaccagcagaggtgaaagtccctgtcatcccttcagattccagagctgggatcagccatgcccagaggtctggtcctgatgctggcaggggggccccctcctccatccctgactggctgagtggctttatcaccaccgagtgatgtgctgaggcctcctgcagtgaatgctccttccattcctgtactcgggcagtgccattcagcacaggagagctctttttgcctttggctttcaattccaaaacatgatttaatttctaactaaattagtatggcactagttatgaagtatctgcttaaaacccttcatcatgatatcctgtggatttaaaaactctaattccatgttttcttcccatctgccttatatatctcatcaccctgcttatcaatattcagtttgatgagcactattaactaaaatatgaaacttaaaaacaaaagcaagttgtccttaaaagttctttttttaagtaaattgttgacatactgcaaattttctatgcaaacttgcctcctgctgttatctgtgaagctcaggaaatccaaacatttgtgtttcaacaagggacagtaaactgtgtgtttacagccaaaagaaatgcctcatagttcttaacctcaacttttgtagaagtatttttttctctgtaatatttttattggctcataaagatgttttcatatctgaactcctaaataagtgaaattacagtagattatattaacaaaatactttttaggtagccatgcttgagactttttaaaaatataactttttccttaaagttttcagctatagcaaaaggtagttatgtatgccagacctaatatgagctgccaccaacacccctagaactttcagccatggtgtcttcagaattgtagcgcatttctgaatctagcaaatcctccttttacccgttgaatgttttgaatgccctgactctaccagcgcccataaatgatctctagaaggactgttagtaccaatctgtttttcaactttgaagctaaaaaccctgatatggtaatattatggtgcatagcagaggtctcggaaaaaaaatatttctgttcactttactttcaggttaaaaatgtttctaacacgcttgcaacttcccttatggcattaatcttgttgagggagagagacagaatcctggactctccaaagtatttaactgaaagtagggcctgctctgacagggcccatgtcccacaaggctgcttggcctcagtgggtgcttggctgtgctggatgatatgttgatctgtattggataaggaccaatgacagcaaagcaaaaatggctttaaagcttggtgttacttttcttaagttgtttaattatagttaagcaatttcaaaaatgctccaaagaaatgtgaaaggaccttttgtcacagcacttcagaaaatacacaacagccccttctgcccccgcacagaaatgctgcagagtatataaaacttgagacatttttgtaggatgcctgacgaggtgtagccttttatcttgtttccggatgcatatttattacgagtactctggttaaatattgaaaagttatatgctgtagtttttagtattttgtctttgtaatttacagaagttattggagaaaataaacttgtttcattttgc

SEQ ID NO: 294717 - DNA, 5004 bp, Homo sapiens
atctgtcactcccgctgaggctgggaagattgaaaggggccatggagaggctgcagtcacaatgaggcctccagattcatgtcatcaaagtgcttcatgatgactggattttcacaccatttatccaagggccctagtcaatggcagcagcaagaatgaaagtagacacattggaagctagagagtcactgggtgacttttggaggtagcaacaagctcatgaagaaggcattcagtggcttgcactccccacccatcctctcaactacatgcgaagttttcacatcttgtacatttccaaatttaatgaaaaaggtgttgaaaagtctcctctagagctttggaaggctgaatgcactaaacatgaagagcttgaaagcgaagttcaggaagagtgacaccaatgagtggaacaagaatgatgaccggctactgcaggccgtggagaatggagatgcggagaaggtggcctcactgctcggcaagaagggggccagtgccaccaaacacgacagtgagggcaagaccgctttccatcttgctgctgcaaaaggacacgtggaatgcctcagggtcatgattacacatggtgtggatgtgacagcccaagatactaccggacacagcgccttacatctcgcagccaagaacagccaccatgaatgcatcaggaagctgcttcagtctaaatgcccagccgaaagtgtcgacagctctgggaaaacagctttacattatgcagcggctcagggctgccttcaagctgtgcagattctctgcgaacacaagagccccataaacctcaaagatttggatgggaatataccgctgcttcttgctgtacaaaatggtcacagtgagatctgtcactttctcctggatcatggagcagatgtcaattccaggaacaaaagtggaagaactgctctcatgctggcctgtgagattggcagctctaacgctgtggaagccttaattaaaaagggtgcagacctaaaccttgtagattctcttggatacaatgccttacattattccaaactctcagaaaatgcaggaattcaaagccttctattatcaaaaatctctcaggatgctgatttaaagaccccaacaaaaccaaagcagcatgaccaagtctctaaaataagctcagaaagaagtggaactccaaaaaaacgcaaagctccaccacctcctatcagtcctacccagttgagtgatgtctcttccccaagatcaataacttcgactccactatcgggaaaggaatcggtattttttgctgaaccacccttcaaggctgagatcagttctatacgagaaaacaaagacagactaagtgacagtactacaggtgctgatagcttattggatataagttctgaagctgaccaacaagatcttctctctctattgcaagcaaaagttgcttcccttaccttacacaataaggagttacaagataaattacaggtaaatccactactgacaatgatgtcagaattcagcaactgcaagagattttgcaagatctacagaagagattagagagctctgaagcagagagaaaacagctacaggtcgaactccaatcccgaagggcagaactggtatgcttaaacaacactgagatttcagagaacagctctgacctcagccagaaacttaaagaaactcagagcaaatacgaggaggctatgaaagaagtccttagtgtgcagaagcagatgaaactcggtcttgtctcacctgaaagcatggataattattcacatttccacgagctgagggtcacggaagaggaaataaatgtgctaaagcaggatctgcagaatgcattagaagaaagtgaaagaaataaagagaaagtgagagagttagaggaaaaactggtagagagggagaaaggtacagtgattaagccacctgtggaagagtacgaggaaatgaaaagttcatattgctctgttattgagaatatgaataaggagaaagcatttttgtttgagaaataccaagaagcccaagaagaaatcatgaaattaaaagacacactaaaaagtcagatgacacaggaagccagtgatgaagctgaggacatgaaagaagccatgaataggatgatagatgaactcaataaacaggtgagcgagctgtcacagctgtacaaagaagcccaggctgagctggaggattacaggaagaggaaatctctagaggatgtcacagctgaatatatccataaagcagagcatgagaaactgatgcaattgacaaacgtgtccagggctaaagcagaagatgcactgtctgaaatgaagtctcagtattcaaaagtgttgaatgagttgacccagctcaaacaactggtggatgcacaaaaagagaactctgtctctatcacagaacatttgcaagtgataaccacgctgcggactgcagcaaaagagatggaagaaaaaataagcaatcttaaggaacaccttgcaagcaaggaagtggaagtagcaaagctggagaaacaactcttagaagagaaagctgctatgactgatgcaatggtacctcggtcttcctatgaaaaactccagtcatccttagagagtgaagtgagtgtgttggcatcgaaattaaaggaatctgtgaaagagaaagagaaggtccattcagaggttgtccagattagaagtgaggtctcacaggtgaaaagagaaaaggaaaatattcagactctcttgaaatccaaagagcaagaagtaaatgaacttctgcaaaaattccagcaagctcaggaagaacttgcagaaatgaaaagatacgctgagagctcttcaaaactggaggaagataaagataaaaagataaatgagatgtcgaaggaagtcaccaaattgaaggaggccttgaacagcctctcccagctctcctactcaacaagctcatccaaaaggcagagtcagcagctggaggcgctgcagcagcaagtcaaacagctccagaaccagctggcggaatgcaagaaacaacaccaggaggtcatatcagtttacagaatgcatcttctgtatgctgtgcagggccagatggatgaagatgtccagaaagtactgaagcaaatccttaccatgtgtaaaaaccagtctcaaaagaagtaaagtggattccttggcaggacactgccccttgtcatctgtctttgtgttagatccagagttgtcggcagccgctgccattgttctcattcgtggtatgcactgtggcctagcgtagcttcttccctttccaaaggtttctgaggacttctcccaggagaagactgcccgcctcagaactgcttagagacttcaaaccagcagaggtgaaagtccctgtcatcccttcagattccagagctgggatcagccatgcccagaggtctggtcctgatgctggcaggggggccccctcctccatccctgactggctgagtggctttatcaccaccgagtgatgtgctgaggcctcctgcagtgaatgctccttccattcctgtactcgggcagtgccattcagcacaggagagctctttttgcctttggctttcaattccaaaacatgatttaatttctaactaaattagtatggcactagttatgaagtatctgcttaaaacccttcatcatgatatcctgtggatttaaaaactctaattccatgttttcttcccatctgccttatatatctcatcaccctgcttatcaatattcagtttgatgagcactattaactaaaatatgaaacttaaaaacaaaagcaagttgtccttaaaagttctttttttaagtaaattgttgacatactgcaaattttctatgcaaacttgcctcctgctgttatctgtgaagctcaggaaatccaaacatttgtgtttcaacaagggacagtaaactgtgtgtttacagccaaaagaaatgcctcatagttcttaacctcaacttttgtagaagtatttttttctctgtaatatttttattggctcataaagatgttttcatatctgaactcctaaataagtgaaattacagtagattatattaacaaaatactttttaggtagccatgcttgagactttttaaaaatataactttttccttaaagttttcagctatagcaaaaggtagttatgtatgccagacctaatatgagctgccaccaacacccctagaactttcagccatggtgtcttcagaattgtagcgcatttctgaatctagcaaatcctccttttacccgttgaatgttttgaatgccctgactctaccagcgcccataaatgatctctagaaggactgttagtaccaatctgtttttcaactttgaagctaaaaaccctgatatggtaatattatggtgcatagcagaggtctcggaaaaaaaatatttctgttcactttactttcaggttaaaaatgtttctaacacgcttgcaacttcccttatggcattaatcttgttgagggagagagacagaatcctggactctccaaagtatttaactgaaagtagggcctgctctgacagggcccatgtcccacaaggctgcttggcctcagtgggtgcttggctgtgctggatgatatgttgatctgtattggataaggaccaatgacagcaaagcaaaaatggctttaaagcttggtgttacttttcttaagttgtttaattatagttaagcaatttcaaaaatgctccaaagaaatgtgaaaggaccttttgtcacagcacttcagaaaatacacaacagccccttctgcccccgcacagaaatgctgcagagtatataaaacttgagacatttttgtaggatgcctgacgaggtgtagccttttatcttgtttccggatgcatatttattacgagtactctggttaaatattgaaaagttatatgctgtagtttttagtattttgtctttgtaatttacagaagttattggagaaaataaacttgtttcattttgc

SEQ ID NO: 294718 - DNA, 4874 bp, Homo sapiens
cgtcgacagttccagccacccataaaagactatgtaatccagagtttccatcttgctgctgcaaaaggacacgtggaatgcctcagggtcatgattacacatggtgtggatgtgacagcccaagatactaccgaatatcataacacgttcatcagactgcatttaccaatgtacaggagtggcctacaataatgcttcactgtcagatggtctgcagttccagccacccataaaagactatgtaatccagagtttccatcttgctgctgcaaaaggacacgtggaatgcctcagggtcatgattacacatggtgtggatgtgacagcccaagatactaccggacacagcgccttacatctcgcagccaagaacagccaccatgaatgcatcaggaagctgcttcagtctaaatgcccagccgaaagtgtcgacagctctgggaaaacagctttacattatgcagcggctcagggctgccttcaagctgtgcagattctctgcgaacacaagagccccataaacctcaaagatttggatgggaatataccgctgcttcttgctgtacaaaatggtcacagtgagatctgtcactttctcctggatcatggagcagatgtcaattccaggaacaaaagtggaagaactgctctcatgctggcctgtgagattggcagctctaacgctgtggaagccttaattaaaaagggtgcagacctaaaccttgtagattctcttggatacaatgccttacattattccaaactctcagaaaatgcaggaattcaaagccttctattatcaaaaatctctcaggatgctgatttaaagaccccaacaaaaccaaagcagcatgaccaagtctctaaaataagctcagaaagaagtggaactccaaaaaaacgcaaagctccaccacctcctatcagtcctacccagttgagtgatgtctcttccccaagatcaataacttcgactccactatcgggaaaggaatcggtattttttgctgaaccacccttcaaggctgagatcagttctatacgagaaaacaaagacagactaagtgacagtactacaggtgctgatagcttattggatataagttctgaagctgaccaacaagatcttctctctctattgcaagcaaaagttgcttcccttaccttacacaataaggagttacaagataaattacaggccaaatcacccaaggaggcggaagcagacctaagctttgactcataccattccacccaaactgacttgggcccatccctgggaaaacctggtgaaacctctcccccagactccaaatcatctccatctgtcttaatacattctttaggtaaatccactactgacaatgatgtcagaattcagcaactgcaagagattttgcaagatctacagaagagattagagagctctgaagcagagagaaaacagctacaggtcgaactccaatcccgaagggcagaactggtatgcttaaacaacactgagatttcagagaacagctctgacctcagccagaaacttaaagaaactcagagcaaatacgaggaggctatgaaagaagtccttagtgtgcagaagcagatgaaactcggtcttgtctcacctgaaagcatggataattattcacatttccacgagctgagggtcacggaagaggaaataaatgtgctaaagcaggatctgcagaatgcattagaagaaagtgaaagaaataaagagaaagtgagagagttagaggaaaaactggtagagagggagaaaggtacagtgattaagccacctgtggaagagtacgaggaaatgaaaagttcatattgctctgttattgagaatatgaataaggagaaagcatttttgtttgagaaataccaagaagcccaagaagaaatcatgaaattaaaagacacactaaaaagtcagatgacacaggaagccagtgatgaagctgaggacatgaaagaagccatgaataggatgatagatgaactcaataaacaggtgagcgagctgtcacagctgtacaaagaagcccaggctgagctggaggattacaggaagaggaaatctctagaggatgtcacagctgaatatatccataaagcagagcatgagaaactgatgcaattgacaaacgtgtccagggctaaagcagaagatgcactgtctgaaatgaagtctcagtattcaaaagtgttgaatgagttgacccagctcaaacaactggtggatgcacaaaaagagaactctgtctctatcacagaacatttgcaagtgataaccacgctgcggactgcagcaaaagagatggaagaaaaaataagcaatcttaaggaacaccttgcaagcaaggaagtggaagtagcaaagctggagaaacaactcttagaagagaaagctgctatgactgatgcaatggtacctcggtcttcctatgaaaaactccagtcatccttagagagtgaagtgagtgtgttggcatcgaaattaaaggaatctgtgaaagagaaagagaaggtccattcagaggttgtccagattagaagtgaggtctcacaggtgaaaagagaaaaggaaaatattcagactctcttgaaatccaaagagcaagaagtaaatgaacttctgcaaaaattccagcaagctcaggaagaacttgcagaaatgaaaagatacgctgagagctcttcaaaactggaggaagataaagataaaaagataaatgagatgtcgaaggaagtcaccaaattgaaggaggccttgaacagcctctcccagctctcctactcaacaagctcatccaaaaggcagagtcagcagctggaggcgctgcagcagcaagtcaaacagctccagaaccagctggcggaatgcaagaaacaacaccaggaggtcatatcagtttacagaatgcatcttctgtatgctgtgcagggccagatggatgaagatgtccagaaagtactgaagcaaatccttaccatgtgtaaaaaccagtctcaaaagaagtaaagtggattccttggcaggacactgccccttgtcatctgtctttgtgttagatccagagttgtcggcagccgctgccattgttctcattcgtggtatgcactgtggcctagcgtagcttcttccctttccaaaggtttctgaggacttctcccaggagaagactgcccgcctcagaactgcttagagacttcaaaccagcagaggtgaaagtccctgtcatcccttcagattccagagctgggatcagccatgcccagaggtctggtcctgatgctggcaggggggccccctcctccatccctgactggctgagtggctttatcaccaccgagtgatgtgctgaggcctcctgcagtgaatgctccttccattcctgtactcgggcagtgccattcagcacaggagagctctttttgcctttggctttcaattccaaaacatgatttaatttctaactaaattagtatggcactagttatgaagtatctgcttaaaacccttcatcatgatatcctgtggatttaaaaactctaattccatgttttcttcccatctgccttatatatctcatcaccctgcttatcaatattcagtttgatgagcactattaactaaaatatgaaacttaaaaacaaaagcaagttgtccttaaaagttctttttttaagtaaattgttgacatactgcaaattttctatgcaaacttgcctcctgctgttatctgtgaagctcaggaaatccaaacatttgtgtttcaacaagggacagtaaactgtgtgtttacagccaaaagaaatgcctcatagttcttaacctcaacttttgtagaagtatttttttctctgtaatatttttattggctcataaagatgttttcatatctgaactcctaaataagtgaaattacagtagattatattaacaaaatactttttaggtagccatgcttgagactttttaaaaatataactttttccttaaagttttcagctatagcaaaaggtagttatgtatgccagacctaatatgagctgccaccaacacccctagaactttcagccatggtgtcttcagaattgtagcgcatttctgaatctagcaaatcctccttttacccgttgaatgttttgaatgccctgactctaccagcgcccataaatgatctctagaaggactgttagtaccaatctgtttttcaactttgaagctaaaaaccctgatatggtaatattatggtgcatagcagaggtctcggaaaaaaaatatttctgttcactttactttcaggttaaaaatgtttctaacacgcttgcaacttcccttatggcattaatcttgttgagggagagagacagaatcctggactctccaaagtatttaactgaaagtagggcctgctctgacagggcccatgtcccacaaggctgcttggcctcagtgggtgcttggctgtgctggatgatatgttgatctgtattggataaggaccaatgacagcaaagcaaaaatggctttaaagcttggtgttacttttcttaagttgtttaattatagttaagcaatttcaaaaatgctccaaagaaatgtgaaaggaccttttgtcacagcacttcagaaaatacacaacagccccttctgcccccgcacagaaatgctgcagagtatataaaacttgagacatttttgtaggatgcctgacgaggtgtagccttttatcttgtttccggatgcatatttattacgagtactctggttaaatattgaaaagttatatgctgtagtttttagtattttgtctttgtaatttacagaagttattggagaaaataaacttgtttcattttgc

SEQ ID NO: 294719 - DNA, 5184 bp, Homo sapiens
gaaaaagggaggacagggggcgcggaggcagagtggcgcagcaagtggccgcaggtggcgacggtggcggggggtggggtgtgaggtaatccaggggtcgcggaagaggaggctgagagggtcaaaagaaaactaaagctgcagtccggcctactgttccgggggccgcggagcccccacccggggagatggacctcaaccggatcatccaggcgctgaagggcaccatcgacccgaagttgcggattgcagccgagaacgagctcaaccagtcctacaagattatcaattttgcccccagtttacttcggattatagtctctgaccatgtggaattcccagtacgacaggcagctgccatttacctgaagaacatggtgacacaatactggccagatcgagaacctccaccaggagaagcaatatttccattcaacattcacgaaaacgatcgccagcaaatacgtgataacattgtggaaggaataattcggtctccagatttagtgagagtccaattaacaatgtgtctccgtgccatcataaaacatgattttcctggtcactggccaggagtggtcgacaagatagactattacttgcaatcacagagcagtgcaagctggcttggcagtttattatgcctgtatcaactggtgaagacatatgaatataagaaagcagaagagagagaacctcttataatagcaatgcagatattcctgcctcgtattcagcaacaaattgttcagctccttcctgattcctcctattattctgtattactgcagaaacaaattctgaaaatcttttatgcacttgtatgcattgcctcttcagctagtgaataaccaaaccatgacaacatggatggagatcttccgaactattatcgacaggaccgttcctcctgagactctgcacattgatgaggatgatagaccagaactggtatggtggaagtgtaagaagtgggcactgcatattgtagctcggctctttgaacgatatggaagcccaggaaatgtcacaaaagaatactttgaattttctgaattctttttgaaaacctatgcagtgggcattcagcaggtgctactaaaaattttagatcaatatagacagaaagaatatgtagctccccgtgttctccagcaagcattcaactatctcaaccaaggggtggttcattctataacctggaagcagatgaagccacacatacagaatatctctgaagatgtgattttttctgtgatgtgttataaagatgaggatgaagagctgtggcaagaagatccatatgagtatataaggatgaaatttgatatttttgaagattatgcttctcccaccacagcagcccagactctcttatatactgctgcaaagaaaagaaaagaggtgttgccaaaaatgatggcattctgttatcaaatcctgacagacccgaactttgaccctaggaagaaagatggagccctgcatgtgattggttccctagctgagattttactgaagaagagtttattcaaggaccaaatggagctgtttctacaaaatcatgtatttccattattattgtctaacctgggatatcttcgagctagatcttgctgggtacttcatgcatttagttctttgaagttccataatgagctcaatctaagaaatgccgttgaattagcgaagaagagcctgattgaagataaagagatgcctgtcaaagttgaagctgcccttgctcttcagtctttaatttctaaccagatacaagctaaggaatatatgaagccacatgtgaggcctattatgcaggaactgttgcacattgttagagagacagaaaatgatgatgttactaatgtcatccagaagatgatatgtgaatacagtcaagaggtagcctcaattgctgttgatatgacccaacacttggctgagatatttggcaaagttcttcaaagtgatgaatatgaagaagttgaagacaaaacagtaatggctatgggaattttacataccattgatactatcttaacagttgtagaagatcataaagagattacccagcagttagagaatatctgtctacggatcattgatcttgttctgcagaaacatgtaattgaattctatgaagaaattctttccctggcatacagtttaacctgccacagtatttcccctcaaatgtggcagcttctaggtatactatatgaagtgtttcagcaggattgctttgaatactttacagacatgatgcctctcctgcataattatgtgacaatagatacagataccttactatcaaatgcaaaacatttagaaattctttttacaatgtgtaggaaggtactatgtggagatgcaggagaagatgcagagtgtcatgcagctaaacttctggaagtcatcattcttcagtgcaaaggaaggggaattgatcagtgcattccactcttcgttcaacttgttttggagagattaactcgaggggtcaaaactagtgagcttcgtactatgtgtcttcaggttgcaattgctgccttgtactacaaccctgatttgctgctacatactttagaacgaattcagttgcctcacaaccctggacctatcactgtacagtttataaatcaatggatgaatgatacagattgttttcttgggcatcatgaccggaagatgtgtataataggactgagtatccttttggaattgcaaaatcgacctcctgcagtagatgctgtggtgggacagattgttccctcaattcttttccttttccttggcctaaagcaggtctgtgctactagacaactggtaaaccgggaagatcgttcaaaagcagagaaagctgatatggaagaaaatgaggagatttcaagtgatgaagaggagacaaatgtaactgctcaagcaatgcagtcaaataatggaagaggtgaagatgaggaggaggaagatgatgactgggatgaagaagtattggaagaaaccgcgcttgaggggttcagtactccacttgaccttgacaatagtgtggatgaatatcagttttttacacaagctctgataactgtgcagagtcgagatgcagcctggtaccagctgctgatggcaccactcagcgaggatcagaggacagcactgcaggaggtgtacacactggcagagcaccgacggacggtggcagaggcaaagaagaagattgaacaacagggaggcttcacctttgaaaacaaaggagtcctctccgcatttaattttgggactgtgcccagcaacaactgaaggaaagaacatcagctgaccaaatgtcatcgctgcattttatttcacaagaggagtgtgagggtcaaggggatgaaatgaggggctgcttttagggccctcctgctgtgccagttaccatctggcattaggcagcacttttatctactctttcccctttgacctttgtcaccctgaaatatatattttaaacagctactgtaagtatgaaatgaaagaaaaacaatcattggacggaaaaggacaacccatatgttccaaaggctgaatgcccaaggttgttttagaggattggatagacttgcacgtctcaggtttttgccatgcagaatcaatggatttatgcggataacagtgccttctgttgtacatgaattatcagaaaaaaatttttggagtgcattgcaattttttttaaagcataaaacatatttctagatacaacataaaccttggttatatgtcaactattctgcattttactctgtgaatttattgttaggcagttactgcaagtcactctggtttcaaaatcttcacggctccctctgctcaccctgctgctggggggcttttttcaggggttgtattataaaatatgcactggctgtggtttttcataagatgttttgtggctttttaaagaagtgtcttactccctcttctctcatttttttctgccttgaaaaggggtggtatttcttttggggtcaacaaatacacatatcagtttcactcctaaccttgtaagttcaggactcattttcttggcagcaagtggcaggggctctttagtcactggagttaacagtaagtctgagtatattctgaataatgtaattatgcaattaattgataatcatacctaaagcacattgaacttctaagagacaggtgctacgtaagcacactgtctttctggatggggacttgtattttaaataacttatcattccagctatgttggactagggtccaaagcattttataatatttttttttaatctaggaaaaagacccaaacaaatctaacttcttgctttctcacctatttgaattttctcctacctaatttgtttgtgtctttattatagctcagtttgacttctcaaacttttcaagggttggggcagctgcacttttaggttgcctataggaaatattgcatatggagattacagtgtttttctgacctagttcaagaccagaacatgggtcatagggtttttattcagcaaaatgaaaacgtatcttcagaacttaacatattactggatgtgatacagattttgctttctgtggaattgaaaattcacaaaaattcacagcttaaatttcccatcagtgactggaggaatttttttcaggtgcttcctatattaccatccctcatgcatattaactctttagaattttaggttaagtgatgtctatagaagtagcctggaaaaccatgagttttggagttcagtgaccccctgctttcctctgctcctcccttcccaaggcattgaagctgaatgtgccaactggcagttagaagcgaaagatggcattgggagaaattttagagagctttcaaactctttattctcatgttccacatggtctaattttaacataaataatatgccttcacactggattgtaaaaggcatgtgatttttgagattttattttgtgatgtattgtcttctgcagtattaaagggaaagagatattaatgtgcattaccctatcttgtttttgaagccagggtagttgtatgattttgttaccagcagtgctaacctgaatgtgacctggttaccttggaaatgcaggaacttatatgaatgtactataaaataaaatgcggactgattcccaggaaaaactgaacttttg

SEQ ID NO: 294720 - DNA, 6121 bp, Homo sapiens
gaaaaagggaggacagggggcgcggaggcagagtggcgcagcaagtggccgcaggtggcgacggtggcggggggtggggtgtgaggtaatccaggggtcgcggaagaggaggctgagagggtcaaaagaaaactaaagctgcagtccggcctactgttccgggggccgcggagcccccacccggggagatggacctcaaccggatcatccaggcgctgaagggcaccatcgacccgaagttgcggattgcagccgagaacgagctcaaccagtcctacaagattatcaattttgcccccagtttacttcggattatagtctctgaccatgtggaattcccagtacgacaggcagctgccatttacctgaagaacatggtgacacaatactggccagatcgagaacctccaccaggagaagcaatatttccattcaacattcacgaaaacgatcgccagcaaatacgtgataacattgtggaaggaataattcggtctccagatttagtgagagtccaattaacaatgtgtctccgtgccatcataaaacatgattttcctggtcactggccaggagtggtcgacaagatagactattacttgcaatcacagagcagtgcaagctggcttggcagtttattatgcctgtatcaactggtgaagacatatgaatataagaaagcagaagagagagaacctcttataatagcaatgcagatattcctgcctcgtattcagcaacaaattgttcagctccttcctgattcctcctattattctgtattactgcagaaacaaattctgaaaatcttttatgcacttgtatgcattgcctcttcagctagtgaataaccaaaccatgacaacatggatggagatcttccgaactattatcgacaggaccgttcctcctgagactctgcacattgatgaggatgatagaccagaactggtatggtggaagtgtaagaagtgggcactgcatattgtagctcggctctttgaacgatatggaagcccaggaaatgtcacaaaagaatactttgaattttctgaattctttttgaaaacctatgcagtgggcattcagcaggtgctactaaaaattttagatcaatatagacagaaagaatatgtagctccccgtgttctccagcaagcattcaactatctcaaccaaggggtggttcattctataacctggaagcagatgaagccacacatacagaatatctctgaagatgtgattttttctgtgatgtgttataaagatgaggatgaagagctgtggcaagaagatccatatgagtatataaggatgaaatttgatatttttgaagattatgcttctcccaccacagcagcccagactctcttatatactgctgcaaagaaaagaaaagaggtgttgccaaaaatgatggcattctgttatcaaatcctgacagacccgaactttgaccctaggaagaaagatggagccctgcatgtgattggttccctagctgagattttactgaagaagagtttattcaaggaccaaatggagctgtttctacaaaatcatgtatttccattattattgtctaacctgggatatcttcgagctagatcttgctgggtacttcatgcatttagttctttgaagttccataatgagctcaatctaagaaatgccgttgaattagcgaagaagagcctgattgaagataaagagatgcctgtcaaagttgaagctgcccttgctcttcagtctttaatttctaaccagatacaagctaaggaatatatgaagccacatgtgaggcctattatgcaggaactgttgcacattgttagagagacagaaaatgatgatgttactaatgtcatccagaagatgatatgtgaatacagtcaagaggtagcctcaattgctgttgatatgacccaacacttggctgagatatttggcaaagttcttcaaagtgatgaatatgaagaagttgaagacaaaacagtaatggctatgggaattttacataccattgatactatcttaacagttgtagaagatcataaagagattacccagcagttagagaatatctgtctacggatcattgatcttgttctgcagaaacatgtaattgaattctatgaagaaattctttccctggcatacagtttaacctgccacagtatttcccctcaaatgtggcagcttctaggtatactatatgaagtgtttcagcaggattgctttgaatactttacagacatgatgcctctcctgcataattatgtgacaatagatacagataccttactatcaaatgcaaaacatttagaaattctttttacaatgtgtaggaaggtactatgtggagatgcaggagaagatgcagagtgtcatgcagctaaacttctggaagtcatcattcttcagtgcaaaggaaggggaattgatcagtgcattccactcttcgttcaacttgttttggagagattaactcgaggggtcaaaactagtgagcttcgtactatgtgtcttcaggttgcaattgctgccttgtactacaaccctgatttgctgctacatactttagaacgaattcagttgcctcacaaccctggacctatcactgtacagtttataaatcaatggatgaatgatacagattgttttcttgggcatcatgaccggaagatgtgtataataggactgagtatccttttggaattgcaaaatcgacctcctgcagtagatgctgtggtgggacagattgttccctcaattcttttccttttccttggcctaaagcaggtctgtgctactagacaactggtaaaccgggaagatcgttcaaaagcagagaaagctgatatggaagaaaatgaggagatttcaagtgatgaagaggagacaaatgtaactgctcaagcaatgcagtcaaataatggaagaggtgaagatgaggaggaggaagatgatgactgggatgaagaagtattggaagaaaccgcgcttgaggggttcagtactccacttgaccttgacaatagtgtggatgaatatcagttttttacacaagctctgataactgtgcagagtcgagatgcagcctggtaccagctgctgatggcaccactcagcgaggatcagaggacagcactgcaggaggtgtacacactggcagagcaccgacggacggtggcaggtcagccagagtaacctccagagtggagtgcatgtgtcagagtgccaacagacagccttatttgatgagccaggtggcacctaaacactgtttttgaaattgttagagacttaccctttaagataataaggaattgtcattattgtatgattgttttaatcactcatgatgtcttagctttgcaaaaacctgcacattaatatgtatttcctagtggtgttctcattcacattcttatcctatgttggaggcaaaggtacaaagtaagggttgggataagtcttgccgagggagacttaatcagttggatcactcccctaaacatttcaaccgtgggccaaagggacttgacgaattcttgcaaggagcttgtattcctggaaatggaatgctctctatttctcattgttgggctttatttgacattgtttcttgttgttgattttcagtttttaagctggaggaattactctgtgttgattattgtagttacttgtagattgtcattggaaaagattttgtagttacaaaaaaattttagtaggaaacatggcaaactagacatctagagtttagaatgctggctcttctgcatggacttagattttcagttctgtgcagattctcagtcagccttcctgatatgagaagtctgggccccctttcagcagtagagacagtgaagtagaatccacctctgagacgtgttttcttttcactcgttttttgcagattttccgatggtagtgaacataccaccttattgacataggtctgttattcttagttattctttggcaggataactaatactaccagtcacattctttcacagttctaagcatataaagaatctggctcctttgagtcatctccaactttgtcaccttaagcattctttttttttcttctccccttttcttttgaaaaatgctagaggcaaagaagaagattgaacaacagggaggcttcacctttgaaaacaaaggagtcctctccgcatttaattttgggactgtgcccagcaacaactgaaggaaagaacatcagctgaccaaatgtcatcgctgcattttatttcacaagaggagtgtgagggtcaaggggatgaaatgaggggctgcttttagggccctcctgctgtgccagttaccatctggcattaggcagcacttttatctactctttcccctttgacctttgtcaccctgaaatatatattttaaacagctactgtaagtatgaaatgaaagaaaaacaatcattggacggaaaaggacaacccatatgttccaaaggctgaatgcccaaggttgttttagaggattggatagacttgcacgtctcaggtttttgccatgcagaatcaatggatttatgcggataacagtgccttctgttgtacatgaattatcagaaaaaaatttttggagtgcattgcaattttttttaaagcataaaacatatttctagatacaacataaaccttggttatatgtcaactattctgcattttactctgtgaatttattgttaggcagttactgcaagtcactctggtttcaaaatcttcacggctccctctgctcaccctgctgctggggggcttttttcaggggttgtattataaaatatgcactggctgtggtttttcataagatgttttgtggctttttaaagaagtgtcttactccctcttctctcatttttttctgccttgaaaaggggtggtatttcttttggggtcaacaaatacacatatcagtttcactcctaaccttgtaagttcaggactcattttcttggcagcaagtggcaggggctctttagtcactggagttaacagtaagtctgagtatattctgaataatgtaattatgcaattaattgataatcatacctaaagcacattgaacttctaagagacaggtgctacgtaagcacactgtctttctggatggggacttgtattttaaataacttatcattccagctatgttggactagggtccaaagcattttataatatttttttttaatctaggaaaaagacccaaacaaatctaacttcttgctttctcacctatttgaattttctcctacctaatttgtttgtgtctttattatagctcagtttgacttctcaaacttttcaagggttggggcagctgcacttttaggttgcctataggaaatattgcatatggagattacagtgtttttctgacctagttcaagaccagaacatgggtcatagggtttttattcagcaaaatgaaaacgtatcttcagaacttaacatattactggatgtgatacagattttgctttctgtggaattgaaaattcacaaaaattcacagcttaaatttcccatcagtgactggaggaatttttttcaggtgcttcctatattaccatccctcatgcatattaactctttagaattttaggttaagtgatgtctatagaagtagcctggaaaaccatgagttttggagttcagtgaccccctgctttcctctgctcctcccttcccaaggcattgaagctgaatgtgccaactggcagttagaagcgaaagatggcattgggagaaattttagagagctttcaaactctttattctcatgttccacatggtctaattttaacataaataatatgccttcacactggattgtaaaaggcatgtgatttttgagattttattttgtgatgtattgtcttctgcagtattaaagggaaagagatattaatgtgcattaccctatcttgtttttgaagccagggtagttgtatgattttgttaccagcagtgctaacctgaatgtgacctggttaccttggaaatgcaggaacttatatgaatgtactataaaataaaatgcggactgattcccaggaaaaactgaacttttg

SEQ ID NO: 294721 - DNA, 6431 bp, Homo sapiens
ttcttaaaatgctgtagcaatatgtcagcctgtttctttcagaagccttttgttaaaggttgaagacgattaaaaagaacagaacaaaatcagattatgtattttgatagatgtgaacatataaaaattttctgagcttttttccaaaaatttttgatggctgatgttcatttccctattatatttacaagtagtacatatttcaaaaaggttggatgaaaattaccaatactataaaaagaagagataccccaaaatgctagtgtttgacagtagccagtgggaaaacaaaaaacaaaaaaagccatcttcatgaaggaaagtagaactttacctgttgtcacctcagaattaggcattgcgaaaagtatgattttatgatctcaaagtatgtttactatgcattatttctagataattttcctgtcctgtaagctctgggtcttgacttaatgaaatgttttctgcttagactagctgaagtgaaacctttaaattcttatccactttcccttcctgatttggctgtttatacctgtaagagtatccatttttgctgggtttcatgtttaacattgaagggtttggactttcatgctctgtaaggctgaattaaagccatcctttttggtactgctacattagcattttttctcaaactcagctgccatttacctgaagaacatggtgacacaatactggccagatcgagaacctccaccaggagaagcaatatttccattcaacattcacgaaaacgatcgccagcaaatacgtgataacattgtggaaggaataattcggtctccagatttagtgagagtccaattaacaatgtgtctccgtgccatcataaaacatgattttcctggtcactggccaggagtggtcgacaagatagactattacttgcaatcacagagcagtgcaagctggcttggcagtttattatgcctgtatcaactggtgaagacatatgaatataagaaagcagaagagagagaacctcttataatagcaatgcagatattcctgcctcgtattcagcaacaaattgttcagctccttcctgattcctcctattattctgtattactgcagaaacaaattctgaaaatcttttatgcacttgtatgcattgcctcttcagctagtgaataaccaaaccatgacaacatggatggagatcttccgaactattatcgacaggaccgttcctcctgagactctgcacattgatgaggatgatagaccagaactggtatggtggaagtgtaagaagtgggcactgcatattgtagctcggctctttgaacgatatggaagcccaggaaatgtcacaaaagaatactttgaattttctgaattctttttgaaaacctatgcagtgggcattcagcaggtgctactaaaaattttagatcaatatagacagaaagaatatgtagctccccgtgttctccagcaagcattcaactatctcaaccaaggggtggttcattctataacctggaagcagatgaagccacacatacagaatatctctgaagatgtgattttttctgtgatgtgttataaagatgaggatgaagagctgtggcaagaagatccatatgagtatataaggatgaaatttgatatttttgaagattatgcttctcccaccacagcagcccagactctcttatatactgctgcaaagaaaagaaaagaggtgttgccaaaaatgatggcattctgttatcaaatcctgacagacccgaactttgaccctaggaagaaagatggagccctgcatgtgattggttccctagctgagattttactgaagaagagtttattcaaggaccaaatggagctgtttctacaaaatcatgtatttccattattattgtctaacctgggatatcttcgagctagatcttgctgggtacttcatgcatttagttctttgaagttccataatgagctcaatctaagaaatgccgttgaattagcgaagaagagcctgattgaagataaagagatgcctgtcaaagttgaagctgcccttgctcttcagtctttaatttctaaccagatacaagctaaggaatatatgaagccacatgtgaggcctattatgcaggaactgttgcacattgttagagagacagaaaatgatgatgttactaatgtcatccagaagatgatatgtgaatacagtcaagaggtagcctcaattgctgttgatatgacccaacacttggctgagatatttggcaaagttcttcaaagtgatgaatatgaagaagttgaagacaaaacagtaatggctatgggaattttacataccattgatactatcttaacagttgtagaagatcataaagagattacccagcagttagagaatatctgtctacggatcattgatcttgttctgcagaaacatgtaattgaattctatgaagaaattctttccctggcatacagtttaacctgccacagtatttcccctcaaatgtggcagcttctaggtatactatatgaagtgtttcagcaggattgctttgaatactttacagacatgatgcctctcctgcataattatgtgacaatagatacagataccttactatcaaatgcaaaacatttagaaattctttttacaatgtgtaggaaggtactatgtggagatgcaggagaagatgcagagtgtcatgcagctaaacttctggaagtcatcattcttcagtgcaaaggaaggggaattgatcagtgcattccactcttcgttcaacttgttttggagagattaactcgaggggtcaaaactagtgagcttcgtactatgtgtcttcaggttgcaattgctgccttgtactacaaccctgatttgctgctacatactttagaacgaattcagttgcctcacaaccctggacctatcactgtacagtttataaatcaatggatgaatgatacagattgttttcttgggcatcatgaccggaagatgtgtataataggactgagtatccttttggaattgcaaaatcgacctcctgcagtagatgctgtggtgggacagattgttccctcaattcttttccttttccttggcctaaagcaggtctgtgctactagacaactggtaaaccgggaagatcgttcaaaagcagagaaagctgatatggaagaaaatgaggagatttcaagtgatgaagaggagacaaatgtaactgctcaagcaatgcagtcaaataatggaagaggtgaagatgaggaggaggaagatgatgactgggatgaagaagtattggaagaaaccgcgcttgaggggttcagtactccacttgaccttgacaatagtgtggatgaatatcagttttttacacaagctctgataactgtgcagagtcgagatgcagcctggtaccagctgctgatggcaccactcagcgaggatcagaggacagcactgcaggaggtgtacacactggcagagcaccgacggacggtggcaggtcagccagagtaacctccagagtggagtgcatgtgtcagagtgccaacagacagccttatttgatgagccaggtggcacctaaacactgtttttgaaattgttagagacttaccctttaagataataaggaattgtcattattgtatgattgttttaatcactcatgatgtcttagctttgcaaaaacctgcacattaatatgtatttcctagtggtgttctcattcacattcttatcctatgttggaggcaaaggtacaaagtaagggttgggataagtcttgccgagggagacttaatcagttggatcactcccctaaacatttcaaccgtgggccaaagggacttgacgaattcttgcaaggagcttgtattcctggaaatggaatgctctctatttctcattgttgggctttatttgacattgtttcttgttgttgattttcagtttttaagctggaggaattactctgtgttgattattgtagttacttgtagattgtcattggaaaagattttgtagttacaaaaaaattttagtaggaaacatggcaaactagacatctagagtttagaatgctggctcttctgcatggacttagattttcagttctgtgcagattctcagtcagccttcctgatatgagaagtctgggccccctttcagcagtagagacagtgaagtagaatccacctctgagacgtgttttcttttcactcgttttttgcagattttccgatggtagtgaacataccaccttattgacataggtctgttattcttagttattctttggcaggataactaatactaccagtcacattctttcacagttctaagcatataaagaatctggctcctttgagtcatctccaactttgtcaccttaagcattctttttttttcttctccccttttcttttgaaaaatgctagaggcaaagaagaagattgaacaacagggaggcttcacctttgaaaacaaaggagtcctctccgcatttaattttgggactgtgcccagcaacaactgaaggaaagaacatcagctgaccaaatgtcatcgctgcattttatttcacaagaggagtgtgagggtcaaggggatgaaatgaggggctgcttttagggccctcctgctgtgccagttaccatctggcattaggcagcacttttatctactctttcccctttgacctttgtcaccctgaaatatatattttaaacagctactgtaagtatgaaatgaaagaaaaacaatcattggacggaaaaggacaacccatatgttccaaaggctgaatgcccaaggttgttttagaggattggatagacttgcacgtctcaggtttttgccatgcagaatcaatggatttatgcggataacagtgccttctgttgtacatgaattatcagaaaaaaatttttggagtgcattgcaattttttttaaagcataaaacatatttctagatacaacataaaccttggttatatgtcaactattctgcattttactctgtgaatttattgttaggcagttactgcaagtcactctggtttcaaaatcttcacggctccctctgctcaccctgctgctggggggcttttttcaggggttgtattataaaatatgcactggctgtggtttttcataagatgttttgtggctttttaaagaagtgtcttactccctcttctctcatttttttctgccttgaaaaggggtggtatttcttttggggtcaacaaatacacatatcagtttcactcctaaccttgtaagttcaggactcattttcttggcagcaagtggcaggggctctttagtcactggagttaacagtaagtctgagtatattctgaataatgtaattatgcaattaattgataatcatacctaaagcacattgaacttctaagagacaggtgctacgtaagcacactgtctttctggatggggacttgtattttaaataacttatcattccagctatgttggactagggtccaaagcattttataatatttttttttaatctaggaaaaagacccaaacaaatctaacttcttgctttctcacctatttgaattttctcctacctaatttgtttgtgtctttattatagctcagtttgacttctcaaacttttcaagggttggggcagctgcacttttaggttgcctataggaaatattgcatatggagattacagtgtttttctgacctagttcaagaccagaacatgggtcatagggtttttattcagcaaaatgaaaacgtatcttcagaacttaacatattactggatgtgatacagattttgctttctgtggaattgaaaattcacaaaaattcacagcttaaatttcccatcagtgactggaggaatttttttcaggtgcttcctatattaccatccctcatgcatattaactctttagaattttaggttaagtgatgtctatagaagtagcctggaaaaccatgagttttggagttcagtgaccccctgctttcctctgctcctcccttcccaaggcattgaagctgaatgtgccaactggcagttagaagcgaaagatggcattgggagaaattttagagagctttcaaactctttattctcatgttccacatggtctaattttaacataaataatatgccttcacactggattgtaaaaggcatgtgatttttgagattttattttgtgatgtattgtcttctgcagtattaaagggaaagagatattaatgtgcattaccctatcttgtttttgaagccagggtagttgtatgattttgttaccagcagtgctaacctgaatgtgacctggttaccttggaaatgcaggaacttatatgaatgtactataaaataaaatgcggactgattcccaggaaaaactgaacttttg

SEQ ID NO: 294722 - DNA, 5957 bp, Homo sapiens
gaaaaagggaggacagggggcgcggaggcagagtggcgcagcaagtggccgcaggtggcgacggtggcggggggtggggtgtgaggtaatccaggggtcgcggaagaggaggctgagagggtcaaaagaaaactaaagctgcagtccggcctactgttccgggggccgcggagcccccacccggggagatggacctcaaccggatcatccaggcgctgaagggcaccatcgacccgaagttgcggattgcagccgagaacgagctcaaccagtcctacaagattatcaattttgcccccagtttacttcggattatagtctctgaccatgtggaattcccagtacgacaggcagctgccatttacctgaagaacatggtgacacaatactggccagatcgagaacctccaccaggagaagcaatatttccattcaacattcacgaaaacgatcgccagcaaatacgtgataacattgtggaaggaataattcggtctccagatttagtgagagtccaattaacaatgtgtctccgtgccatcataaaacatgattttcctggtcactggccaggagtggtcgacaagatagactattacttgcaatcacagagcagtgcaagctggcttggcagtttattatgcctgtatcaactggtgaagacatatgaatataagaaagcagaagagagagaacctcttataatagcaatgcagatattcctgcctcgtattcagcaacaaattgttcagctccttcctgattcctcctattattctgtattactgcagaaacaaattctgaaaatcttttatgcacttgattttctctttgtattttaagatatggaagcccaggaaatgtcacaaaagaatactttgaattttctgaattctttttgaaaacctatgcagtgggcattcagcaggtgctactaaaaattttagatcaatatagacagaaagaatatgtagctccccgtgttctccagcaagcattcaactatctcaaccaaggggtggttcattctataacctggaagcagatgaagccacacatacagaatatctctgaagatgtgattttttctgtgatgtgttataaagatgaggatgaagagctgtggcaagaagatccatatgagtatataaggatgaaatttgatatttttgaagattatgcttctcccaccacagcagcccagactctcttatatactgctgcaaagaaaagaaaagaggtgttgccaaaaatgatggcattctgttatcaaatcctgacagacccgaactttgaccctaggaagaaagatggagccctgcatgtgattggttccctagctgagattttactgaagaagagtttattcaaggaccaaatggagctgtttctacaaaatcatgtatttccattattattgtctaacctgggatatcttcgagctagatcttgctgggtacttcatgcatttagttctttgaagttccataatgagctcaatctaagaaatgccgttgaattagcgaagaagagcctgattgaagataaagagatgcctgtcaaagttgaagctgcccttgctcttcagtctttaatttctaaccagatacaagctaaggaatatatgaagccacatgtgaggcctattatgcaggaactgttgcacattgttagagagacagaaaatgatgatgttactaatgtcatccagaagatgatatgtgaatacagtcaagaggtagcctcaattgctgttgatatgacccaacacttggctgagatatttggcaaagttcttcaaagtgatgaatatgaagaagttgaagacaaaacagtaatggctatgggaattttacataccattgatactatcttaacagttgtagaagatcataaagagattacccagcagttagagaatatctgtctacggatcattgatcttgttctgcagaaacatgtaattgaattctatgaagaaattctttccctggcatacagtttaacctgccacagtatttcccctcaaatgtggcagcttctaggtatactatatgaagtgtttcagcaggattgctttgaatactttacagacatgatgcctctcctgcataattatgtgacaatagatacagataccttactatcaaatgcaaaacatttagaaattctttttacaatgtgtaggaaggtactatgtggagatgcaggagaagatgcagagtgtcatgcagctaaacttctggaagtcatcattcttcagtgcaaaggaaggggaattgatcagtgcattccactcttcgttcaacttgttttggagagattaactcgaggggtcaaaactagtgagcttcgtactatgtgtcttcaggttgcaattgctgccttgtactacaaccctgatttgctgctacatactttagaacgaattcagttgcctcacaaccctggacctatcactgtacagtttataaatcaatggatgaatgatacagattgttttcttgggcatcatgaccggaagatgtgtataataggactgagtatccttttggaattgcaaaatcgacctcctgcagtagatgctgtggtgggacagattgttccctcaattcttttccttttccttggcctaaagcaggtctgtgctactagacaactggtaaaccgggaagatcgttcaaaagcagagaaagctgatatggaagaaaatgaggagatttcaagtgatgaagaggagacaaatgtaactgctcaagcaatgcagtcaaataatggaagaggtgaagatgaggaggaggaagatgatgactgggatgaagaagtattggaagaaaccgcgcttgaggggttcagtactccacttgaccttgacaatagtgtggatgaatatcagttttttacacaagctctgataactgtgcagagtcgagatgcagcctggtaccagctgctgatggcaccactcagcgaggatcagaggacagcactgcaggaggtgtacacactggcagagcaccgacggacggtggcaggtcagccagagtaacctccagagtggagtgcatgtgtcagagtgccaacagacagccttatttgatgagccaggtggcacctaaacactgtttttgaaattgttagagacttaccctttaagataataaggaattgtcattattgtatgattgttttaatcactcatgatgtcttagctttgcaaaaacctgcacattaatatgtatttcctagtggtgttctcattcacattcttatcctatgttggaggcaaaggtacaaagtaagggttgggataagtcttgccgagggagacttaatcagttggatcactcccctaaacatttcaaccgtgggccaaagggacttgacgaattcttgcaaggagcttgtattcctggaaatggaatgctctctatttctcattgttgggctttatttgacattgtttcttgttgttgattttcagtttttaagctggaggaattactctgtgttgattattgtagttacttgtagattgtcattggaaaagattttgtagttacaaaaaaattttagtaggaaacatggcaaactagacatctagagtttagaatgctggctcttctgcatggacttagattttcagttctgtgcagattctcagtcagccttcctgatatgagaagtctgggccccctttcagcagtagagacagtgaagtagaatccacctctgagacgtgttttcttttcactcgttttttgcagattttccgatggtagtgaacataccaccttattgacataggtctgttattcttagttattctttggcaggataactaatactaccagtcacattctttcacagttctaagcatataaagaatctggctcctttgagtcatctccaactttgtcaccttaagcattctttttttttcttctccccttttcttttgaaaaatgctagaggcaaagaagaagattgaacaacagggaggcttcacctttgaaaacaaaggagtcctctccgcatttaattttgggactgtgcccagcaacaactgaaggaaagaacatcagctgaccaaatgtcatcgctgcattttatttcacaagaggagtgtgagggtcaaggggatgaaatgaggggctgcttttagggccctcctgctgtgccagttaccatctggcattaggcagcacttttatctactctttcccctttgacctttgtcaccctgaaatatatattttaaacagctactgtaagtatgaaatgaaagaaaaacaatcattggacggaaaaggacaacccatatgttccaaaggctgaatgcccaaggttgttttagaggattggatagacttgcacgtctcaggtttttgccatgcagaatcaatggatttatgcggataacagtgccttctgttgtacatgaattatcagaaaaaaatttttggagtgcattgcaattttttttaaagcataaaacatatttctagatacaacataaaccttggttatatgtcaactattctgcattttactctgtgaatttattgttaggcagttactgcaagtcactctggtttcaaaatcttcacggctccctctgctcaccctgctgctggggggcttttttcaggggttgtattataaaatatgcactggctgtggtttttcataagatgttttgtggctttttaaagaagtgtcttactccctcttctctcatttttttctgccttgaaaaggggtggtatttcttttggggtcaacaaatacacatatcagtttcactcctaaccttgtaagttcaggactcattttcttggcagcaagtggcaggggctctttagtcactggagttaacagtaagtctgagtatattctgaataatgtaattatgcaattaattgataatcatacctaaagcacattgaacttctaagagacaggtgctacgtaagcacactgtctttctggatggggacttgtattttaaataacttatcattccagctatgttggactagggtccaaagcattttataatatttttttttaatctaggaaaaagacccaaacaaatctaacttcttgctttctcacctatttgaattttctcctacctaatttgtttgtgtctttattatagctcagtttgacttctcaaacttttcaagggttggggcagctgcacttttaggttgcctataggaaatattgcatatggagattacagtgtttttctgacctagttcaagaccagaacatgggtcatagggtttttattcagcaaaatgaaaacgtatcttcagaacttaacatattactggatgtgatacagattttgctttctgtggaattgaaaattcacaaaaattcacagcttaaatttcccatcagtgactggaggaatttttttcaggtgcttcctatattaccatccctcatgcatattaactctttagaattttaggttaagtgatgtctatagaagtagcctggaaaaccatgagttttggagttcagtgaccccctgctttcctctgctcctcccttcccaaggcattgaagctgaatgtgccaactggcagttagaagcgaaagatggcattgggagaaattttagagagctttcaaactctttattctcatgttccacatggtctaattttaacataaataatatgccttcacactggattgtaaaaggcatgtgatttttgagattttattttgtgatgtattgtcttctgcagtattaaagggaaagagatattaatgtgcattaccctatcttgtttttgaagccagggtagttgtatgattttgttaccagcagtgctaacctgaatgtgacctggttaccttggaaatgcaggaacttatatgaatgtactataaaataaaatgcggactgattcccaggaaaaactgaacttttg

SEQ ID NO: 294723 - DNA, 5992 bp, Homo sapiens
cgcctcctcctgtcgggttggcaggactgttttgacaccgattggccgagttttgcggagcgctgggcagtgctgttgggagagtgctctgggaagaataggcagttttcatggtgatactgctttatctaagacacatcaaatcctacaagattatcaattttgcccccagtttacttcggattatagtctctgaccatgtggaattcccagtacgacaggcagctgccatttacctgaagaacatggtgacacaatactggccagatcgagaacctccaccaggagaagcaatatttccattcaacattcacgaaaacgatcgccagcaaatacgtgataacattgtggaaggaataattcggtctccagatttagtgagagtccaattaacaatgtgtctccgtgccatcataaaacatgattttcctggtcactggccaggagtggtcgacaagatagactattacttgcaatcacagagcagtgcaagctggcttggcagtttattatgcctgtatcaactggtgaagacatatgaatataagaaagcagaagagagagaacctcttataatagcaatgcagatattcctgcctcgtattcagcaacaaattgttcagctccttcctgattcctcctattattctgtattactgcagaaacaaattctgaaaatcttttatgcacttgtatgcattgcctcttcagctagtgaataaccaaaccatgacaacatggatggagatcttccgaactattatcgacaggaccgttcctcctgagactctgcacattgatgaggatgatagaccagaactggtatggtggaagtgtaagaagtgggcactgcatattgtagctcggctctttgaacgatatggaagcccaggaaatgtcacaaaagaatactttgaattttctgaattctttttgaaaacctatgcagtgggcattcagcaggtgctactaaaaattttagatcaatatagacagaaagaatatgtagctccccgtgttctccagcaagcattcaactatctcaaccaaggggtggttcattctataacctggaagcagatgaagccacacatacagaatatctctgaagatgtgattttttctgtgatgtgttataaagatgaggatgaagagctgtggcaagaagatccatatgagtatataaggatgaaatttgatatttttgaagattatgcttctcccaccacagcagcccagactctcttatatactgctgcaaagaaaagaaaagaggtgttgccaaaaatgatggcattctgttatcaaatcctgacagacccgaactttgaccctaggaagaaagatggagccctgcatgtgattggttccctagctgagattttactgaagaagagtttattcaaggaccaaatggagctgtttctacaaaatcatgtatttccattattattgtctaacctgggatatcttcgagctagatcttgctgggtacttcatgcatttagttctttgaagttccataatgagctcaatctaagaaatgccgttgaattagcgaagaagagcctgattgaagataaagagatgcctgtcaaagttgaagctgcccttgctcttcagtctttaatttctaaccagatacaagctaaggaatatatgaagccacatgtgaggcctattatgcaggaactgttgcacattgttagagagacagaaaatgatgatgttactaatgtcatccagaagatgatatgtgaatacagtcaagaggtagcctcaattgctgttgatatgacccaacacttggctgagatatttggcaaagttcttcaaagtgatgaatatgaagaagttgaagacaaaacagtaatggctatgggaattttacataccattgatactatcttaacagttgtagaagatcataaagagattacccagcagttagagaatatctgtctacggatcattgatcttgttctgcagaaacatgtaattgaattctatgaagaaattctttccctggcatacagtttaacctgccacagtatttcccctcaaatgtggcagcttctaggtatactatatgaagtgtttcagcaggattgctttgaatactttacagacatgatgcctctcctgcataattatgtgacaatagatacagataccttactatcaaatgcaaaacatttagaaattctttttacaatgtgtaggaaggtactatgtggagatgcaggagaagatgcagagtgtcatgcagctaaacttctggaagtcatcattcttcagtgcaaaggaaggggaattgatcagtgcattccactcttcgttcaacttgttttggagagattaactcgaggggtcaaaactagtgagcttcgtactatgtgtcttcaggttgcaattgctgccttgtactacaaccctgatttgctgctacatactttagaacgaattcagttgcctcacaaccctggacctatcactgtacagtttataaatcaatggatgaatgatacagattgttttcttgggcatcatgaccggaagatgtgtataataggactgagtatccttttggaattgcaaaatcgacctcctgcagtagatgctgtggtgggacagattgttccctcaattcttttccttttccttggcctaaagcaggtctgtgctactagacaactggtaaaccgggaagatcgttcaaaagcagagaaagctgatatggaagaaaatgaggagatttcaagtgatgaagaggagacaaatgtaactgctcaagcaatgcagtcaaataatggaagaggtgaagatgaggaggaggaagatgatgactgggatgaagaagtattggaagaaaccgcgcttgaggggttcagtactccacttgaccttgacaatagtgtggatgaatatcagttttttacacaagctctgataactgtgcagagtcgagatgcagcctggtaccagctgctgatggcaccactcagcgaggatcagaggacagcactgcaggaggtgtacacactggcagagcaccgacggacggtggcaggtcagccagagtaacctccagagtggagtgcatgtgtcagagtgccaacagacagccttatttgatgagccaggtggcacctaaacactgtttttgaaattgttagagacttaccctttaagataataaggaattgtcattattgtatgattgttttaatcactcatgatgtcttagctttgcaaaaacctgcacattaatatgtatttcctagtggtgttctcattcacattcttatcctatgttggaggcaaaggtacaaagtaagggttgggataagtcttgccgagggagacttaatcagttggatcactcccctaaacatttcaaccgtgggccaaagggacttgacgaattcttgcaaggagcttgtattcctggaaatggaatgctctctatttctcattgttgggctttatttgacattgtttcttgttgttgattttcagtttttaagctggaggaattactctgtgttgattattgtagttacttgtagattgtcattggaaaagattttgtagttacaaaaaaattttagtaggaaacatggcaaactagacatctagagtttagaatgctggctcttctgcatggacttagattttcagttctgtgcagattctcagtcagccttcctgatatgagaagtctgggccccctttcagcagtagagacagtgaagtagaatccacctctgagacgtgttttcttttcactcgttttttgcagattttccgatggtagtgaacataccaccttattgacataggtctgttattcttagttattctttggcaggataactaatactaccagtcacattctttcacagttctaagcatataaagaatctggctcctttgagtcatctccaactttgtcaccttaagcattctttttttttcttctccccttttcttttgaaaaatgctagaggcaaagaagaagattgaacaacagggaggcttcacctttgaaaacaaaggagtcctctccgcatttaattttgggactgtgcccagcaacaactgaaggaaagaacatcagctgaccaaatgtcatcgctgcattttatttcacaagaggagtgtgagggtcaaggggatgaaatgaggggctgcttttagggccctcctgctgtgccagttaccatctggcattaggcagcacttttatctactctttcccctttgacctttgtcaccctgaaatatatattttaaacagctactgtaagtatgaaatgaaagaaaaacaatcattggacggaaaaggacaacccatatgttccaaaggctgaatgcccaaggttgttttagaggattggatagacttgcacgtctcaggtttttgccatgcagaatcaatggatttatgcggataacagtgccttctgttgtacatgaattatcagaaaaaaatttttggagtgcattgcaattttttttaaagcataaaacatatttctagatacaacataaaccttggttatatgtcaactattctgcattttactctgtgaatttattgttaggcagttactgcaagtcactctggtttcaaaatcttcacggctccctctgctcaccctgctgctggggggcttttttcaggggttgtattataaaatatgcactggctgtggtttttcataagatgttttgtggctttttaaagaagtgtcttactccctcttctctcatttttttctgccttgaaaaggggtggtatttcttttggggtcaacaaatacacatatcagtttcactcctaaccttgtaagttcaggactcattttcttggcagcaagtggcaggggctctttagtcactggagttaacagtaagtctgagtatattctgaataatgtaattatgcaattaattgataatcatacctaaagcacattgaacttctaagagacaggtgctacgtaagcacactgtctttctggatggggacttgtattttaaataacttatcattccagctatgttggactagggtccaaagcattttataatatttttttttaatctaggaaaaagacccaaacaaatctaacttcttgctttctcacctatttgaattttctcctacctaatttgtttgtgtctttattatagctcagtttgacttctcaaacttttcaagggttggggcagctgcacttttaggttgcctataggaaatattgcatatggagattacagtgtttttctgacctagttcaagaccagaacatgggtcatagggtttttattcagcaaaatgaaaacgtatcttcagaacttaacatattactggatgtgatacagattttgctttctgtggaattgaaaattcacaaaaattcacagcttaaatttcccatcagtgactggaggaatttttttcaggtgcttcctatattaccatccctcatgcatattaactctttagaattttaggttaagtgatgtctatagaagtagcctggaaaaccatgagttttggagttcagtgaccccctgctttcctctgctcctcccttcccaaggcattgaagctgaatgtgccaactggcagttagaagcgaaagatggcattgggagaaattttagagagctttcaaactctttattctcatgttccacatggtctaattttaacataaataatatgccttcacactggattgtaaaaggcatgtgatttttgagattttattttgtgatgtattgtcttctgcagtattaaagggaaagagatattaatgtgcattaccctatcttgtttttgaagccagggtagttgtatgattttgttaccagcagtgctaacctgaatgtgacctggttaccttggaaatgcaggaacttatatgaatgtactataaaataaaatgcggactgattcccaggaaaaactgaacttttg

SEQ ID NO: 294724 - DNA, 5334 bp, Homo sapiens
cacatcgagctcggcctctgttatcatttattagtttttgaagacttcttcactattgtacctgtgcaaatacaagccatttgacaggataaaatcttcagaaaactattaacagtggatatcagagtttcccgtatggatgccctataaaaacaaaaaaaggggatccctcaaaatccgaccggcgggcttgcatctttgacctgggccctcgttaacgatgtgcgtgcctggaaaacctctggggagaatactttgaattttctgaattctttttgaaaacctatgcagtgggcattcagcaggtgctactaaaaattttagatcaatatagacagaaagaatatgtagctccccgtgttctccagcaagcattcaactatctcaaccaaggggtggttcattctataacctggaagcagatgaagccacacatacagaatatctctgaagatgtgattttttctgtgatgtgttataaagatgaggatgaagagctgtggcaagaagatccatatgagtatataaggatgaaatttgatatttttgaagattatgcttctcccaccacagcagcccagactctcttatatactgctgcaaagaaaagaaaagaggtgttgccaaaaatgatggcattctgttatcaaatcctgacagacccgaactttgaccctaggaagaaagatggagccctgcatgtgattggttccctagctgagattttactgaagaagagtttattcaaggaccaaatggagctgtttctacaaaatcatgtatttccattattattgtctaacctgggatatcttcgagctagatcttgctgggtacttcatgcatttagttctttgaagttccataatgagctcaatctaagaaatgccgttgaattagcgaagaagagcctgattgaagataaagagatgcctgtcaaagttgaagctgcccttgctcttcagtctttaatttctaaccagatacaagctaaggaatatatgaagccacatgtgaggcctattatgcaggaactgttgcacattgttagagagacagaaaatgatgatgttactaatgtcatccagaagatgatatgtgaatacagtcaagaggtagcctcaattgctgttgatatgacccaacacttggctgagatatttggcaaagttcttcaaagtgatgaatatgaagaagttgaagacaaaacagtaatggctatgggaattttacataccattgatactatcttaacagttgtagaagatcataaagagattacccagcagttagagaatatctgtctacggatcattgatcttgttctgcagaaacatgtaattgaattctatgaagaaattctttccctggcatacagtttaacctgccacagtatttcccctcaaatgtggcagcttctaggtatactatatgaagtgtttcagcaggattgctttgaatactttacagacatgatgcctctcctgcataattatgtgacaatagatacagataccttactatcaaatgcaaaacatttagaaattctttttacaatgtgtaggaaggtactatgtggagatgcaggagaagatgcagagtgtcatgcagctaaacttctggaagtcatcattcttcagtgcaaaggaaggggaattgatcagtgcattccactcttcgttcaacttgttttggagagattaactcgaggggtcaaaactagtgagcttcgtactatgtgtcttcaggttgcaattgctgccttgtactacaaccctgatttgctgctacatactttagaacgaattcagttgcctcacaaccctggacctatcactgtacagtttataaatcaatggatgaatgatacagattgttttcttgggcatcatgaccggaagatgtgtataataggactgagtatccttttggaattgcaaaatcgacctcctgcagtagatgctgtggtgggacagattgttccctcaattcttttccttttccttggcctaaagcaggtctgtgctactagacaactggtaaaccgggaagatcgttcaaaagcagagaaagctgatatggaagaaaatgaggagatttcaagtgatgaagaggagacaaatgtaactgctcaagcaatgcagtcaaataatggaagaggtgaagatgaggaggaggaagatgatgactgggatgaagaagtattggaagaaaccgcgcttgaggggttcagtactccacttgaccttgacaatagtgtggatgaatatcagttttttacacaagctctgataactgtgcagagtcgagatgcagcctggtaccagctgctgatggcaccactcagcgaggatcagaggacagcactgcaggaggtgtacacactggcagagcaccgacggacggtggcaggtcagccagagtaacctccagagtggagtgcatgtgtcagagtgccaacagacagccttatttgatgagccaggtggcacctaaacactgtttttgaaattgttagagacttaccctttaagataataaggaattgtcattattgtatgattgttttaatcactcatgatgtcttagctttgcaaaaacctgcacattaatatgtatttcctagtggtgttctcattcacattcttatcctatgttggaggcaaaggtacaaagtaagggttgggataagtcttgccgagggagacttaatcagttggatcactcccctaaacatttcaaccgtgggccaaagggacttgacgaattcttgcaaggagcttgtattcctggaaatggaatgctctctatttctcattgttgggctttatttgacattgtttcttgttgttgattttcagtttttaagctggaggaattactctgtgttgattattgtagttacttgtagattgtcattggaaaagattttgtagttacaaaaaaattttagtaggaaacatggcaaactagacatctagagtttagaatgctggctcttctgcatggacttagattttcagttctgtgcagattctcagtcagccttcctgatatgagaagtctgggccccctttcagcagtagagacagtgaagtagaatccacctctgagacgtgttttcttttcactcgttttttgcagattttccgatggtagtgaacataccaccttattgacataggtctgttattcttagttattctttggcaggataactaatactaccagtcacattctttcacagttctaagcatataaagaatctggctcctttgagtcatctccaactttgtcaccttaagcattctttttttttcttctccccttttcttttgaaaaatgctagaggcaaagaagaagattgaacaacagggaggcttcacctttgaaaacaaaggagtcctctccgcatttaattttgggactgtgcccagcaacaactgaaggaaagaacatcagctgaccaaatgtcatcgctgcattttatttcacaagaggagtgtgagggtcaaggggatgaaatgaggggctgcttttagggccctcctgctgtgccagttaccatctggcattaggcagcacttttatctactctttcccctttgacctttgtcaccctgaaatatatattttaaacagctactgtaagtatgaaatgaaagaaaaacaatcattggacggaaaaggacaacccatatgttccaaaggctgaatgcccaaggttgttttagaggattggatagacttgcacgtctcaggtttttgccatgcagaatcaatggatttatgcggataacagtgccttctgttgtacatgaattatcagaaaaaaatttttggagtgcattgcaattttttttaaagcataaaacatatttctagatacaacataaaccttggttatatgtcaactattctgcattttactctgtgaatttattgttaggcagttactgcaagtcactctggtttcaaaatcttcacggctccctctgctcaccctgctgctggggggcttttttcaggggttgtattataaaatatgcactggctgtggtttttcataagatgttttgtggctttttaaagaagtgtcttactccctcttctctcatttttttctgccttgaaaaggggtggtatttcttttggggtcaacaaatacacatatcagtttcactcctaaccttgtaagttcaggactcattttcttggcagcaagtggcaggggctctttagtcactggagttaacagtaagtctgagtatattctgaataatgtaattatgcaattaattgataatcatacctaaagcacattgaacttctaagagacaggtgctacgtaagcacactgtctttctggatggggacttgtattttaaataacttatcattccagctatgttggactagggtccaaagcattttataatatttttttttaatctaggaaaaagacccaaacaaatctaacttcttgctttctcacctatttgaattttctcctacctaatttgtttgtgtctttattatagctcagtttgacttctcaaacttttcaagggttggggcagctgcacttttaggttgcctataggaaatattgcatatggagattacagtgtttttctgacctagttcaagaccagaacatgggtcatagggtttttattcagcaaaatgaaaacgtatcttcagaacttaacatattactggatgtgatacagattttgctttctgtggaattgaaaattcacaaaaattcacagcttaaatttcccatcagtgactggaggaatttttttcaggtgcttcctatattaccatccctcatgcatattaactctttagaattttaggttaagtgatgtctatagaagtagcctggaaaaccatgagttttggagttcagtgaccccctgctttcctctgctcctcccttcccaaggcattgaagctgaatgtgccaactggcagttagaagcgaaagatggcattgggagaaattttagagagctttcaaactctttattctcatgttccacatggtctaattttaacataaataatatgccttcacactggattgtaaaaggcatgtgatttttgagattttattttgtgatgtattgtcttctgcagtattaaagggaaagagatattaatgtgcattaccctatcttgtttttgaagccagggtagttgtatgattttgttaccagcagtgctaacctgaatgtgacctggttaccttggaaatgcaggaacttatatgaatgtactataaaataaaatgcggactgattcccaggaaaaactgaacttttg

SEQ ID NO: 294725 - DNA, 4442 bp, Homo sapiens
gaaaaagggaggacagggggcgcggaggcagagtggcgcagcaagtggccgcaggtggcgacggtggcggggggtggggtgtgaggtaatccaggggtcgcggaagaggaggctgagagggtcaaaagaaaactaaagctgcagtccggcctactgttccgggggccgcggagcccccacccggggagatggacctcaaccggatcatccaggcgctgaagggcaccatcgacccgaagttgcggattgcagccgagaacgagctcaaccagtcctacaagattatcaattttgcccccagtttacttcggattatagtctctgaccatgtggaattcccagtacgacaggcagctgccatttacctgaagaacatggtgacacaatactggccagatcgagaacctccaccaggagaagcaatatttccattcaacattcacgaaaacgatcgccagcaaatacgtgataacattgtggaaggaataattcggtctccagatttagtgagagtccaattaacaatgtgtctccgtgccatcataaaacatgattttcctggtcactggccaggagtggtcgacaagatagactattacttgcaatcacagagcagtgcaagctggcttggcagtttattatgcctgtatcaactggtgaagacatatgaatataagaaagcagaagagagagaacctcttataatagcaatgcagatattcctgcctcgtattcagcaacaaattgttcagctccttcctgattcctcctattattctgtattactgcagaaacaaattctgaaaatcttttatgcacttgtatgcattgcctcttcagctagtgaataaccaaaccatgacaacatggatggagatcttccgaactattatcgacaggaccgttcctcctgagactctgcacattgatgaggatgatagaccagaactggtatggtggaagtgtaagaagtgggcactgcatattgtagctcggctctttgaacgatatggaagcccaggaaatgtcacaaaagaatactttgaattttctgaattctttttgaaaacctatgcagtgggcattcagcaggtgctactaaaaattttagatcaatatagacagaaagaatatgtagctccccgtgttctccagcaagcattcaactatctcaaccaaggggtggttcattctataacctggaagcagatgaagccacacatacagaatatctctgaagatgtgattttttctgtgatgtgttataaagatgaggatgaagagctgtggcaagaagatccatatgagtatataaggatgaaatttgatatttttgaagattatgcttctcccaccacagcagcccagactctcttatatactgctgcaaagaaaagaaaagaggtgttgccaaaaatgatggcattctgttatcaaatcctgacagacccgaactttgaccctaggaagaaagatggagccctgcatgtgattggttccctagctgagattttactgaagaagagtttattcaaggaccaaatggagctgtttctacaaaatcatgtatttccattattattgtctaacctgggatatcttcgagctagatcttgctgggtacttcatgcatttagttctttgaagttccataatgagctcaatctaagaaatgccgttgaattagcgaagaagagcctgattgaagataaagagatgcctgtcaaagttgaagctgcccttgctcttcagtctttaatttctaaccagatacaagctaaggaatatatgaagccacatgtgaggcctattatgcaggaactgttgcacattgttagagagacagaaaatgatgatgttactaatgtcatccagaagatgatatgtgaatacagtcaagaggtagcctcaattgctgttgatatgacccaacacttggctgagatatttggcaaagttcttcaaagtgatgaatatgaagaagttgaagacaaaacagtaatggctatgggaattttacataccattgatactatcttaacagttgtagaagatcataaagagattacccagcagttagagaatatctgtctacggatcattgatcttgttctgcagaaacatgtaattgaattctatgaagaaattctttccctggcatacagtttaacctgccacagtatttcccctcaaatgtggcagcttctaggtatactatatgaagtgtttcagcaggattgctttgaatactttacagacatgatgcctctcctgcataattatgtgacaatagatacagataccttactatcaaatgcaaaacatttagaaattctttttacaatgtgtaggaaggtactatgtggagatgcaggagaagatgcagagtgtcatgcagctaaacttctggaagtcatcattcttcagtgcaaaggaaggggaattgatcagtgcattccactcttcgttcaacttgttttggagagattaactcgaggggtcaaaactagtgagcttcgtactatgtgtcttcaggttgcaattgctgccttgtactacaaccctgatttgctgctacatactttagaacgaattcagttgcctcacaaccctggacctatcactgtacagtttataaatcaatggatgaatgatacagattgttttcttgggcatcatgaccggaagatgtgtataataggactgagtatccttttggaattgcaaaatcgacctcctgcagtagatgctgtggtgggacagattgttccctcaattcttttccttttccttggcctaaagcaggtctgtgctactagacaactggtaaaccgggaagatcgttcaaaagcagagaaagctgatatggaagaaaatgaggagatttcaagtgatgaagaggagacaaatgtaactgctcaagcaatgcagtcaaataatggaagaggtgaagatgaggaggaggaagatgatgactgggatgaagaagtattggaagaaaccgcgcttgaggggttcagtactccacttgaccttgacaatagtgtggatgaatatcagttttttacacaagctctgataactgtgcagagtcgagatgcagcctggtaccagctgctgatggcaccactcagcgaggatcagaggacagcactgcaggaggtgtacacactggcagagcaccgacggacggtggcaggtcagccagagtaacctccagagtggagtgcatgtgtcagagtgccaacagacagccttatttgatgagccaggtggcacctaaacactgtttttgaaattgttagagacttaccctttaagataataaggaattgtcattattgtatgattgttttaatcactcatgatgtcttagctttgcaaaaacctgcacattaatatgtatttcctagtggtgttctcattcacattcttatcctatgttggaggcaaaggtacaaagtaagggttgggataagtcttgccgagggagacttaatcagttggatcactcccctaaacatttcaaccgtgggccaaagggacttgacgaattcttgcaaggagcttgtattcctggaaatggaatgctctctatttctcattgttgggctttatttgacattgtttcttgttgttgattttcagtttttaagctggaggaattactctgtgttgattattgtagttacttgtagattgtcattggaaaagattttgtagttacaaaaaaattttagtaggaaacatggcaaactagacatctagagtttagaatgctggctcttctgcatggacttagattttcagttctgtgcagattctcagtcagccttcctgatatgagaagtctgggccccctttcagcagtagagacagtgaagtagaatccacctctgagacgtgttttcttttcactcgttttttgcagattttccgatggtagtgaacataccaccttattgacataggtctgttattcttagttattctttggcaggataactaatactaccagtcacattctttcacagttctaagcatataaagaatctggctcctttgagtcatctccaactttgtcaccttaagcattctttttttttcttctccccttttcttttgaaaaatgctagaggcaaagaagaagattgaacaacagggaggcttcacctttgaaaacaaaggagtcctctccgcatttaattttgggactgtgcccagcaacaactgaaggaaagaacatcagctgaccaaatgtcatcgctgcattttatttcacaagaggagtgtgagggtcaaggggatgaaatgaggggctgcttttagggccctcctgctgtgccagttaccatctggcattaggcagcacttttgtttgcattgtcgaccttgaactttggacacccttgaattttagaccttaaaacctcctcatgtaa

SEQ ID NO: 294726 - DNA, 1577 bp, Homo sapiens
gaaaaagggaggacagggggcgcggaggcagagtggcgcagcaagtggccgcaggtggcgacggtggcggggggtggggtgtgaggtaatccaggggtcgcggaagaggaggctgagagggtcaaaagaaaactaaagctgcagtccggcctactgttccgggggccgcggagcccccacccggggagatggacctcaaccggatcatccaggcgctgaagggcaccatcgacccgaagttgcggattgcagccgagaacgagctcaaccagtcctacaagattatcaattttgcccccagtttacttcggattatagtctctgaccatgtggaattcccagtacgacaggcagctgccatttacctgaagaacatggtgacacaatactggccagatcgagaacctccaccaggagaagcaatatttccattcaacattcacgaaaacgatcgccagcaaatacgtgataacattgtggaaggaataattcggtctccagatttagtgagagtccaattaacaatgtgtctccgtgccatcataaaacatgattttcctggtcactggccaggagtggtcgacaagatagactattacttgcaatcacagagcagtgcaagctggcttggcagtttattatgcctgtatcaactggtgaagacatatgaatataagaaagcagaagagagagaacctcttataatagcaatgcagatattcctgcctcgtattcagcaacaaattgttcagctccttcctgattcctcctattattctgtattactgcagaaacaaattctgaaaatcttttatgcacttgtatgcattgcctcttcagctagtgaataaccaaaccatgacaacatggatggagatcttccgaactattatcgacaggaccgttcctcctgagactctgcacattgatgaggatgatagaccagaactggtatggtggaagtgtaagaagtgggcactgcatattgtagctcggctctttgaacgatatggaagcccaggaaatgtcacaaaagaatactttgaattttctgaattctttttgaaaacctatgcagtgggcattcagcaggtgctactaaaaattttagatcaatatagacagaaagaatatgtagctccccgtgttctccagcaagcattcaactatctcaaccaaggggtggttcattctataacctggaagcagatgaagccacacatacagaatatctctgaagatgtgattttttctgtgatgtgttataaagatgaggatgaagagctgtggcaagaagatccatatgagtatataaggatgaaatttgatatttttgaagattatgcttctcccaccacagcagcccagactctcttatatactgctgcaaagaaaagaaaagaggtgttgccaaaaatgatggcattctgttatcaaatcctgacagacccgaactttgaccctaggaagaaagatggagccctgcatgtgattggttccctagctgagattttactgaagaagagtttattcaaggaccaaataggagctgttgtaactggggtaccgaactcgag

SEQ ID NO: 294727 - DNA, 938 bp, Homo sapiens
gaaaaagggaggacagggggcgcggaggcagagtggcgcagcaagtggccgcaggtggcgacggtggcggggggtggggtgtgaggtaatccaggggtcgcggaagaggaggctgagagggtcaaaagaaaactaaagctgcagtccggcctactgttccgggggccgcggagcccccacccggggagatggacctcaaccggatcatccaggcgctgaagggcaccatcgacccgaagttgcggattgcagccgagaacgagctcaaccagtcctacaagattatcaattttgcccccagtttacttcggattatagtctctgaccatgtggaattcccagtacgacaggcagctgccatttacctgaagaacatggtgacacaatactggccagatcgagaacctccaccaggagaagcaatatttccattcaacattcacgaaaacgatcgccagcaaatacgtgataacattgtggaaggaataattcggtctccagatttagtgagagtccaattaacaatgtgtctccgtgccatcataaaacatgattttcctggtcactggccaggagtggtcgacaagatagactattacttgcaatcacagagcagtgcaagctggcttggcagtttattatgcctgtatcaactggtgaagacatatgaatataagaaagcagaagagagagaacctcttataatagcaatgcagatattcctgcctcgtattcagcaacaaattgttcagctccttcctgattcctcctattattctgtattactgcagaaacaaattctgaaaatcttttatgcacttgttcaggtaggtttctattgcagaaaacaaacatggagtcctgtatttctgcctgacacatggaaagtgctcaataagtgtcacttattattaaaaattattttgtattatcccata

SEQ ID NO: 294728 - DNA, 345 bp, Homo sapiens
gggtttggactttcatgctctgtaaggctgaattaaagccatcctttttggtactgctacattagcattttttctcaaactcagctgccatttacctgaagaacatggtgacacaatactggccagatcgagaacctccaccaggagaagcaatatttccattcaacattcacgaaaacgatcgccagcaaatacgtgataacattgtggaaggaataattcggtctccagatttagtgaggtatgtggtgctatatatttgtgattactagaaagcatgaaatggttagatctgagggtgggtgctgttggatctaatccttggcctcatgtttcattttctaa

SEQ ID NO: 294729 - DNA, 230 bp, Homo sapiens
  misc_feature (20)..(20): n is a, c, g, or t
  misc_feature (24)..(24): n is a, c, g, or t
ggcccccaaaggatcctttncccnaccaaataggggctcccaaatttttgggggaaccaaggaggccagaacctgtcgctggaaaccagggcaaagcagtggctcagggctccttgggtgcatgtgtatcattggagctgcctgtctgcatgtatcctctggcgcgaatgctctctgttggctctgcagtacaatatgtaaccaataaagctccctcgtttccgtatact

SEQ ID NO: 294730 - DNA, 4673 bp, Homo sapiens
tcacatcagttagcaaccatgtcagctccccttttgagctctccattcacaaacatgacatcaccctgcagcttgcagaagcggagagaatggcagatgggcccctgaaggacaggccagaaacagtggtctctcggagcagcattataatcaagccatcggatcctgtggagaggaatagccatgcacctccagcggagacaatcaggtggaaaagccatagtgccccttcagaagtgggcttctcagatgccagacatgttactgtgcggaatgcctggaagagtaggcgagacttgaaatctttagaagaccccccaactcgaataggtaaaaacgtggaatctaccaatagcaatgcctacacccagaggtcttccacagacttctcagaactcgaacagcccaggtcctgcctttttgagcagggcactcgaagggtaggaccaagttcaggggatgcccctgagccctcctccagaaggacccaaagtagcctcactgtgtcagaggtgcttacccgtcggaatcgggtaggagacaccatcactgtcgcagcctggaaccactcagcaagcatggaggaagaaggggaagactgtacactcagtgtctacaggcaactgcacaactccctggatccgtctgaactgcctgggaagcaggggctgccagagtctgggcgagtacgggccgaggaacgattacggccaaccaggccctgtgctgaggagaactgagcccgctgggtgtctgttgtctgccctctgctcctgcttctcagctcttccaccgtcctgccccacgaaggatccaaggccagttaaccaggcaagacacaagccttggctggaaaactgtggtagagccgggctgtggctcaggtaatttttgccatttggccagagggaatcagagactacaagctggacagtcacccaggcccaaccttccccaatgcacgagtcctctctctctccttgtccctgtccaccaagtagttggaccattctggcccccaaacaagggaagataaagtccccagcacacagcaggagtcaaaaattcttctcggctccttggtgggttgtttctggatcctagggcagcctctgtctgtgtggttaatgttctggtttctcagtctcctcactatatccacttcactcctcatttgcccaatgggctcaagtaccccataagatttaccagccatcagctctatctagggggctttcatttctttccccttggagttcttttcttcagacttaaagcagaaaggggtctgtgctgcctctaaaggattatgagactaccctttaggttgaagtttgacctgctcctggcttaccagtctcctggaagcagagcatgcagatactcatgcggatacccattggaatgacatcatccctccccaaccccagctctctctgctcaccttccaaaggcacctggaggtgcaagcctcatgcatctcctttcctgagcaccagtaatgctgctggcatcgcctgctttctctccagtggctggagacttcaagctgacttcattgtttccaccttgggaaaatccctaggctaagctgggcctgacccagcatcctctgccttctaggaagtgcccagcaagagggaaagcagacccctttagtcactccacaagcaatagctccatgagaggcatggactgtgagactactccctcctgttcctccttctccatcccccatggaggaggcatcgcactttaccaagctgatgcattcctacagaagtgggccccggatttctgcaagtcgactatcatgatgacttcgctggaggaaaggtgatacgtacatacgcattgagggcctcagctttatatagttcaaaatgcagcaaacttttcagaaagccacgtaaataaattggttaggttccttataccagtcacatggggaagttgaaaagaattgtatattcttggcagtgctttttctttagcattctgtcaattcaaagaagggatcctctttcaaaggctacctttatgaagtagacactattgccctcagaatgagagaacattaaactaccagtctggtaagctggatttttttccccatggctttacttccttgctgtgtgaccttgggtgagtcattgtcttcttggagcctcagtttccctgtctgtaaaatgagttctttgaaatggatgatctctaagggcaccaaatctggtattctaaggttctcctgttttcaccatctataatagtatgggatgatttttgcttgtggaaggtatcatccgtgtgggttcttccctcctgccctcaattgtttttctgggccttgttttttagtttctgtatgttttaatctcatggggatgagctcagagaagctccgtgggcctgtttcccagtctgcaaagtgtgaagggattagatgggatggtctctgaggctctttgtggcatcagccttgcccagtgccacacagtatctcctggcgttctaggagtctaggtattatggaaagtacccaagtctgtgtatctcctgttcctgtgcatctcctatgaatttcctggcaagaggaagactcaagacttcctccagaggaatttgtcttctctgccttcactcagcatgggaaccagtgttcatcctgcccttgtctgtatcagatttggcagtgaggaggcttggggagcacctaccttactttcagggacaggaatctattgctcatacttctgcttcccagagttttgccaatctaaaggcattgtcatgtggcctgcctttcctgtccacatccccacctctgatgctcaagatgctatttccaagatctcttactgctgcttctcctggcttactggccagaaactagctcactcaaggctgccatccttcacttgcagcctccctgccattctccttcactggttggcaaccttgagagttcaaagaaaatcaacctctgtggtggtcaactaaaggtattaggaaactaagtctgtggctcttctctgctgatggaaacagaagggcgccaagccatgcctaaaaagatctcgccaataattcttgtctttgggtgttggagccctggattctggtgctatagctcctggtgccaaagtctggatctttccacatttcagcagcaccaacatctgctgctactcaaaatgtcctgttgaagagggacagctgtgatgcccttttgctggggctgccatcttgaaatctgagtgcaataggatttgcttgtaacagttatttcaggatattttgtttctttaatctgcacactttctagatagattttatttttaagtgtcctcagcattgcagaaaataacattgtaatagcaagtaaaggctggaggctgtttctctgggcttcaaatggctggcaaggctggctctcaaatcccaaagttgggaggcatgtttctgaaaagcaactgaggtgtgactgtttggacccaggcctcatcatcaggggtcctggaggaagcctccaagtagaggggagacctggtagttgaatagttgtttaatcaagccaaatagtcccactgcccccggtcaacaaacccacttttatgacagttttcttccgcagcttggctcttaaattttactggcaggtgtatggttgttggagggttcctagtgagttgggggacctggcaatagagctgcttggttggaggaagtgaagctggcttagtaccagcagctgatctcttccacgtgctgctgctttttttgccactctgatactaaaccagagaaagctgcaggtggataaagaagctgtggctgttttttgcttttgggtggcaatgagaaagagtcacagtgtgggttaaagggatctgcagtggggccaaggatgccaccccaccctcagctgtaggcaagcttgcacataaataacccccgtcagtggagtgttcgggatgcagggggcactatagtgttcttggacttgtcgtcctggggcagttttagttctttatatttagtgggtcagtgccaagtgctaccacttcccaataaaggaatggggacccagaggctgggtccctggctaccttgttatgaggttttgttatttctctgacaagattgctttggaaagagctgcttttagggattattttttgaataccccgagtggggagcagggttctcctcaaagcctcacaaccataggatcataggaaaggggccctattttcctgctgcttcccagctcagaacatatactgaatggaatgtatttttaagagaataaagtctatttttttgtattttaaagattgagagggctaagaaagtagccctcaaataaactgttattgcattataggcccctttgttgggggcagcctgttggtccacacctacttgctcaggcaggtgctctggtctctctcacccctgccccttagagtctaggtgcagcagctccaagcatgggaccaaggaggccagaacctgtcgctggaaaccagggcaaagcagtggctcagggctccttgggtgcatgtgtatcattggagctgcctgtctgcatgtatcctctggcgcgaatgctctctgttggctctgcagtacaatatgtaaccaataaagctccctcgtttccgtatact

SEQ ID NO: 294731 - DNA, 2240 bp, Homo sapiens
tcacatcagttagcaaccatgtcagctccccttttgagctctccattcacaaacatgacatcaccctgcagcttgcagaagcggagagaatggcagatgggcccctgaaggacaggccagaaacagtggtctctcggagcagcattataatcaagccatcggatcctgtggagaggaatagccatgcacctccagcggagacaatcaggtggaaaagccatagtgccccttcagaagtgggcttctcagatgccagacatgttactgtgcggaatgcctggaagagtaggcgagacttgaaatctttagaagaccccccaactcgaataggtaaaaacgtggaatctaccaatagcaatgcctacacccagaggtcttccacagacttctcagaactcgaacagcccaggtcctgcctttttgagcagggcactcgaagggtaggaccaagttcaggggatgcccctgagccctcctccagaaggacccaaagtagcctcactgtgtcagaggtgcttacccgtcggaatcgggtaggagacaccatcactgtcgcagcctggaaccactcagcaagcatggaggaagaaggggaagactgtacactcagtgtctacaggcaactgcacaactccctggatccgtctgaactgcctgggaagcaggggctgccagagtctgggcgagtacgggccgaggaacgattacggccaaccaggccctgtgctgaggagaactgagcccgctgggtgtctgttgtctgccctctgctcctgcttctcagctcttccaccgtcctgccccacgaaggatccaaggccagttaaccaggcaagacacaagccttggctggaaaactgtggtagagccgggctgtggctcaggtaatttttgccatttggccagagggaatcagagactacaagctggacagtcacccaggcccaaccttccccaatgcacgagtcctctctctctccttgtccctgtccaccaagtagttggaccattctggcccccaaacaagggaagataaagtccccagcacacagcaggagtcaaaaattcttctcggctccttggtgggttgtttctggatcctagggcagcctctgtctgtgtggttaatgttctggtttctcagtctcctcactatatccacttcactcctcatttgcccaatgggctcaagtaccccataagatttaccagccatcagctctatctagggggctttcatttctttccccttggagttcttttcttcagacttaaagcagaaaggggtctgtgctgcctctaaaggattatgagactaccctttaggttgaagtttgacctgctcctggcttaccagtctcctggaagcagagcatgcagatactcatgcggatacccattggaatgacatcatccctccccaaccccagctctctctgctcaccttccaaaggcacctggaggtgcaagcctcatgcatctcctttcctgagcaccagtaatgctgctggcatcgcctgctttctctccagtggctggagacttcaagctgacttcattgtttccaccttgggaaaatccctaggctaagctgggcctgacccagcatcctctgccttctaggaagtgcccagcaagagggaaagcagacccctttagtcactccacaagcaatagctccatgagaggcatggactgtgagactactccctcctgttcctccttctccatcccccatggaggaggcatcgcactttaccaagctgatgcattcctacagaagtgggccccggatttctgcaagtcgactatcatgatgacttcgctggaggaaagcttcctcatctgcaaaattctgcgccaaaagatcgctgagaggattttaaaaaagaaaaaaaaaagactagaactcctaccacacagcagggttttgctcaaacaaaaacaaaagcaaaaacgaccctttcttttcatctccccggctaaggcgatttcttcagcatcaacctacagccccctcgtgcacccagctgaaacgccatcaatatcgcccaacagcttccagacctatctgtgaacaaacaagtgaggtctccaagaacgccaaccgtaaccccacgtcagggagccattttccagtcaagaaaatgaaaaggtgtgcaagaaagacctaaggaataaaatacccctcccagcaatcatcgatgccccttcccacgtcgctcgggacccagcacaaa

SEQ ID NO: 294732 - DNA, 1277 bp, Homo sapiens
agtccacgggcttccggccactgtgcaggggcgctttgctctctgctcccagacagaccctgtcttgctcacagcttcctgcaggctcctctgagagtccagcaaagctgggcgagatgtctcccagggaaggggaacactgacagccgtgctgctctctgctccttccactggaagggagaggctgcatggacagggggctccgggtggggcagatggggacactcaggactgcggcctgaccctcagagactgagcccaggacgtggccacctgaccagcacctcccccgtggctgtcccagcctcacggtcacggcccagcagtccgggaaagccacttacacgtagtgcccggatcctgaccccggtgagggacaggcagggtcccctgggattgggggggggggtgtggttcttggcccaagaaagccccagctgaaagcaccagctacgcaacgaaagggtctgaaaccagaaaattctttattgcaaaggtacaaaagcagtcacagcagcaggacgcacggcaataaattaggtggtggccgcagggacggggcagggcggcggcggccagacacgggcccacatgtgatctgttttcaataatttatatcatgataaaaagcagcacaaaaaataaataatgaaatggaactgccaagtagcacagaagccagggtgaggcggtgtggcggcgtggcggcatagggggccggggtccccacgccctggaaacgcaaagacctggatctctttgggaagccggaggcacggagacagaaaacaaacccacgtgacaaagagtccctcgtctttttcttaaataaaaaaatccatatattaaatcatgacaatgaaatttcaacaatctgaaaagaaaagcagaacacaccgtgcttccccggcccagctctgggcggtgacagcggctccgtccaccctggggaccagggagtcccttctccagcaaagcactgcaggccaagggcaggtagaagcccacggcccacaagacgtggacaccaagaaccccaagacgggacagaaccggccacccgctgcggcctgtcctgcggggcccagctgcctggtacagtccgtggggagatgaagggggacggcgggcagcccgggcctccgctttgctcccaactcccacctgtgcccgtgcccccggctctgctctgatagatttacagtatcaaactggaaaagaaagattgttacgaaaaatctgtagataaactgtgaatataattttatatctctata

SEQ ID NO: 294733 - DNA, 881 bp, Homo sapiens
tcggaggacctgtaggggggcctgggctgccagtgctgtagggacccaggctgcccaggcctctggggaagaacagggtccccccacccaccaactcctgccaaaggtggggcctctcctgagagcccacctgtgaggccctcggagcccacttcccatcctccctccagccaggggtcagggcacctgatggccctggcaggcacccaggtgggcccgccaccgcaggagagggcacctgagccaatcggaagagcctggggaccccctgggatcacccagccatcagccccaggagccactgtggggcggagagtgagtgtggctgcggggccttggctgcacggaccccatgggagctgtgagtgggtcagactccctggttcaggagacagacagcggacggatcccaggctgggcagctggagggaggggcgccggggcgctgggcagccgggctctgacacagtcagcagctccgggcgccgcaggccggcggggtccacacaggctggccggggctgggcctccttggagcctgctacggccctcgtgggcacgtggagaagggcccacgtgtctccacacgccagccacaggggagccctggccaggcgcccagccaggggagcgtgtgcctgggatgggtcacagaaccagcgggcacctgtgaggctggccagcaccgtggggctgtgggaatcgctcttatttatatttaaacaccttggattttcacacacacaacaaaacccctcgagcgctctattacggcgcgccgagcacaccggtccaacgggccatgccctagcggtctctgcccccttcttgccacgggaaaccgccggcccttagggacgataatcgaaccggactaacca

SEQ ID NO: 294734 - DNA, 1054 bp, Homo sapiens
agtccacgggcttccggccactgtgcaggggcgctttgctctctgctcccagacagaccctgtcttgctcacagcttcctgcaggctcctctgagagtccagcaaagctgggcgagatgtctcccagggaaggggaacactgacagccgtgctgctctctgctccttccactggaagggagaggctgcatggacagggggctccgggtggggcagatggggacactcaggactgcggcctgaccctcagagactgagcccaggacgtggccacctgaccagcacctcccccgtggctgtcccagcctcacggtcacggcccagcagtccgggaaagccacttacacgtagtgcccggatcctgaccccggtgagggacaggcagggtcccctgggattgggggggggggtgtggttcttggcccaagaaagccccagctgaaagcaccagctacgcaacgaaagggtctgaaaccagaaaattctttattgcaaaggtacaaaagcagtcacagcagcaggacgcacggcaataaattaggtggtggccgcagggacggggcagggcggcggcggccagacacgggcccacatgtgatctgttttcaataatttatatcatgataaaaagcagcacaaaaaataaataatgaaatggaactgccaagtagcacagaagccagggtgaggcggtgtggcggcgtggcggcatagggggccggggtccccacgccctggaaacgcaaagacctggatctctttgggaagccggaggcacggagacagaaaacaaacccacgtgacaccaagaaccccaagacgggacagaaccggccacccgctgcggcctgtcctgcggggcccagctgcctggtacagtccgtggggagatgaagggggacggcgggcagcccgggcctccgctttgctcccaactcccacctgtgcccgtgcccccggctctgctctgatagatttacagtatcaaactggaaaagaaagattgttacgaaaaatctgtagataaactgtgaatataattttatatctctata

SEQ ID NO: 294735 - DNA, 1238 bp, Homo sapiens
cttgccgcacccacagtggggcctccagttggggccacgtggccatgagaatgaccagctaggcttccctggaggccaggcctccctggactgggccaggtgcttcctgccagcaaagatgagtaatgtctcagggatcctggagacagccggcgtccccctggtgtcagctgaactggccgcagcccagccccccaccggctgtgccagctgggccgcagatggaccacatggggaacagctcccagggggccccctggctcttcctcacctccgcactggcccgaggcgtctcggggatcttcgtgtggactgccctggtgctcacctgccaccagatctatctgcacctgcgctcctacaccgtgccacaggagcaacgttacatcatccgcctgctcctcatcgtgcccatctacgccttcgactcctggctcagcctcctcctcctcggagaccaccagtactacgtctacttcgactctgtgcgggactgctacgaagcctttgtcatttacagcttcctgagcctgtgtttccagtacctgggaggcgagggcgccatcatggctgagattcgtggaaagcccatcaagtccagctgcttgtacggcacctgctgcctccggggcatgacctactccatcgggttcctgcgcttctgtaagcaggccactctgcagttctgcctggtgaagcccgtcatggccgtcaccaccatcatcctccaggcatttggcaaataccacgacggggacttcaatgtccgcagcggctacctctatgtgaccctcatctacaacgcctccgtcagcctcgccctctacgccctgttcctcttctacttcaccaccagggagctcctgcggcccttccagcccgtcctcaagttcctcaccatcaaagccgtcatcttcctgtcgttctggcaagggctgctgctggccatcctggagcggtgcggggtcatcccggaggtggagaccagcggcgggaacaagctgggggctggcacgctggccgccggctaccagaacttcatcatctgcgtggagatgctgttcgcctccgtggccctgcgttatgccttcccctgccaggtgtacgcagagaagaaggagaattcaccagccgtgcccccggctctgctctgatagatttacagtatcaaactggaaaagaaagattgttacgaaaaatctgtagataaactgtgaatataattttatatctctata

SEQ ID NO: 294736 - DNA, 1220 bp, Homo sapiens
cttgccgcacccacagtggggcctccagttggggccacgtggccatgagaatgaccagctaggcttccctggaggccaggcctccctggactgggccaggtgcttcctgccagcaaagatgagtaatgtctcagggatcctggagacagccggcgtccccctggtgtcagctgaactggccgcagcccagccccccaccggctgtgccagctgggccgcagatggaccacatggggaacagctcccagggggccccctggctcttcctcacctccgcactggcccgaggcgtctcggggatcttcgtgtggactgccctggtgctcacctgccaccagatctatctgcacctgcgctcctacaccgtgccacaggagcaacgttacatcatccgcctgctcctcatcgtgcccatctacgccttcgactcctggctcagcctcctcctcctcggagaccaccagtactacgtctacttcgactctgtgcgggactgctacgaagcctttgtcatttacagcttcctgagcctgtgtttccagtacctgggaggcgagggcgccatcatggctgagattcgtggaaagcccatcaagtccagctgcttgtacggcacctgctgcctccggggcatgacctactccatcgggttcctgcgcttctgtaagcaggccactctgcagttctgcctggtgaagcccgtcatggccgtcaccaccatcatcctccaggcatttggcaaataccacgacggggacttcaatgtccgcagcggctacctctatgtgaccctcatctacaacgcctccgtcagcctcgccctctacgccctgttcctcttctacttcaccaccagggagctcctgcggcccttccagcccgtcctcaagttcctcaccatcaaagccgtcatcttcctgtcgttctggcaagggctgctgctggccatcctggagcggtgcggggtcatcccggaggtggagaccagcggcgggaacaagctgggggctggcacgctggccgccggctaccagaacttcatcatctgcgtggagatgctgttcgcctccgtggccctgcgttatgccttcccctgccaggtgtacgcagagaagaaggagaattcaccagcccccccggcacccatgcagagcatctccagcggcatcagggagacagtgagcccccaggacatcgtgcaggacgccatccacaacttc

SEQ ID NO: 294737 - DNA, 1024 bp, Homo sapiens
ccagcgactacaacgaggttccatccgctcccagggggccccctggctcttcctcacctccgcactggcccgaggcgtctcggggatcttcgtgtggactgccctggtgctcacctgccaccagatctatctgcacctgcgctcctacaccgtgccacaggagcaacgttacatcatccgcctgctcctcatcgtgcccatctacgccttcgactcctggctcagcctcctcctcctcggagaccaccagtactacgtctacttcgactctgtgcgggactgctacgaagcctttgtcatttacagcttcctgagcctgtgtttccagtacctgggaggcgagggcgccatcatggctgagattcgtggaaagcccatcaagtccagctgcttgtacggcacctgctgcctccggggcatgacctactccatcgggttcctgcgcttctgtaagcaggccactctgcagttctgcctggtgaagcccgtcatggccgtcaccaccatcatcctccaggcatttggcaaataccacgacggggacttcaatgtccgcagcggctacctctatgtgaccctcatctacaacgcctccgtcagcctcgccctctacgccctgttcctcttctacttcaccaccagggagctcctgcggcccttccagcccgtcctcaagttcctcaccatcaaagccgtcatcttcctgtcgttctggcaagggctgctgctggccatcctggagcggtgcggggtcatcccggaggtggagaccagcggcgggaacaagctgggggctggcacgctggccgccggctaccagaacttcatcatctgcgtggagatgctgttcgcctccgtggccctgcgttatgccttcccctgccaggtgtacgcagagaagaaggagaattcaccagccgtgcccccggctctgctctgatagatttacagtatcaaactggaaaagaaagattgttacgaaaaatctgtagataaactgtgaatataattttatatctctata

SEQ ID NO: 294738 - DNA, 1176 bp, Homo sapiens
tcggaggacctgtaggggggcctgggctgccagtgctgtagggacccaggctgcccaggcctctggggaagaacagggtccccccacccaccaactcctgccaaaggtggggcctctcctgagagcccacctgtgaggccctcggagcccacttcccatcctccctccagccaggggtcagggcacctgatggccctggcaggcacccaggtgggcccgccaccgcaggagagggcacctgagccaatcggaagagcctggggaccccctgggatcacccagccatcagccccaggagccactgtggggcggagagtgagtgtggctgcggggccttggctgcacggaccccatgggagctgtgagtgggtcagactccctggttcaggagacagacagcggacggatcccaggctgggcagctggagggaggggcgccggggcgctgggcagccgggctctgacacagtcagcagctccgggcgccgcaggccggcggggtccacacaggctggccggggctgggcctccttggagcctgctacggccctcgtgggcacgtggagaagggcccacgtgtctccacacgccagccacaggggagccctggccaggcgcccagccaggggagcgtgtgcctgggatgggtcacagaaccagcgggcacctgtgaggctggccagcaccgtggggctgtgggaatcgctcttatttatatttaaacaccttggattttctaccgggtcttggcttctgttcccgcagggcatgagcctgaggagcaggacgcggtgggggtcacaggaggctgctgctcagagtctgcatgcgggaaaggggtcccacctgtctggggtgggcagcctcgtggtccagggcagtgcagggcagagcctgggctgtgcgatcacagccactgcctttctcctgggagcctccacttcctccaaaacgggccttgtgccagccccacccgcggcgagcggacaaggccacgaaggcagggccctgagtacctgggcgggggggacactcccagggggcacagagggggctcccacctgggcacctgcctcctgcccttctcttcttcctccacgtgccaggtggggccctgggtttgaggagcctcggacgcgtgccctgcccgcaggaagctggaggcgtgcaagtggc

SEQ ID NO: 294739 - DNA, 632 bp, Homo sapiens
gcggccgcaagaacagtagccgcccagggactaagggggcttctgggaggacacacggctggcccagggcgaggggtgtcactgcagggcgccccccaggcccagggcccgtcaggggtcatgggaccgccctgaccacagcccccgtctgtcctagtgtccgcagcggctacctctatgtgaccctcatctacaacgcctccgtcagcctcgccctctacgccctgttcctcttctacttcaccaccagggagctcctgcggcccttccagcccgtcctcaagttcctcaccatcaaagccgtcatcttcctgtcgttctggcaagggctgctgctggccatcctggagcggtgcggggtcatcccggaggtggagaccagcggcgggaacaagctgggggctggcacgctggccgccggctaccagaacttcatcatctgcgtggagatgctgttcgcctccgtggccctgcgttatgccttcccctgccaggtgtacgcagagaagaaggagaattcaccagccgtgcccccggctctgctctgatagatttacagtatcaaactggaaaagaaagattgttacgaaaaatctgtagataaactgtgaatataattttatatctctata

SEQ ID NO: 294740 - DNA, 1049 bp, Homo sapiens
cttgccgcacccacagtggggcctccagttggggccacgtggccatgagaatgaccagctaggcttccctggaggccaggcctccctggactgggccaggtgcttcctgccagcaaagatgagtaatgtctcagggatcctggagacagccggcgtccccctggtgtcagctgaactggccgcagcccagccccccaccggctgtgccagctgggccgcagatggaccacatggggaacagctcccagggggccccctggctcttcctcacctccgcactggcccgaggcgtctcggggatcttcgtgtggactgccctggtgctcacctgccaccagatctatctgcacctgcgctcctacaccgtgccacaggagcaacgttacatcatccgcctgctcctcatcgtgcccatctacgccctcgtgggcacgtggagaagggcccacgtgtctccacacgccagccacaggggagccctggccaggcgcccagccaggggagcgtgtgcctgggatgggtcacagaaccagcgggcacctgtgaggctggccagcaccgtggggctgtgggaatcgctcttatttatatttaaacaccttggattttctaccgggtcttggcttctgttcccgcagggcatgagcctgaggagcaggacgcggtgggggtcacaggaggctgctgctcagagtctgcatgcgggaaaggggtcccacctgtctggggtgggcagcctcgtggtccagggcagtgcagggcagagcctgggctgtgcgatcacagccactgcctttctcctgggagcctccacttcctccaaaacgggccttgtgccagccccacccgcggcgagcggacaaggccacgaaggcagggccctgagtacctgggcgggggggacactcccagggggcacagagggggctcccacctgggcacctgcctcctgcccttctcttcttcctccacgtgccaggtggggccctgggtttgaggagcctcggacgcgtgccctgcccgcaggaagctggaggcgtgcaagtggc

SEQ ID NO: 294741 - DNA, 817 bp, Homo sapiens
cttgccgcacccacagtggggcctccagttggggccacgtggccatgagaatgaccagctaggcttccctggaggccaggcctccctggactgggccaggtgcttcctgccagcaaagatgagtaatgtctcagggatcctggagacagccggcgtccccctggtgtcagctgaactggccgcagcccagccccccaccggctgtgccagctgggccgcagatggaccacatggggaacagctcccagggggccccctggctcttcctcacctccgcactggcccgaggcgtctcggggatcttcgtgtggactgccctggtgctcacctgccaccagatctatctgcacctgcgctcctacaccgtgccacaggagcaacgttacatcatccgcctgctcctcatcgtgcccatctacgccttcgactcctggctcagcctcctcctcctcggagaccaccagtactacgtctacttcgactctgtgcgggactgctacgaagcctttgtcatttacagcttcctgagcctgtgtttccagtacctgggaggcgagggcgccatcatggctgagattcgtggaaagcccatcaagtccagctgcttgtacggcacctgctgcctccggggcatgacctactccatcgggttcctgcgcttctgtaagcaggccactctgcagttctgcctggtgaagcccgtcatggccgtcaccaccatcatcctccaggcatttggcaaataccacgacggggacttcaagacctcgctcccttctacaagcaccgtgggcgcctggacctcccctctcccgga

SEQ ID NO: 294742 - DNA, 718 bp, Homo sapiens
ctcccaagtcctggaacgggcctccccaccctccggggcaccgacactcacggagtcactccaacttctctgggtgctccgtggagcgaagagcgctctaggacaagcaaggattcctcttctcctgtaaatgaccacagaggaagacaatgaatgaggtgaaagaatcccttcgcagcatcgagcagaagtacaagctcttccagcagcagcagctcaccttcaccgccgctctggagcactgcagggagaacgcccacgacaagatccggcccatctccagcattggacaggtgcagagctacatggaacactactgcaacagctccacagaccggcgggttctgctcatgttcctggacatctgttcagagctgaataagctctgccagcactttgaggccgtgcactctggcaccccagtcaccaacaacctcctggagaaatgcaaaaccctcgttagccaaagcaacgacttaagcagcctcagagcaaaataccctcatgatgtggtgaaccacctcagctgtgacgaggcccggaaccactacggcggcgtggtcagcctcatccccctcatcctagacttaatgaaagaatggatcgcccactccgagaagttgccgcgcaaggtgctgcagcacgggacgacttagcttctgtattattgttgcttcctcagggggagacagtcaagaataaaaagtattctaccacc

SEQ ID NO: 294743 - DNA, 2222 bp, Homo sapiens
cgccctgcaggctccgcgccgggcccagatacccgatcctcggtcgcgcgggtcgcccccgccccgacctccccggctgacgcgctctgcggctcggattcctcttctcctgtaaatgaccacagaggaagacaatgaatgaggtgaaagaatcccttcgcagcatcgagcagaagtacaagctcttccagcagcagcagctcaccttcaccgccgctctggagcactgcagggagaacgcccacgacaagatccggcccatctccagcattggacaggtgcagagctacatggaacactactgcaacagctccacagaccggcgggttctgctcatgttcctggacatctgttcagagctgaataagctctgccagcactttgaggccgtgcactctggcaccccagtcaccaacaacctcctggagaaatgcaaaaccctcgttagccaaagcaacgacttaagcagcctcagagcaaaataccctcatgatgtggtgaaccacctcagctgtgacgaggcccggaaccactacggcggcgtggtcagcctcatccccctcatcctagacttaatgaaagaatggatcgcccactccgagaagttgccgcgcaaggtgctgcagcacgtgagtgagccccaggcgcaccaggagagcaccaggggagccgctcgtcctgcccaggccatagggacccagcccagggccactaaacacaagtgtagacagctcacaaaagccagcctcaaacccaggggatgttcaaaaccaccctggaggcctcctggtgggaaattgtaactcagagccaggagctccgtcggcggagagctttgctgtttaatttggattttactggttggtccttttttcactggtacccgtggaccctgccacttactaaccccaagggaatcagccaatatattactgagacttcctctctctcttcttgctttaacttcttttttttttgagacggagtctcgctctgtcgcccaggctggagtgcggtggcgcaacctcggctcactgcaacctccgcctcccaggttcacgccattctcctgcctcagcctcccaagtagctgggactacaggcgcccaccacctcgcctggctaattttttgtatttttagtagagacagcgtttcaccatgttagccaggatggtctcaatctcctgacctcatgatctaccctcgtgatcggcctcccaaagtgctgggattacaggcgtgagccacagcgcccggccctcttgctttaacttctaacatttccacttctaagcatcaggctccgtgctgatgaagaggaaacccacttacagaagttgcccaaacaggatggtgtggtagagggtcccaggagggcactgaactgtcacctaggtcctctttgagccacatccggctccagtgccacgcctgtccctgctgcgggctgcagttttgcagagggtgatcaagctggagaccatctgctccttgccccaccaccagccccaactgtaggcaaggcacacgctgtttgcgagccagggatgctcccctccaggatggagtgggggtcggcatgtggaactcagcgtgtttatttttttattttttgagatggagtttcactctgtctcccaggctggagtgcagtggcacgatcttggctcactgcaacctccacctccaggttcaagcgattctcctgcctcagcctcctgagtagctggaattacaggcgcccaccaccccacctggctaatttatatatatatatattttttagtagagacggggcttcaccacgttggccaggctggtcttgaactcctgacctcaactggtccacccgcctcggcctcccaaagtgctgggattacaggtgtgagccacggcacctggccagaactcagtagtgtgtttagttctctggaccacagccaaaggggaataaactcacctttccttcgcctttacttgggagagggagaccatgacagaagccagaattctgattttgtggctcctgagcaagggcgatgacctggttttcacagcgtagtcgaaccccaaacattgtaaaatgtgtccctggcttctgagcttgcccaaagtaatgtctgactgttggtttttcccttcacaggggacgacttagcttctgtattattgttgcttcctcagggggagacagtcaagaataaaaagtattctaccacc

SEQ ID NO: 294744 - DNA, 515 bp, Homo sapiens
ctcccaagtcctggaacgggcctccccaccctccggggcaccgacactcacggagtcactccaacttctctgggtgctccgtggagcgaagagcgctctaggacaagcaaggattcctcttctcctgtaaatgaccacagaggaagacaatgaatgaggtgaaagaatcccttcgcagcatcgagcagaagtacaagctcttccagcagcagcagctcaccttcaccgccgctctggagcactgcagggagaacgcccacgacaagatccggcccatctccagcattggacaggtggggctcccgacccccaccccggccgaggggcaacaagcccagtcccctctcacaaaagatgaaaccactggggcccagagaggggaaggacgtttgcgccagaattaggacccggacccagaacctaaatgatgtaatgagtccttcattcgtttctctaccaaatatgtaagtgaataacaacaagtgaataaagaggcaggtttaaaactcagccgg

SEQ ID NO: 294745 - DNA, 2237 bp, Homo sapiens
ctcccaagtcctggaacgggcctccccaccctccggggcaccgacactcacggagtcactccaacttctctgggtgctccgtggagcgaagagcgctctaggacaagcaaggattcctcttctcctgtaaatgaccacagaggaagacaatgaatgaggtgaaagaatcccttcgcagcatcgagcagaagtacaagctcttccagcagcagcagctcaccttcaccgccgctctggagcactgcagggagaacgcccacgacaagatccggcccatctccagcattggacaggtgcagagctacatggaacactactgcaacagctccacagaccggcgggttctgctcatgttcctggacatctgttcagagctgaataagctctgccagcactttgaggccgtgcactctggcaccccagtcaccaacaacctcctggagaaatgcaaaaccctcgttagccaaagcaacgacttaagcagcctcagagcaaaataccctcatgatgtggtgaaccacctcagctgtgacgaggcccggaaccactacggcggcgtggtcagcctcatccccctcatcctagacttaatgaaagaatggatcgcccactccgagaagttgccgcgcaaggtgctgcagcacgtgagtgagccccaggcgcaccaggagagcaccaggggagccgctcgtcctgcccaggccatagggacccagcccagggccactaaacacaagtgtagacagctcacaaaagccagcctcaaacccaggggatgttcaaaaccaccctggaggcctcctggtgggaaattgtaactcagagccaggagctccgtcggcggagagctttgctgtttaatttggattttactggttggtccttttttcactggtacccgtggaccctgccacttactaaccccaagggaatcagccaatatattactgagacttcctctctctcttcttgctttaacttcttttttttttgagacggagtctcgctctgtcgcccaggctggagtgcggtggcgcaacctcggctcactgcaacctccgcctcccaggttcacgccattctcctgcctcagcctcccaagtagctgggactacaggcgcccaccacctcgcctggctaattttttgtatttttagtagagacagcgtttcaccatgttagccaggatggtctcaatctcctgacctcatgatctaccctcgtgatcggcctcccaaagtgctgggattacaggcgtgagccacagcgcccggccctcttgctttaacttctaacatttccacttctaagcatcaggctccgtgctgatgaagaggaaacccacttacagaagttgcccaaacaggatggtgtggtagagggtcccaggagggcactgaactgtcacctaggtcctctttgagccacatccggctccagtgccacgcctgtccctgctgcgggctgcagttttgcagagggtgatcaagctggagaccatctgctccttgccccaccaccagccccaactgtaggcaaggcacacgctgtttgcgagccagggatgctcccctccaggatggagtgggggtcggcatgtggaactcagcgtgtttatttttttattttttgagatggagtttcactctgtctcccaggctggagtgcagtggcacgatcttggctcactgcaacctccacctccaggttcaagcgattctcctgcctcagcctcctgagtagctggaattacaggcgcccaccaccccacctggctaatttatatatatatatattttttagtagagacggggcttcaccacgttggccaggctggtcttgaactcctgacctcaactggtccacccgcctcggcctcccaaagtgctgggattacaggtgtgagccacggcacctggccagaactcagtagtgtgtttagttctctggaccacagccaaaggggaataaactcacctttccttcgcctttacttgggagagggagaccatgacagaagccagaattctgattttgtggctcctgagcaagggcgatgacctggttttcacagcgtagtcgaaccccaaacattgtaaaatgtgtccctggcttctgagcttgcccaaagtaatgtctgactgttggtttttcccttcacaggggacgacttagcttctgtattattgttgcttcctcagggggagacagtcaagaataaaaagtattctaccacc

SEQ ID NO: 294746 - DNA, 897 bp, Homo sapiens
ctcccaagtcctggaacgggcctccccaccctccggggcaccgacactcacggagtcactccaacttctctgggtgctccgtggagcgaagagcgctctaggacaagcaaggattcctcttctcctgtaaatgaccacagaggaagacaatgaatgaggtgaaagaatcccttcgcagcatcgagcagaagtacaagctcttccagcagcagcagctcaccttcaccgccgctctggagcactgcagggagaacgcccacgacaagatccggcccatctccagcattggacaggtgcagagctacatggaacactactgcaacagctccacagaccggcgggttctgctcatgttcctggacatctgttcagagctgaataagctctgccagcactttgaggccgtgcactctggcaccccagtcaccaacaacctcctggagaaatgcaaaaccctcgttagccaaagcaacgacttaagcagcctcagagcaaaataccctcatgatgtggtgaaccacctcagctgtgacgaggcccggaaccactacggcggcgtggtcagcctcatccccctcatcctagacttaatgaaagaatggatcgcccactccgagaagttgccgcgcaaggtgctgcagcacgggacgacttagcttctgtattattgttgcttcctcagggggagacagtcaagaataaaaagtattctaccacctctctgcctgacttggtttcctgggatttatccctgaaagaaaacctacatctcccctaagacatcaaaggacactgggcagtaagcctcagcagacagcagagagagaggccaccctaggcaagggggcatgcctgtctcaagtcggcttctaagaggctcatgcccaagctccagag

SEQ ID NO: 294747 - DNA, 171 bp, Homo sapiens
tctgccagcactttgaggccgtgcactctggcaccccagtcaccaacaacctcctggagaaatgcaaaaccctcgttagccaaagcaacgacttaagcagcctcagagcaaagtaagtccctctgatgctgctcttgaggccccgtgtgtgcctgtggggaggcctctgtc

SEQ ID NO: 294748 - DNA, 1663 bp, Homo sapiens
acgagggactcgggccgcctgttgctggtggagcggcggcgggggcgggtatgccgggcggcggcggggggccctcggcggcgctgcgcgagcaggagcgggtatacgagtggttcgggctggtgctgggctcggcgcagcgcctggagttcatgtgcgggctgctggacctgtgcaacccgctggagctgcgcttccttggctcgtgcctggaggacctggcgcgcaaggactaccactacctgcgcgactcggaggccaaggccaacggcctctcggacccggggccgctggccgacttccgagagcccgcggtgcgctcgcgcctcatcgtctacctggcgctgctgggctcggagaaccgggaggccgctggccgtctgcaccgcctgctaccccaggtggactcggtgctcaaaagcctgcgcgcggcccggggcgagggctcgcggggcggcgcggaggacgagcgcggcgaggacggcgacggcgagcaggacgccgagaaggacggctcaggcccggaaggcggcattgtggagccccgggtcggcggcgggcttggctccagggcccaggaggaactgctgctgctcttcaccatggcctcgctgcacccggctttctccttccaccagcgggtcaccctgagggaacacttggagaggctccgcgccgcgctccgcgggggccccgaggacgcggaggtggaggtagagccgtgcaagtttgccggccccagggcccaggtaaggcgcacggagcctccctggactcgcggtgcgatcgctgccccggcggcctccccggcctcgctctcggacgccccttgcccgagccccagcccggcgcaggtggctcggaatccccacccggcagctcccagcgccagagggctgagcttcgtctcgctgggccgctccgttccactcccccaccccaccccacaccccggcagacacagccacccgccatcacagaatgctctagaagtcccttccgtgccacggtgttgccacggaagacgtggagctccccgcccggggcccctctcggaggaaaagtgtcgggacgtttttggctctgagcatctcagcgctcggtgcgggagccgcggggcgctggaggaacctgtgtgagagccagccgcagtgagccccaggcagcgccgtccttccccgcctgcctggccggggctccgcctcccgtctccgggctctgccgggccctcggcggggtgtcctgaaggtgcgctcccggcgagctgcccttgtctttggcacagagggactttttttgcccagtgtgtgcctgagttaaaaggggtcgtacgggtccttgtggcttctgctctgagggcttgtgttcccagcagacatctgacgtagagacctgcgaatggatctgagatgagtagtaacgcaggttgtccggggagagaaaccttttctagcgcggcctgggatgctttttccctccggcacacgcgctttctcacgggcttgattcctgcctacagattggggttccgggatatttgttgagcgtttacgataggcgttaatgttgcccaaaagaatcacttaaacaccaaaatgtagtagacgagaatccagatgagacacttgtcgcaaacattaaagatgaattttttttacagcca

SEQ ID NO: 294749 - DNA, 2212 bp, Homo sapiens
tgagcggattggccatttggagtggcactagagctgacgaaggtgccttgtggagagcatgcccgtgtgatagcttgtacgtagtggtttgtgatgacgtttgcttgtaagcggtgacttagttctgtctttcccattttaggcacttacagactgagatacgcacctcccctccccccttctaatgatacgttggattctgcagactgaaacgagtaaagcttgcctacttaatacactcaagtgtggggagtcatggggtgtggaggggaggaaaggaaaggtattttgtttctttgtctatacatttcctagatttctatgcagttgggatttttcatttctcttgtaccaatgtccaaaacaagaaagaatgcaatgcttttgagcctctggtctcctggttcaacaacaggcttatatgtatgatacatgtaatttaaaccttcagacaaacttaaatgttggtgcgtgctttttttttttttttacactgaatacttgctgtgtgcaatgtttactgaatctttaaaactgtgtatttgaccttttttttacaacactggtgacagtcatatggttttgaaaaaaaaaagaaattttgcttcttcccagcttttctcactttcaccctaaacgacacttcctccccagccagcctcactctgtctccggcccgcagcaggagcagccagcagtgcattcaccccacttttgtaaactgctctgcatataaaccaagggcagaatgtttcaccctgatcttatgggaggaatcaaactcccaaaatagtgtgtatatatgtaataaacagcgtcacgtaaatacatatatgcagtgcttgttgtccaaatagaaatgaaaataagtggaagagagaggaagaagtcaaaccatatgaaactgaaaaaatatgacgtacgaaatggacaaaaagctttttctgaaaccaactttttacttccatcatccttttttagcctgttgcttcagagagacacaaagtgaacacactggtgtgaatgtcgctctctgtgtgcttgtgtttgtaatgaaagtctacagccaattttacttgtctaccaccgtgttgtgctcaaagagacactacttgagtgaagatttcttctttccctgtaccagctgttacagtgttacgttgtgtttaaaatgtgtatggtttattgcaatctgaacagagctatgggtttctaccataagtcaggttgtttgttccctaacctgtctctcgtagcaaagtcacttttataacagtttaccactatgcttgattataatgtgaaaggcggaattctgagtgtgttaagatggtattaatcatgtcggtgtcatgtcactaagtttaatgctgctgtttttaaaaaaaaaaaaagtttttttaaaaagccaatctatgtactaaattgcttccaggtaatttttgatttcctaaagtgcactgaggttatctggaagattgggtgtattttttggtgactgctgcattcatcagcaatgaacagtttccactgtatagtcctaggggtcagggggtgggggtttcattttccattcctcagcacagagcagaaatgatagatttttattgtttggagtaacgttggtatgcagcagaggaacgtaaacatttggtcttggttcagaagcctaacagattgctagacaagagaaaaaacttgaagaaaaaagaagcttaatttcatgcttcataagtagcatttatatttatagcaccaatgtacattttgaaactttctttcaggggtgggagttatggggaaggggtgggtgtgaaggggtagatgaaagctttaatttagaaagaaagttcaagtaaaggaaattattttgattaaatatattttatttgatctgggtatttttggaccacattattaaattaattgttaagctgcagttgagttgttcaagtgagagttttgataagccacttatgggccgcgttgtgaatcacttgccagttgtactttatggagcttattttatgatttaaaatactgtactgtacataggaggtatgttaccttctccttatttgtatgtttaccatatactttgatatttgaaatgttatgtactggaaaggccacttatatttctagaacagattggattttatgcaaccttttttccttgaattaacagcaataaaaaaatgaaaaacagctt

SEQ ID NO: 294750 - DNA, 5349 bp, Homo sapiens
acgagggactcgggccgcctgttgctggtggagcggcggcgggggcgggtatgccgggcggcggcggggggccctcggcggcgctgcgcgagcaggagcgggtatacgagtggttcgggctggtgctgggctcggcgcagcgcctggagttcatgtgcgggctgctggacctgtgcaacccgctggagctgcgcttccttggctcgtgcctggaggacctggcgcgcaaggactaccactacctgcgcgactcggaggccaaggccaacggcctctcggacccggggccgctggccgacttccgagagcccgcggtgcgctcgcgcctcatcgtctacctggcgctgctgggctcggagaaccgggaggccgctggccgtctgcaccgcctgctaccccaggtggactcggtgctcaaaagcctgcgcgcggcccggggcgagggctcgcggggcggcgcggaggacgagcgcggcgaggacggcgacggcgagcaggacgccgagaaggacggctcaggcccggaaggcggcattgtggagccccgggtcggcggcgggcttggctccagggcccaggaggaactgctgctgctcttcaccatggcctcgctgcacccggctttctccttccaccagcgggtcaccctgagggaacacttggagaggctccgcgccgcgctccgcgggggccccgaggacgcggaggtggaggtagagccgtgcaagtttgccggccccagggcccagaacaactctgctcatggtgattacatgcaaaataacgagagcagcttaatagagcaagctccaatacctcaggacggacttaccgtggcacctcacagagctcagcgagaagctgtacacattgagaagataatgttgaaaggagtccagagaaaaagagctgacaaatactgggagtacactttcaaagtaaattggtctgatctttcagtcacaacagtaacaaaaacccaccaagaactacaggaatttctactgaagcttccaaaggaactgtcttcagagacttttgacaagaccatcttaagagccctgaatcagggttccttgaaaagggaggaacggcgacatcctgacctagagcccatcctaaggcagctattttcaagttcatcacaagcttttctacaaagtcagaaagtacacagcttctttcagtccatatcatcagactccctacacagtatcaataacttacaatcctctctgaagacttctaagatattagaacacttaaaagaagacagctctgaagcttcaagtcaagaagaagatgtgttgcagcatgccataatccacaagaagcatactgggaaaagtcccattgtgaacaatattggtacaagttgttctccattggatgggcttaccatgcaatattctgaacagaatggaattgtggattggaggaagcaaagctgtaccaccattcaacacccagagcactgtgtgacctcggctgaccagcattctgctgaaaaacggagtttatcttcaataaataagaagaaaggaaagccacaaacagaaaaggagaaaattaagaaaactgacaacagattgaatagtagaataaatggtattagactctccactcctcagcatgcccatggtggtactgtgaaagatgtgaatttggacattggctctggacatgacacatgtggagaaacatcttcggagagttacagttctccatctagtccccgacatgatggaagagaaagttttgaaagtgaagaagagaaagacagagacacagacagcaattctgaggattctgggaatccatcaacaactaggtttacaggttacggttctgtcaaccagactgtcactgtcaagccacctgttcaaattgcttcactaggaaatgagaatggaaaccttttagaagatcccttaaactcacccaagtatcagcatatttcttttatgccaacgttacactgtgtcatgcacaatggtgcccagaagtctgaagttgtcgttcctgcacccaaacccgctgatggcaaaaccatagggatgcttgttcctagtcctgttgctatttctgcaataagggagtctgcaaattcaacccctgttggaatactagggccaacagcttgcactggagaatcggaaaagcaccttgagttactggcttcccctttacctattccatcaaccttccttccacacagtagtactcccgctttgcatcttacagttcagaggctaaagttgccaccaccacagggatcttctgagagctgcacagttaacatcccacaacaaccacccggaagcctgagcatcgcatcaccaaacactgcctttattcctatccataacccaggtagtttcccaggctctcctgttgctaccacggaccccatcacaaaatctgcatcccaagtggtaggactcaatcaaatggtgcctcaaattgagggaaacacagggacagtccctcagcctaccaatgtgaaggtagttcttccagcagctggcctctcagctgctcagccaccagcttcctaccccttaccaggctctccccttgctgccggcgtgttacccagccagaactccagtgtgctcagcacagcagcaacttctccccagccagcgagcgcaggtatcagccaggcccaggcaactgttcctcctgcagttcctacccacaccccaggccctgccccgagcccaagccctgccttgacacacagtaccgcgcagagtgacagcacctcttacatcagtgctgtggggaacacgaacgctaatgggacagtagtgccaccgcagcagatgggctcaggtccttgtggttcttgtgggcgaaggtgcagctgtgggaccaatggaaaccttcagctaaatagttactattatcctaatccaatgcctggaccaatgtaccgagtcccttcattctttactctgccatccatttgcaatggcagctacctcaaccaagcacatcagagcaatggaaaccaacttcctttttttctgcctcagactccatatgcaaatggactggtacatgacccagtcatggggagccaagccaactatggcatgcagcagatggcaggatttgggagattctatcctgtatatccagcacctaacgtagttgccaacaccagtggttcggggcccaagaagaatgggaatgtctcatgttacaattgtggtgtaagcggacactatgcacaggactgtaagcagtcgtccatggaggccaatcaacaaggcacttacagactgagatacgcacctcccctccccccttctaatgatacgttggattctgcagactgaaacgagtaaagcttgcctacttaatacactcaagtgtggggagtcatggggtgtggaggggaggaaaggaaaggtattttgtttctttgtctatacatttcctagatttctatgcagttgggatttttcatttctcttgtaccaatgtccaaaacaagaaagaatgcaatgcttttgagcctctggtctcctggttcaacaacaggcttatatgtatgatacatgtaatttaaaccttcagacaaacttaaatgttggtgcgtgctttttttttttttttacactgaatacttgctgtgtgcaatgtttactgaatctttaaaactgtgtatttgaccttttttttacaacactggtgacagtcatatggttttgaaaaaaaaaagaaattttgcttcttcccagcttttctcactttcaccctaaacgacacttcctccccagccagcctcactctgtctccggcccgcagcaggagcagccagcagtgcattcaccccacttttgtaaactgctctgcatataaaccaagggcagaatgtttcaccctgatcttatgggaggaatcaaactcccaaaatagtgtgtatatatgtaataaacagcgtcacgtaaatacatatatgcagtgcttgttgtccaaatagaaatgaaaataagtggaagagagaggaagaagtcaaaccatatgaaactgaaaaaatatgacgtacgaaatggacaaaaagctttttctgaaaccaactttttacttccatcatccttttttagcctgttgcttcagagagacacaaagtgaacacactggtgtgaatgtcgctctctgtgtgcttgtgtttgtaatgaaagtctacagccaattttacttgtctaccaccgtgttgtgctcaaagagacactacttgagtgaagatttcttctttccctgtaccagctgttacagtgttacgttgtgtttaaaatgtgtatggtttattgcaatctgaacagagctatgggtttctaccataagtcaggttgtttgttccctaacctgtctctcgtagcaaagtcacttttataacagtttaccactatgcttgattataatgtgaaaggcggaattctgagtgtgttaagatggtattaatcatgtcggtgtcatgtcactaagtttaatgctgctgtttttaaaaaaaaaaaaagtttttttaaaaagccaatctatgtactaaattgcttccaggtaatttttgatttcctaaagtgcactgaggttatctggaagattgggtgtattttttggtgactgctgcattcatcagcaatgaacagtttccactgtatagtcctaggggtcagggggtgggggtttcattttccattcctcagcacagagcagaaatgatagatttttattgtttggagtaacgttggtatgcagcagaggaacgtaaacatttggtcttggttcagaagcctaacagattgctagacaagagaaaaaacttgaagaaaaaagaagcttaatttcatgcttcataagtagcatttatatttatagcaccaatgtacattttgaaactttctttcaggggtgggagttatggggaaggggtgggtgtgaaggggtagatgaaagctttaatttagaaagaaagttcaagtaaaggaaattattttgattaaatatattttatttgatctgggtatttttggaccacattattaaattaattgttaagctgcagttgagttgttcaagtgagagttttgataagccacttatgggccgcgttgtgaatcacttgccagttgtactttatggagcttattttatgatttaaaatactgtactgtacataggaggtatgttaccttctccttatttgtatgtttaccatatactttgatatttgaaatgttatgtactggaaaggccacttatatttctagaacagattggattttatgcaaccttttttccttgaattaacagcaataaaaaaatgaaaaacagctt

SEQ ID NO: 294751 - DNA, 4276 bp, Homo sapiens
tgtcatcttgccttctcactagtagccatgttttcttcaccactcaccctccattcattttccttaggtaaaaaaacaattattatatttgttttctttattttaattttcctaaaaagttaatagtattgaatgcttcctgcagataacttacaatcctctctgaagacttctaagatattagaacacttaaaagaagacagctctgaagcttcaagtcaagaagaagatgtgttgcagcatgccataatccacaagaagcatactgggaaaagtcccattgtgaacaatattggtacaagttgttctccattggatgggcttaccatgcaatattctgaacagaatggaattgtggattggaggaagcaaagctgtaccaccattcaacacccagagcactgtgtgacctcggctgaccagcattctgctgaaaaacggagtttatcttcaataaataagaagaaaggaaagccacaaacagaaaaggagaaaattaagaaaactgacaacagattgaatagtagaataaatggtattagactctccactcctcagcatgcccatggtggtactgtgaaagatgtgaatttggacattggctctggacatgacacatgtggagaaacatcttcggagagttacagttctccatctagtccccgacatgatggaagagaaagttttgaaagtgaagaagagaaagacagagacacagacagcaattctgaggattctgggaatccatcaacaactaggtttacaggttacggttctgtcaaccagactgtcactgtcaagccacctgttcaaattgcttcactaggaaatgagaatggaaaccttttagaagatcccttaaactcacccaagtatcagcatatttcttttatgccaacgttacactgtgtcatgcacaatggtgcccagaagtctgaagttgtcgttcctgcacccaaacccgctgatggcaaaaccatagggatgcttgttcctagtcctgttgctatttctgcaataagggagtctgcaaattcaacccctgttggaatactagggccaacagcttgcactggagaatcggaaaagcaccttgagttactggcttcccctttacctattccatcaaccttccttccacacagtagtactcccgctttgcatcttacagttcagaggctaaagttgccaccaccacagggatcttctgagagctgcacagttaacatcccacaacaaccacccggaagcctgagcatcgcatcaccaaacactgcctttattcctatccataacccaggtagtttcccaggctctcctgttgctaccacggaccccatcacaaaatctgcatcccaagtggtaggactcaatcaaatggtgcctcaaattgagggaaacacagggacagtccctcagcctaccaatgtgaaggtagttcttccagcagctggcctctcagctgctcagccaccagcttcctaccccttaccaggctctccccttgctgccggcgtgttacccagccagaactccagtgtgctcagcacagcagcaacttctccccagccagcgagcgcaggtatcagccaggcccaggcaactgttcctcctgcagttcctacccacaccccaggccctgccccgagcccaagccctgccttgacacacagtaccgcgcagagtgacagcacctcttacatcagtgctgtggggaacacgaacgctaatgggacagtagtgccaccgcagcagatgggctcaggtccttgtggttcttgtgggcgaaggtgcagctgtgggaccaatggaaaccttcagctaaatagttactattatcctaatccaatgcctggaccaatgtaccgagtcccttcattctttactctgccatccatttgcaatggcagctacctcaaccaagcacatcagagcaatggaaaccaacttcctttttttctgcctcagactccatatgcaaatggactggtacatgacccagtcatggggagccaagccaactatggcatgcagcagatggcaggatttgggagattctatcctgtatatccagcacctaacgtagttgccaacaccagtggttcggggcccaagaagaatgggaatgtctcatgttacaattgtggtgtaagcggacactatgcacaggactgtaagcagtcgtccatggaggccaatcaacaaggcacttacagactgagatacgcacctcccctccccccttctaatgatacgttggattctgcagactgaaacgagtaaagcttgcctacttaatacactcaagtgtggggagtcatggggtgtggaggggaggaaaggaaaggtattttgtttctttgtctatacatttcctagatttctatgcagttgggatttttcatttctcttgtaccaatgtccaaaacaagaaagaatgcaatgcttttgagcctctggtctcctggttcaacaacaggcttatatgtatgatacatgtaatttaaaccttcagacaaacttaaatgttggtgcgtgctttttttttttttttacactgaatacttgctgtgtgcaatgtttactgaatctttaaaactgtgtatttgaccttttttttacaacactggtgacagtcatatggttttgaaaaaaaaaagaaattttgcttcttcccagcttttctcactttcaccctaaacgacacttcctccccagccagcctcactctgtctccggcccgcagcaggagcagccagcagtgcattcaccccacttttgtaaactgctctgcatataaaccaagggcagaatgtttcaccctgatcttatgggaggaatcaaactcccaaaatagtgtgtatatatgtaataaacagcgtcacgtaaatacatatatgcagtgcttgttgtccaaatagaaatgaaaataagtggaagagagaggaagaagtcaaaccatatgaaactgaaaaaatatgacgtacgaaatggacaaaaagctttttctgaaaccaactttttacttccatcatccttttttagcctgttgcttcagagagacacaaagtgaacacactggtgtgaatgtcgctctctgtgtgcttgtgtttgtaatgaaagtctacagccaattttacttgtctaccaccgtgttgtgctcaaagagacactacttgagtgaagatttcttctttccctgtaccagctgttacagtgttacgttgtgtttaaaatgtgtatggtttattgcaatctgaacagagctatgggtttctaccataagtcaggttgtttgttccctaacctgtctctcgtagcaaagtcacttttataacagtttaccactatgcttgattataatgtgaaaggcggaattctgagtgtgttaagatggtattaatcatgtcggtgtcatgtcactaagtttaatgctgctgtttttaaaaaaaaaaaaagtttttttaaaaagccaatctatgtactaaattgcttccaggtaatttttgatttcctaaagtgcactgaggttatctggaagattgggtgtattttttggtgactgctgcattcatcagcaatgaacagtttccactgtatagtcctaggggtcagggggtgggggtttcattttccattcctcagcacagagcagaaatgatagatttttattgtttggagtaacgttggtatgcagcagaggaacgtaaacatttggtcttggttcagaagcctaacagattgctagacaagagaaaaaacttgaagaaaaaagaagcttaatttcatgcttcataagtagcatttatatttatagcaccaatgtacattttgaaactttctttcaggggtgggagttatggggaaggggtgggtgtgaaggggtagatgaaagctttaatttagaaagaaagttcaagtaaaggaaattattttgattaaatatattttatttgatctgggtatttttggaccacattattaaattaattgttaagctgcagttgagttgttcaagtgagagttttgataagccacttatgggccgcgttgtgaatcacttgccagttgtactttatggagcttattttatgatttaaaatactgtactgtacataggaggtatgttaccttctccttatttgtatgtttaccatatactttgatatttgaaatgttatgtactggaaaggccacttatatttctagaacagattggattttatgcaaccttttttccttgaattaacagcaataaaaaaatgaaaaacagctt

SEQ ID NO: 294752 - DNA, 4681 bp, Homo sapiens
acgagggactcgggccgcctgttgctggtggagcggcggcgggggcgggtatgccgggcggcggcggggggccctcggcggcgctgcgcgagcaggagcgggtatacgagtggttcgggctggtgctgggctcggcgcagcgcctggagttcatgtgcgggctgctggacctgtgcaacccgctggagctgcgcttccttggctcgtgcctggaggacctggcgcgcaaggactaccactacctgcgcgactcggaggccaaggccaacggcctctcggacccggggccgctggccgacttccgagagcccgcggtgcgctcgcgcctcatcgtctacctggcgctgctgggctcggagaaccgggaggccgctggccgtctgcaccgcctgctaccccaggtggactcggtgctcaaaagcctgcgcgcggcccggggcgagggctcgcggggcggcgcggaggacgagcgcggcgaggacggcgacggcgagcaggacgccgagaaggacggctcaggcccggaaggcggcattgtggagccccgggtcggcggcgggcttggctccagggcccaggaggaactgctgctgctcttcaccatggcctcgctgcacccggctttctccttccaccagcgggtcaccctgagggaacacttggagaggctccgcgccgcgctccgcgggggccccgaggacgcggaggtggaggtagagccgtgcaagtttgccggccccagggcccagaacaactctgctcatggtgattacatgcaaaataacgagagcagcttaatagagcaagctccaatacctcaggacggacttaccgtggcacctcacagagctcagcgagaagctgtacacattgagaagataatgttgaaaggagtccagagaaaaagagctgacaaatactgggagtacactttcaaagtaaattggtctgatctttcagtcacaacagtaacaaaaacccaccaagaactacaggaatttctactgaagcttccaaaggaactgtcttcagagacttttgacaagaccatcttaagagccctgaatcagggttccttgaaaagggaggaacggcgacatcctgacctagagcccatcctaaggcagctattttcaagttcatcacaagcttttctacaaagtcagaaagtacacagcttctttcagtccatatcatcagactccctacacagtatcaataacttacaatcctctctgaagacttctaagatattagaacacttaaaagaagacagctctgaagcttcaagtcaagaagaagatgtgttgcagcatgccataatccacaagaagcatactgggaaaagtcccattgtgaacaatattggtacaagttgttctccattggatgggcttaccatgcaatattctgaacagaatggaattgtggattggaggaagcaaagctgtaccaccattcaacacccagagcactgtgtgacctcggctgaccagcattctgctgaaaaacggagtttatcttcaataaataagaagaaaggaaagccacaaacagaaaaggagaaaattaagaaaactgacaacagattgaatagtagaataaatggtattagactctccactcctcagcatgcccatggtggtactgtgaaagatgtgaatttggacattggctctggacatgacacatgtggagaaacatcttcggagagttacagttctccatctagtccccgacatgatggaagagaaagttttgaaagtgaagaagagaaagacagagacacagacagcaattctgaggattctgggaatccatcaacaactaggtttacaggttacggttctgtcaaccagactgtcactgtcaagccacctgttcaaattgcttcactaggaaatgagaatggaaaccttttagaagatcccttaaactcacccaagtatcagcatatttcttttatgccaacgttacactgtgtcatgcacaatggtgcccagaagtctgaagttgtcgttcctgcacccaaacccgctgatggcaaaaccatagggatgcttgttcctagtcctgttgctatttctgcaataagggagtctgcaaattcaacccctgttggaatactagggccaacagcttgcactggagaatcggaaaagcaccttgagttactggcttcccctttacctattccatcaaccttccttccacacagtagtactcccgctttgcatcttacagttcagaggctaaagttgccaccaccacagggatcttctgagagctgcacagttaacatcccacaacaaccacccggaagcctgagcatcgcatcaccaaacactgcctttattcctatccataacccagactccatatgcaaatggactggtacatgacccagtcatggggagccaagccaactatggcatgcagcagatggcaggatttgggagattctatcctgtatatccagcacctaacgtagttgccaacaccagtggttcggggcccaagaagaatgggaatgtctcatgttacaattgtggtgtaagcggacactatgcacaggactgtaagcagtcgtccatggaggccaatcaacaaggcacttacagactgagatacgcacctcccctccccccttctaatgatacgttggattctgcagactgaaacgagtaaagcttgcctacttaatacactcaagtgtggggagtcatggggtgtggaggggaggaaaggaaaggtattttgtttctttgtctatacatttcctagatttctatgcagttgggatttttcatttctcttgtaccaatgtccaaaacaagaaagaatgcaatgcttttgagcctctggtctcctggttcaacaacaggcttatatgtatgatacatgtaatttaaaccttcagacaaacttaaatgttggtgcgtgctttttttttttttttacactgaatacttgctgtgtgcaatgtttactgaatctttaaaactgtgtatttgaccttttttttacaacactggtgacagtcatatggttttgaaaaaaaaaagaaattttgcttcttcccagcttttctcactttcaccctaaacgacacttcctccccagccagcctcactctgtctccggcccgcagcaggagcagccagcagtgcattcaccccacttttgtaaactgctctgcatataaaccaagggcagaatgtttcaccctgatcttatgggaggaatcaaactcccaaaatagtgtgtatatatgtaataaacagcgtcacgtaaatacatatatgcagtgcttgttgtccaaatagaaatgaaaataagtggaagagagaggaagaagtcaaaccatatgaaactgaaaaaatatgacgtacgaaatggacaaaaagctttttctgaaaccaactttttacttccatcatccttttttagcctgttgcttcagagagacacaaagtgaacacactggtgtgaatgtcgctctctgtgtgcttgtgtttgtaatgaaagtctacagccaattttacttgtctaccaccgtgttgtgctcaaagagacactacttgagtgaagatttcttctttccctgtaccagctgttacagtgttacgttgtgtttaaaatgtgtatggtttattgcaatctgaacagagctatgggtttctaccataagtcaggttgtttgttccctaacctgtctctcgtagcaaagtcacttttataacagtttaccactatgcttgattataatgtgaaaggcggaattctgagtgtgttaagatggtattaatcatgtcggtgtcatgtcactaagtttaatgctgctgtttttaaaaaaaaaaaaagtttttttaaaaagccaatctatgtactaaattgcttccaggtaatttttgatttcctaaagtgcactgaggttatctggaagattgggtgtattttttggtgactgctgcattcatcagcaatgaacagtttccactgtatagtcctaggggtcagggggtgggggtttcattttccattcctcagcacagagcagaaatgatagatttttattgtttggagtaacgttggtatgcagcagaggaacgtaaacatttggtcttggttcagaagcctaacagattgctagacaagagaaaaaacttgaagaaaaaagaagcttaatttcatgcttcataagtagcatttatatttatagcaccaatgtacattttgaaactttctttcaggggtgggagttatggggaaggggtgggtgtgaaggggtagatgaaagctttaatttagaaagaaagttcaagtaaaggaaattattttgattaaatatattttatttgatctgggtatttttggaccacattattaaattaattgttaagctgcagttgagttgttcaagtgagagttttgataagccacttatgggccgcgttgtgaatcacttgccagttgtactttatggagcttattttatgatttaaaatactgtactgtacataggaggtatgttaccttctccttatttgtatgtttaccatatactttgatatttgaaatgttatgtactggaaaggccacttatatttctagaacagattggattttatgcaaccttttttccttgaattaacagcaataaaaaaatgaaaaacagctt

SEQ ID NO: 294753 - DNA, 1626 bp, Homo sapiens
  misc_feature (1614)..(1615): n is a, c, g, or t
acgagggactcgggccgcctgttgctggtggagcggcggcgggggcgggtatgccgggcggcggcggggggccctcggcggcgctgcgcgagcaggagcgggtatacgagtggttcgggctggtgctgggctcggcgcagcgcctggagttcatgtgcgggctgctggacctgtgcaacccgctggagctgcgcttccttggctcgtgcctggaggacctggcgcgcaaggactaccactacctgcgcgactcggaggccaaggccaacggcctctcggacccggggccgctggccgacttccgagagcccgcggtgcgctcgcgcctcatcgtctacctggcgctgctgggctcggagaaccgggaggccgctggccgtctgcaccgcctgctaccccaggtggactcggtgctcaaaagcctgcgcgcggcccggggcgagggctcgcggggcggcgcggaggacgagcgcggcgaggacggcgacggcgagcaggacgccgagaaggacggctcaggcccggaaggcggcattgtggagccccgggtcggcggcgggcttggctccagggcccaggaggaactgctgctgctcttcaccatggcctcgctgcacccggctttctccttccaccagcgggtcaccctgagggaacacttggagaggctccgcgccgcgctccgcgggggccccgaggacgcggaggtggaggtagagccgtgcaagtttgccggccccagggcccagaacaactctgctcatggtgattacatgcaaaataacgagagcagcttaatagagcaagctccaatacctcaggacggacttaccgtggcacctcacagagctcagcgagaagctgtacacattgagaagataatgttgaaaggagtccagagaaaaagagctgacaaatactgggagtacactttcaaagtaaattggtctgatctttcagtcacaacagtaacaaaaacccaccaagaactacaggaatttctactgaagcttccaaaggaactgtcttcagagacttttgacaagaccatcttaagagccctgaatcagggttccttgaaaagggaggaacggcgacatcctgacctagagcccatcctaaggcagctattttcaagttcatcacaagcttttctacaaagtcagaaagtacacagcttctttcagtccatatcatcagactccctacacagtatcaataacttacaatcctctctgaagacttctaagatattagaacacttaaaagaagacagctctgaagcttcaagtcaagaagaagatgtgttgcagcatgccataatccacaagaagcatactgggaaaagtcccattgtgaacaatattggtacaagttgttctccattggatgggcttaccatgcaatattctgaacagaatggaattgtggattggaggaagcaaagctgtaccaccattcaacacccagagcactgtgtgacctcggctgaccagcattctgctgaaaaacggagtttatcttcaataaataagaagaaaggaaagccacaaacagaaaaggagaaaattaagaaaaactgacacacagattgtaatagttgacgttgctcgnngatcctctaga

SEQ ID NO: 294754 - DNA, 2262 bp, Homo sapiens
acgagggactcgggccgcctgttgctggtggagcggcggcgggggcgggtatgccgggcggcggcggggggccctcggcggcgctgcgcgagcaggagcgggtatacgagtggttcgggctggtgctgggctcggcgcagcgcctggagttcatgtgcgggctgctggacctgtgcaacccgctggagctgcgcttccttggctcgtgcctggaggacctggcgcgcaaggactaccactacctgcgcgactcggaggccaaggccaacggcctctcggacccggggccgctggccgacttccgagagcccgcggtgcgctcgcgcctcatcgtctacctggcgctgctgggctcggagaaccgggaggccgctggccgtctgcaccgcctgctaccccaggtggactcggtgctcaaaagcctgcgcgcggcccggggcgagggctcgcggggcggcgcggaggacgagcgcggcgaggacggcgacggcgagcaggacgccgagaaggacggctcaggcccggaaggcggcattgtggagccccgggtcggcggcgggcttggctccagggcccaggaggaactgctgctgctcttcaccatggcctcgctgcacccggctttctccttccaccagcgggtcaccctgagggaacacttggagaggctccgcgccgcgctccgcgggggccccgaggacgcggaggtggaggtagagccgtgcaagtttgccggccccagggcccagaacaactctgctcatggtgattacatgcaaaataacgagagcagcttaatagagcaagctccaatacctcaggacggacttaccgtggcacctcacagagctcagcgagaagctgtacacattgagaagataatgttgaaaggagtccagagaaaaagagctgacaaatactgggagtacactttcaaagtaaattggtctgatctttcagtcacaacagtaacaaaaacccaccaagaactacaggaatttctactgaagcttccaaaggaactgtcttcagagacttttgacaagaccatcttaagagccctgaatcagggttccttgaaaagggaggaacggcgacatcctgacctagagcccatcctaaggcagctattttcaagttcatcacaagcttttctacaaagtcagaaagtacacagcttctttcagtccatatcatcagactccctacacagtatcaataacttacaatcctctctgaagacttctaagatattagaacacttaaaagaagacagctctgaagcttcaagtcaagaagaagatgtgttgcagcatgccataatccacaagaagcatactgggaaaagtcccattgtgaacaatattggtacaagttgttctccattggatgggcttaccatgcaatattctgaacagaatggaattgtggattggaggaagcaaagctgtaccaccattcaacacccagagcactgtgtgacctcggctgaccagcattctgctgaaaaacggagtttatcttcaataaataagaagaaaggaaagccacaaacagaaaaggagaaaattaagaaaactgacaacagattgaatagtagaataaatggtattagactctccactcctcagcatgcccatggtggtactgtgaaagatgtgaatttggacattggctctggacatgacacatgtggagaaacatcttcggagagttacagttctccatctagtccccgacatgatggaagagaaagttttgaaagtgaagaagagaaagacagagacacagacagcaattctgaggattctgggaatccatcaacaactaggtttacaggttacggttctgtcaaccagactgtcactgtcaagccacctgttcaaattgcttcactaggaaatgagaatggaaaccttttagaagatcccttaaactcacccaagtatcagcatatttcttttatgccaacgttacactgtgtcatgcacaatggtgcccagaagtctgaagttgtcgttcctgcacccaaacccgctgatggcaaaaccatagggatgcttgttcctagtcctgttgctatttctgcaataagggagtctgcaaattcaacccctgttggaatactagggccaacagcttgcactggagaatcggaaaagcaccttgagttactggcttcccctgtttctagtcgtacaaccctgctcagtgacagtggtatcatggctatgcagtcttcattctgtctggcgtcggaca

SEQ ID NO: 294755 - DNA, 902 bp, Homo sapiens
  misc_feature (23)..(23): n is a, c, g, or t
  misc_feature (27)..(27): n is a, c, g, or t
  misc_feature (31)..(31): n is a, c, g, or t
cccggcgggcgccggcgcgcccncccnccancccacgtctcgtcgcgcgcgcgtccgctgggggcgggcggctggcagctgtggcgccgacatggctgcgctggtggagccgctggggctggagcgggacgtgtcccgggcggttgagctcctcgagcggctccagcgcagcggggagctgccgccgcagaagctgcaggccctccagcgagttctgcagagccgcttctgctccgctatccgagaggtgtatgagcagctttatgacacgctggacatcaccggcagcgccgagatccgagcccatgccacagccaaggccacagtggctgccttcacagccagcgagggccacgcacatcccagggtagtggagctacccaagacggatgagggcctaggcttcaacatcatgggtggcaaagagcaaaactcgcccatctacatctcccgggtcatcccagggggtgtggctgaccgccatggaggcctcaagcgtggggatcaactgttgtcggtgaacggtgtgagcgttgagggtgagcagcatgagaaggcggtggagctgctgaaggcggcccagggctcggtgaagctggttgtccgttacacaccgcgagtgctggaggagatggaggcccggttcgagaagatgcgctctgcccgccggcgccaacagcatcagagctactcgtccttggagtctcgaggttgaaaccacagatctggacgttcacgtgcactctcttcctgtacagtatttattgttcctggcactttatttaaagatatttgaccctcaaaaccaaaacaacaaaaaaacaaacacaaaaataataaaacaccaaaacacacaccacccacccttctccccgggcaggcacccaacaccagcaacaaac

SEQ ID NO: 294756 - DNA, 1157 bp, Homo sapiens
cccacccgggccgcggcctacatacccagcccccggtccccgcccttcccgggtcaggccagtgcgggtgggccagcggacccggagggggtgggcggggcgggcgccggggccgggcggtcgctaggtgtgggaggctccctgggcgcgggccgggacgctgggcgcccgccttacaacccggcctgtggaggggtcccggggccgcagggccgctggtggcagtctctcctgcgccaccctggactctgcggggtgtccgactaggcttcggccgtcctccccggactgtgcgctcggcctcactccgccgctctccttgcttctctgcgtctcggggtctctgacactcggggtttctgcgccccgcccccgccccgcagacgtgtcccgggcggttgagctcctcgagcggctccagcgcagcggggagctgccgccgcagaagctgcaggccctccagcgagttctgcagagccgcttctgctccgctatccgagaggtgtatgagcagctttatgacacgctggacatcaccggcagcgccgagatccgagcccatgccacagccaaggccacagtggctgccttcacagccagcgagggccacgcacatcccagggtagtggagctacccaagacggatgagggcctaggcttcaacatcatgggtggcaaagagcaaaactcgcccatctacatctcccgggtcatcccagggggtgtggctgaccgccatggaggcctcaagcgtggggatcaactgttgtcggtgaacggtgtgagcgttgagggtgagcagcatgagaaggcggtggagctgctgaaggcggcccagggctcggtgaagctggttgtccgttacacaccgcgagtgctggaggagatggaggcccggttcgagaagatgcgctctgcccgccggcgccaacagcatcagagctactcgtccttggagtctcgaggttgaaaccacagatctggacgttcacgtgcactctcttcctgtacagtatttattgttcctggcactttatttaaagatatttgaccctcaaaaccaaaacaacaaaaaaacaaacacaaaaataataaaacaccaaaacacacaccacccacccttctccccgggcaggcacccaacaccagcaacaaac

SEQ ID NO: 294757 - DNA, 1449 bp, Homo sapiens
cccacccgggccgcggcctacatacccagcccccggtccccgcccttcccgggtcaggccagtgcgggtgggccagcggacccggagggggtgggcggggcgggcgccggggccgggcggtcgctaggtgtgggaggctccctgggcgcgggccgggacgctgggcgcccgccttacaacccggcctgtggaggggtcccggggccgcagggccgctggtggcagtctctcctgcgccaccctggactctgcggggtgtccgactaggcttcggccgtcctccccggactgtgcgctcggcctcactccgccgctctccttgcttctctgcgtctcggggtctctgacactcggggtttctgcgccccgcccccgccccgcagacgtgtcccgggcggttgagctcctcgagcggctccagcgcagcggggagctgccgccgcagaagctgcaggccctccagcgagttctgcagagccgcttctgctccgctatccgagaggtgaggggcgcgcggcgcaggggcgcgagctggtggccgtcgtcctcctcctcctcctcctgcttgtcccgagcccggagactacgcctcccggcagctcccgaggcggcccgccttggggtgccaacgcttcagctcaggggttcttcgggagttgtagttttctcggccttctgttgcgggggcggggcggatccttgcgtggtagcgggagagggtctagaggcctgaactcctgcgtctagggctggaggagctggcgactccctgatgccgctgcctcctcacccaggtgtatgagcagctttatgacacgctggacatcaccggcagcgccgagatccgagcccatgccacagccaaggccacagtggctgccttcacagccagcgagggccacgcacatcccagggtagtggagctacccaagacggatgagggcctaggcttcaacatcatgggtggcaaagagcaaaactcgcccatctacatctcccgggtcatcccagggggtgtggctgaccgccatggaggcctcaagcgtggggatcaactgttgtcggtgaacggtgtgagcgttgagggtgagcagcatgagaaggcggtggagctgctgaaggcggcccagggctcggtgaagctggttgtccgttacacaccgcgagtgctggaggagatggaggcccggttcgagaagatgcgctctgcccgccggcgccaacagcatcagagctactcgtccttggagtctcgaggttgaaaccacagatctggacgttcacgtgcactctcttcctgtacagtatttattgttcctggcactttatttaaagatatttgaccctcaaaaccaaaacaacaaaaaaacaaacacaaaaataataaaacaccaaaacacacaccacccacccttctccccgggcaggcacccaacaccagcaacaaac

SEQ ID NO: 294758 - DNA, 1782 bp, Homo sapiens
cccacccgggccgcggcctacatacccagcccccggtccccgcccttcccgggtcaggccagtgcgggtgggccagcggacccggagggggtgggcggggcgggcgccggggccgggcggtcgctaggtgtgggaggctccctgggcgcgggccgggacgctgggcgcccgccttacaacccggcctgtggaggggtcccggggccgcagggccgctggtggcagtctctcctgcgccaccctggactctgcggggtgtccgactaggcttcggccgtcctccccggactgtgcgctcggcctcactccgccgctctccttgcttctctgcgtctcggggtctctgacactcggggtttctgcgccccgcccccgccccgcagacgtgtcccgggcggttgagctcctcgagcggctccagcgcagcggggagctgccgccgcagaagctgcaggccctccagcgagttctgcagagccgcttctgctccgctatccgagaggtgaggggcgcgcggcgcaggggcgcgagctggtggccgtcgtcctcctcctcctcctcctgcttgtcccgagcccggagactacgcctcccggcagctcccgaggcggcccgccttggggtgccaacgcttcagctcaggggttcttcgggagttgtagttttctcggccttctgttgcgggggcggggcggatccttgcgtggtagcgggagagggtctagaggcctgaactcctgcgtctagggctggaggagctggcgactccctgatgccgctgcctcctcacccaggtgtatgagcagctttatgacacgctggacatcaccggcagcgccgagatccgagcccatgccacagccaaggccacagtggctgccttcacagccagcgagggccacgcacatcccagggtagtggagctacccaagacggatgagggcctaggcttcaacatcatgggtggcaaagagcaaaactcgcccatctacatctcccgggtcatcccagggggtgtggctgaccgccatggaggcctcaagcgtggggatcaactgttgtcggtgaacggtgtgagcgttgagggtgagcagcatgagaaggcggtggagctgctgaaggcggcccagggctcggtgaagctggttgtccgttacacaccgcgagtgctggaggagatggaggcccggttcgagaagatgcgctctgcccgccggcgccaacagcatcagagctactcgtgagcccctgggtcaccacacccctggggcctccacgggctccctttaaccccaggctcccaaaccaggccagtgcttcctggatcttccagccctggcccctcctctgggatcctgacccttgacccttggcccaggctctcaccccaggctagtttggccaaatcccctggggagcccttagcttccttccatcccaagatacggaacctactgtggctgggatccctcagcccacttacctgggcccttgcctctgcaaccccagtcctgcccctcttgtctacccggagcctccctgatcccgggtcccttgtccaccccccttgcaggtccttggagtctcgaggttgaaaccacagatctggacgttcacgtgcactctcttcctgtacagtatttattgttcctggcactttatttaaagatatttgaccctcaaaaccaaaacaacaaaaaaacaaacacaaaaataataaaacaccaaaacacacaccacccacccttctccccgggcaggcacccaacaccagcaacaaac

SEQ ID NO: 294759 - DNA, 728 bp, Homo sapiens
ggatcgtgcattgtgccatgacaagtgtcccatgcttggggatagtaacccaggctaaatcgctgtcctcggtccacatcccccaccccagctttcatgcctacctggaaggggccctcatcttcagtcgctttctctctcccaggccacagtggctgccttcacagccagcgagggccacgcacatcccagggtagtggagctacccaagacggatgagggcctaggcttcaacatcatgggtggcaaagagcaaaactcgcccatctacatctcccgggtcatcccagggggtgtggctgaccgccatggaggcctcaagcgtggggatcaactgttgtcggtgaacggtgtgagcgttgagggtgagcagcatgagaaggcggtggagctgctgaaggcggcccagggctcggtgaagctggttgtccgttacacaccgcgagtgctggaggagatggaggcccggttcgagaagatgcgctctgcccgccggcgccaacagcatcagagctactcgtccttggagtctcgaggttgaaaccacagatctggacgttcacgtgcactctcttcctgtacagtatttattgttcctggcactttatttaaagatatttgaccctcaaaaccaaaacaacaaaaaaacaaacacaaaaataataaaacaccaaaacacacaccacccacccttctccccgggcaggcacccaacaccagcaacaaac

SEQ ID NO: 294760 - DNA, 1025 bp, Homo sapiens
  misc_feature (23)..(23): n is a, c, g, or t
  misc_feature (27)..(27): n is a, c, g, or t
  misc_feature (31)..(31): n is a, c, g, or t
cccggcgggcgccggcgcgcccncccnccancccacgtctcgtcgcgcgcgcgtccgctgggggcgggcggctggcagctgtggcgccgacatggctgcgctggtggagccgctggggctggagcgggacgtgtcccgggcggttgagctcctcgagcggctccagcgcagcggggagctgccgccgcagaagctgcaggccctccagcgagttctgcagagccgcttctgctccgctatccgagaggtgtatgagcagctttatgacacgctggacatcaccggcagcgccgagatccgagcccatgccacagccaagagcgttgagggtgagcagcatgagaaggcggtggagctgctgaaggcggcccagggctcggtgaagctggttgtccgttacacaccgcgagtgctggaggagatggaggcccggttcgagaagatgcgctctgcccgccggcgccaacagcatcagagctactcgtgagcccctgggtcaccacacccctggggcctccacgggctccctttaaccccaggctcccaaaccaggccagtgcttcctggatcttccagccctggcccctcctctgggatcctgacccttgacccttggcccaggctctcaccccaggctagtttggccaaatcccctggggagcccttagcttccttccatcccaagatacggaacctactgtggctgggatccctcagcccacttacctgggcccttgcctctgcaaccccagtcctgcccctcttgtctacccggagcctccctgatcccgggtcccttgtccaccccccttgcaggtccttggagtctcgaggttgaaaccacagatctggacgttcacgtgcactctcttcctgtacagtatttattgttcctggcactttatttaaagatatttgaccctcaaaaccaaaacaacaaaaaaacaaacacaaaaataataaaacaccaaaacacacaccacccacccttctccccgggcaggcacccaacaccagcaacaaac

SEQ ID NO: 294761 - DNA, 484 bp, Homo sapiens
gtctggacgtttggccagggactgagggaacacggggctgtccctgacatgggaatcctgacccttgacccttggcccaggctctcaccccaggctagtttggccaaatcccctggggagcccttagcttccttccatcccaagatacggaacctactgtggctgggatccctcagcccacttacctgggcccttgcctctgcaaccccagtcctgcccctcttgtctacccggagcctccctgatcccgggtcccttgtccaccccccttgcaggtccttggagtctcgaggttgaaaccacagatctggacgttcacgtgcactctcttcctgtacagtatttattgttcctggcactttatttaaagatatttgaccctcaaaaccaaaacaacaaaaaaacaaacacaaaaataataaaacaccaaaacacacaccacccacccttctccccgggcaggcacccaacaccagcaacaaac

SEQ ID NO: 294762 - DNA, 519 bp, Homo sapiens
  misc_feature (23)..(23): n is a, c, g, or t
  misc_feature (27)..(27): n is a, c, g, or t
  misc_feature (31)..(31): n is a, c, g, or t
cccggcgggcgccggcgcgcccncccnccancccacgtctcgtcgcgcgcgcgtccgctgggggcgggcggctggcagctgtggcgccgacatggctgcgctggtggagccgctggggctggagcgggacgtgtcccgggcggttgagctcctcgagcggctccagcgcagcggggagctgccgccgcagaagctgcaggccctccagcgagttctgcagagccgcttctgctccgctatccgagaggtgtatgagcagctttatgacacgctggacatcaccggcagcgccgagatccgagcccatgccacagccaagaaatacaaaaaaaaaaaaaaagaaagaaaaagccgagcgtggtggcgagtgcctgtaatcccagctggattacaactccggaggctgagacaggagaatcgcttgaacccaggaggccgaggttgcagtgagccgagatcatgccattgcactccagcctgggcaacagagtgagacttcatctcaaaaaaaaaaaaaaa

SEQ ID NO: 294763 - DNA, 479 bp, Homo sapiens
  misc_feature (23)..(23): n is a, c, g, or t
  misc_feature (27)..(27): n is a, c, g, or t
  misc_feature (31)..(31): n is a, c, g, or t
cccggcgggcgccggcgcgcccncccnccancccacgtctcgtcgcgcgcgcgtccgctgggggcgggcggctggcagctgtggcgccgacatggctgcgctggtggagccgctggggctggagcgggacgtgtcccgggcggttgagctcctcgagcggctccagcgcagcggggagctgccgccgcagaagctgcaggccctccagcgagttctgcagagccgcttctgctccgctatccgagaggtgtatgagcagctttatgacacgctggacatcaccggcagcgccgagatccgagcccatgccacagccaaggtgggccccgcaccccattgctcctggtgtctatttaactgcctagtcgaactcaatatctccttcatgccagtcatttctgtttcctccctcatgatttttgctaaatctatgtgccaccttactattagtaaataatcgcacatttttaacttaaatg

SEQ ID NO: 294764 - DNA, 1144 bp, Homo sapiens
gagatgccaagtgggtattgactgctccaggatgtggatggagggtgtgaaaaccagggtggggtgacgcaggctctgggtcatgatagggagagcaggcagctgggtcctgggctggaggactaaaataagggacgccaccttcaggggtgacacatcagcccaggccctccctacgggtttgaccagtcctgttctgacggtattcctgcgccactgggctggtccctcctccactcctcccctataaagcctcctggggtccccaggcacccagactcagcccaccccagctttgggggccagtacgcagccatgatcctcaactggaagctcctggggatcctggtcctttgcctgcacaccagaggcatctcaggcagcgagggccacccctctcacccacccgcagaggaccgagaggaggcaggctccccaacattgcctcagggccccccagtccccggtgacccttggccaggggcaccccctctctttgaagatcctccgcctacccgccccagtcgtccctggagagacctgcctgaaactggagtctggccccctgaaccgcctagaacggatcctcctcaacctccccggcctgacgacccttggccggcaggaccccagcccccagaaaacccctggcctcctgcccctgaggtggacaaccgacctcaggaggagccagacctagacccaccccgggaagagtacagataatggagtcccctcagccgttctgttcccaggcatctccaggcacccacgccctctccaccctctgattccccgtgaattcttcccaatttagcctatctccttaaacctcttcctcattccctcggttttattctgaacccgtaaggtggtgttctcaatatttcctgtcccctcctgagatccatacttagtcctcacatcgcccgttttttcctctgacagcctaagcctactctcctacctcgcctccaggcctcggccccacctacctcccacccggtcttcctgcccgcgcgatcgctggggcagggctacggtactgtgttcccttctgccacctggtggccggcggcaggaactatcagtagacagctgctgcttccatgaaacggaaaaataaaaatcatgttttcttaac

SEQ ID NO: 294765 - DNA, 3490 bp, Homo sapiens
gcgcgcagctggttcccgctctgcagcgcaacgcctgaggcagtgggcgcgctcagtcccgggaccaggcgttctctcctctcgcctctgggcctgggacccgcaaagcggcgatggagcggaggtcgcggaggaagtcgcggcgcaacgggcgctcgaccgcgggcaaggccgccgcgacccagcccgcgaagtctccgggcgcacagctctggctctttcccagcgccgcgggcctccaccgcgcgctgctccggagggtggaggtgacgcgccaactctgctgctcgccggggcgcctcgcggtcttggaacgcggcggggcgggcgtccaggttcaccagctgctcgccgggagcggcggcgcccggacgccgaaatgcattaaattaggaaaaaacatgaagatacattccgtggaccaaggagcagagcacatgctgattctctcatcagatggaaaaccatttgagtatgacaactatagcatgaaacatctaaggtttgaaagcattttacaagaaaaaaaaataattcagatcacatgtggagattaccattctcttgcactctcaaaaggcggtgagctttttgcctggggacagaacctgcatgggcagcttggagttggaaggaaatttccctcaaccaccacaccacagattgtggagcacctcgcaggagtacccttggctcagatttctgccggagaagcccacagcatggccttatccatgtctggcaacatttattcatggggaaaaaatgaatgtggacaactaggcctgggccacactgagagtaaagatgatccatcccttattgaaggactagacaatcagaaagttgaatttgtcgcttgtggtggctctcacagtgccctactcacacaggatgggctgctgtttactttcggtgctggaaaacatgggcaacttggtcataattcaacacagaatgagctaagaccctgtttggtggctgagcttgttgggtatagagtgactcagatagcatgtggaaggtggcacacacttgcctatgtttctgatttgggaaaggtcttttcctttggttctggaaaagatggacaactgggaaatggtggaacacgtgaccagctgatgccgcttccagtgaaagtatcatcaagtgaagaactcaaacttgaaagccatacctcagaaaaggagttaataatgattgctggagggaatcaaagcattttgctctggataaagaaagagaattcatatgttaatctgaagaggacaattcctactctgaatgaagggactgtaaagagatggattgctgatgtggagactaaacggtggcagagcacaaaaagggaaatccaagagatattttcatctcctgcttgtctaactggaagttttttaaggaaaagaagaactacagaaatgatgcctgtttatttggacttaaataaagcaagaaacatcttcaaggagttaacccaaaaggactggattactaacatgataaccacctgcctcaaagataatctgctcaaaagacttccatttcattctccaccccaagaagctttagaaattttcttccttctcccagaatgtcctgtgatgcatatttccaacaactgggagagccttgtggttccatttgcaaaggttgtttgtaaaatgagtgaccagtcttcactggttctggaagagtattgggcaactctgcaagaatccactttcagcaaactggtccagatgtttaaaacagccgtcatatgccagttggattactgggatgaaagtgctgaggagaatggtaatgttcaagctctcctagaaatgttgaagaagctgcacagggtaaaccaggtgaaatgtcaactacctgaaagtattttccaagtagacgaactcttgcaccgtctcaatttttttgtagaagtatgcagaaggtacttgtggaaaatgactgtggacgcttcagaaaatgtacaatgctgcgtcatattcagtcactttccatttatctttaataatctgtcgaaaattaaactactacatacagacacacttttaaaaatagagagtaaaaaacataaagcttatcttaggtcggcagcaattgaggaagaaagagagtctgaattcgctttgaggcccacgtttgatctaacagtcagaaggaatcacttgattgaggatgttttgaatcagctaagtcaatttgagaatgaagacctgaggaaagagttatgggtttcatttagtggagaaattgggtatgacctcggaggagtcaagaaagagttcttctactgtctgtttgcagagatgatccagccggaatatgggatgttcatgtatcctgaaggggcttcctgcatgtggtttcctgtcaagcctaaatttgagaagaaaagatacttcttttttggggttctatgtggactttccctgttcaattgcaatgttgccaacctccctttcccactggcactgtttaagaaacttttggaccaaatgccatcattggaagacttgaaagaactcagtcctgatttgggaaagaatttgcaaacacttctggatgatgaaggtgataactttgaggaagtattttacatccattttaatgtgcactgggacagaaacgacacaaacttaattcctaatggaagtagcataactgtcaaccagactaacaagagagactatgtttctaagtatatcaattacattttcaacgactctgtaaaggcggtttatgaagaatttcggagaggattttataaaatgtgcgacgaagacattatcaaattattccaccccgaagaactgaaggatgtgattgttggaaatacagattatgattggaaaacatttgaaaagaatgcacgttatgaaccaggatataacagttcacatcccaccatagtgatgttttggaaggctttccacaaattgactctggaagaaaagaaaaaattccttgtatttcttacaggaactgacagactacaaatgaaagatttaaataatatgaaaataacattttgctgtcctgaaagttggaatgaaagagaccctataagagcactgacatgtttcagtgtcctcttcctccctaaatattctacaatggaaacagttgaagaagcgcttcaagaagccatcaacaacaacagaggatttggctgaccagcttgcttgtccaacagccttattttgttgttgttatcgttgttgttgttgttgttgttgttgtttctctactttgttttgttttaggcttttagcagcctgaagccatggtttttcatttctgtctctagtgataagcaggaaagagggatgaagaagagggtttactggccggttagaacccgtgactgtattctctcccttggatacccctatgcctacatcatattccttacctcttttgggaaatatttttcaaaaataaaataaccgaaaaattaaaaaaaaaaagtcttatt

SEQ ID NO: 294766 - DNA, 2416 bp, Homo sapiens
tgttacttgtttctgaaagcttagtggtgacctcaagtaacaaaatctactcatttcttgtaggaaaacgaacagagttatttccttaagcagcataaagccatacctcagaaaaggagttaataatgattgctggagggaatcaaagcattttgctctggataaagaaagagaattcatatgttaatctgaagaggacaattcctactctgaatgaagggactgtaaagagatggattgctgatgtggagactaaacggtggcagagcacaaaaagggaaatccaagagatattttcatctcctgcttgtctaactggaagttttttaaggaaaagaagaactacagaaatgatgcctgtttatttggacttaaataaagcaagaaacatcttcaaggagttaacccaaaaggactggattactaacatgataaccacctgcctcaaagataatctgctcaaaagacttccatttcattctccaccccaagaagctttagaaattttcttccttctcccagaatgtcctgtgatgcatatttccaacaactgggagagccttgtggttccatttgcaaaggttgtttgtaaaatgagtgaccagtcttcactggttctggaagagtattgggcaactctgcaagaatccactttcagcaaactggtccagatgtttaaaacagccgtcatatgccagttggattactgggatgaaagtgctgaggagaatggtaatgttcaagctctcctagaaatgttgaagaagctgcacagggtaaaccaggtgaaatgtcaactacctgaaagtattttccaagtagacgaactcttgcaccgtctcaatttttttgtagaagtatgcagaaggtacttgtggaaaatgactgtggacgcttcagaaaatgtacaatgctgcgtcatattcagtcactttccatttatctttaataatctgtcgaaaattaaactactacatacagacacacttttaaaaatagagagtaaaaaacataaagcttatcttaggtcggcagcaattgaggaagaaagagagtctgaattcgctttgaggcccacgtttgatctaacagtcagaaggaatcacttgattgaggatgttttgaatcagctaagtcaatttgagaatgaagacctgaggaaagagttatgggtttcatttagtggagaaattgggtatgacctcggaggagtcaagaaagagttcttctactgtctgtttgcagagatgatccagccggaatatgggatgttcatgtatcctgaaggggcttcctgcatgtggtttcctgtcaagcctaaatttgagaagaaaagatacttcttttttggggttctatgtggactttccctgttcaattgcaatgttgccaacctccctttcccactggcactgtttaagaaacttttggaccaaatgccatcattggaagacttgaaagaactcagtcctgatttgggaaagaatttgcaaacacttctggatgatgaaggtgataactttgaggaagtattttacatccattttaatgtgcactgggacagaaacgacacaaacttaattcctaatggaagtagcataactgtcaaccagactaacaagagagactatgtttctaagtatatcaattacattttcaacgactctgtaaaggcggtttatgaagaatttcggagaggattttataaaatgtgcgacgaagacattatcaaattattccaccccgaagaactgaaggatgtgattgttggaaatacagattatgattggaaaacatttgaaaagaatgcacgttatgaaccaggatataacagttcacatcccaccatagtgatgttttggaaggctttccacaaattgactctggaagaaaagaaaaaattccttgtatttcttacaggaactgacagactacaaatgaaagatttaaataatatgaaaataacattttgctgtcctgaaagttggaatgaaagagaccctataagagcactgacatgtttcagtgtcctcttcctccctaaatattctacaatggaaacagttgaagaagcgcttcaagaagccatcaacaacaacagaggatttggctgaccagcttgcttgtccaacagccttattttgttgttgttatcgttgttgttgttgttgttgttgttgtttctctactttgttttgttttaggcttttagcagcctgaagccatggtttttcatttctgtctctagtgataagcaggaaagagggatgaagaagagggtttactggccggttagaacccgtgactgtattctctcccttggatacccctatgcctacatcatattccttacctcttttgggaaatatttttcaaaaataaaataaccgaaaaattaaaaaaaaaaagtcttatt

SEQ ID NO: 294767 - DNA, 816 bp, Homo sapiens
tctctaatatccaccgctcaggagagactatgtttctaagtatatcaattacattttcaacgactctgtaaaggcggtttatgaagaatttcggagaggattttataaaatgtgcgacgaagacattatcaaattattccaccccgaagaactgaaggatgtgattgttggaaatacagattatgattggaaaacatttgaaaagaatgcacgttatgaaccaggatataacagttcacatcccaccatagtgatgttttggaaggctttccacaaattgactctggaagaaaagaaaaaattccttgtatttcttacaggaactgacagactacaaatgaaagatttaaataatatgaaaataacattttgctgtcctgaaagttggaatgaaagagaccctataagagcactgacatgtttcagtgtcctcttcctccctaaatattctacaatggaaacagttgaagaagcgcttcaagaagccatcaacaacaacagaggatttggctgaccagcttgcttgtccaacagccttattttgttgttgttatcgttgttgttgttgttgttgttgttgtttctctactttgttttgttttaggcttttagcagcctgaagccatggtttttcatttctgtctctagtgataagcaggaaagagggatgaagaagagggtttactggccggttagaacccgtgactgtattctctcccttggatacccctatgcctacatcatattccttacctcttttgggaaatatttttcaaaaataaaataaccgaaaaattaaaaaaaaaaagtcttatt

SEQ ID NO: 294768 - DNA, 170 bp, Homo sapiens
cagctggtacgccccggatttagggataagagggtttactggccggttagaacccgtgactgtattctctcccttggatacccctatgcctacatcatattccttacctcttttgggaaatatttttcaaaaataaaataaccgaaaaattaaaaaaaaaaagtcttatt

SEQ ID NO: 294769 - DNA, 212 bp, Homo sapiens
tcccttgtttcctctgctcactgagactaaatactgatgttatcatttatcttcagtggtgcatataaggttcttttcataaatgtgacctgcacttataagcagaaccagtttattctgctttccaaatttttacttagagagggccaatggtaaaatgaagtgtaatatttctgtttctgttttcctagagtaaaaaacataaagcttat

SEQ ID NO: 294770 - DNA, 325 bp, Homo sapiens
tacagaaatgatgcctgtttatttggacttaaataaagcaagaaacatcttcaaggagttaacccaaaaggactggattactaacatggtatcttcagattgttatgtggagaaagaaaatacaccagaatatttcttaaaagaactcaaaatttcagaagaaatgttttgtgttaagggattctccgagaccttgtagcatattcagattaagttaaactcagataacatttaggagtttgcccttttagggtgaaatagttggcatagtagtcacacaggttacagatattctaaatagtgtgtctgtacacaaacacacata

SEQ ID NO: 294771 - DNA, 589 bp, Homo sapiens
atggagaagtacgagcggatccgagtggtggggagaggtgccttcgggattgtgcacctgtgcctgcgaaaggctgaccagaagctggtgatcatcaagcagattccagtggaacagatgaccaaggaagagcggcaggcagcccagaatgagtgccaggtcctcaagctgctcaaccaccccaatgtcattgagtactacgagaacttcctggaagacaaagcccttatgatcgccatggaatatgcaccaggtgggccagcctccttacagtggcctggctggagggcctcttacctctgggacaggcagacacagatctcctggcttccctccttggaatgggcatggcaagggttagagttctggtcccaattatctgaccccggctagccccttgtcctctctggtcccagtgccctgttccatacataaaaggagaggggttgttggctgggcacggtggctcatgcctgtaatctcagcactttgggaggccaacgccgaggcgggcggatcatgaggtcaggagatcgagaccatcctgtttaacacggggaaaccccgtctctactaaaaatacaaaaaa

SEQ ID NO: 294772 - DNA, 1467 bp, Homo sapiens
  misc_feature (1144)..(1144): n is a, c, g, or t
  misc_feature (1149)..(1149): n is a, c, g, or t
  misc_feature (1152)..(1152): n is a, c, g, or t
  misc_feature (1154)..(1154): n is a, c, g, or t
  misc_feature (1163)..(1163): n is a, c, g, or t
  misc_feature (1170)..(1171): n is a, c, g, or t
  misc_feature (1173)..(1173): n is a, c, g, or t
cgacacaatggagtgagcgaaggagacgagcaggttgtgccagcgccaggtgcgcagggggtcggcgcgcacgtgcacgggattgtgcacctgtgcctgcgaaaggctgaccagaagctggtgatcatcaagcagattccagtggaacagatgaccaaggaagagcggcaggcagcccagaatgagtgccaggtcctcaagctgctcaaccaccccaatgtcattgagtactacgagaacttcctggaagacaaagcccttatgatcgccatggaatatgcaccaggcggcactctggctgagttcatccaaaagcgctgtaattccctgctggaggaggagaccatcctgcacttcttcgtgcagatcctgcttgcactgcatcatgtgcacacccacctcatcctgcaccgagacctcaagacccagaacatcctgcttgacaaacaccgcatggtcgtcaagatcggtgatttcggcatctccaagatccttagcagcaagagcaaggcctacacggtggtgggtaccccatgctatatctcccctgagctgtgtgagggcaagccctacaaccagaagagtgacatctgggccctgggctgtgtcctctacgagctggccagcctcaagagggctttcgaggctgcgaacttgccagcactggtgctgaagatcatgagtggcacctttgcacctatctctgaccggtacagccctgagcttcgccagctggtcctgagtctactcagcctggagcctgcccagcggccaccactcagccacatcatggcacagcccctctgcatccgtgccctcctcaacctccacaccgacgtgggcagtgtccgcatgcggagggcagagaagtccgtggcccccagcaacacagggagcaggaccaccagtgtccgctgcagaggtatcccccggggacctgtgaggccagccatcccaccaccactgtcgtcagtgtatgcctggggtggtgggctgggcacccccctgcggctgccaatgctcaacacagaggtggtccaggtggcagctgggcgcacgcagaaagccggcgtcacgcgctctggggcgtctcatcctgtgaggaggcccacccctaggtgcaggacgaggcagactccttacngaggnacngnagcagccanagcccanntncaaccgacgaaccagggaagaccagaacggggtgacaataaagacggtcgacagtggggaaccacaacacgacgggccgaaggaaaacaagcacacacccaagacaaatcgcgaagcgacaaacagggggccaaagcacggcggcagcccctgaaaacacgagccaacacaggggacgcgcaaccgcgacaaaacaggtacaccccgtacaagcaacaccgaagaaaccgatagagaaacaaccaatacgacgaccaaccagacagggtgaagaggcaacaacacaccagagac

SEQ ID NO: 294773 - DNA, 1223 bp, Homo sapiens
cgacacaatggagtgagcgaaggagacgagcaggttgtgccagcgccaggtgcgcagggggtcggcgcgcacgtgcacgggattgtgcacctgtgcctgcgaaaggctgaccagaagctggtgatcatcaagcagattccagtggaacagatgaccaaggaagagcggcaggcagcccagaatgagtgccaggtcctcaagctgctcaaccaccccaatgtcattgagtactacgagaacttcctggaagacaaagcccttatgatcgccatggaatatgcaccaggcggcactctggctgagttcatccaaaagcgctgtaattccctgctggaggaggagaccatcctgcacttcttcgtgcagatcctgcttgcactgcatcatgtgcacacccacctcatcctgcaccgagacctcaagacccagaacatcctgcttgacaaacaccgcatggtcgtcaagatcggtgatttcggcatctccaagatccttagcagcaagagcaaggcctacacggtgcctgggcatggaagggacctccagggcactagaagtcttgagggccaggacctaaccctgcctcctcccctccccctaaaaaacccttggccctttggcccctgtttgggtggttctgcaggaggaagccccttggcttgctttgagaagaagctgtccccaaatgggcttatgcacagagcccctggtcttccctccctgcagggctgtgatcccagctcagcttctatcctgcaggatagaagctgggatcagtggtgggtaccccatgctatatctcccctgagctgtgtgagggcaagccctacaaccagaagagtgacatctgggccctgggctgtgtcctctacgagctggccagcctcaagagggctttcgaggctgcggtgagtgtatgcaccctccaggggacaactgagaaatctactgcctcgcccagcagcccttggctcaagccacctcaggtttctcctctagctgagtcatgtctctcccttatcagattaccccaggggagggctatgggtgtccctcagactatggatttctgagagtaggtcttgcctcccattagacggagggctcctgagggcagggctgtggctttcccagaagaccctcccaagagcaagacttgagttttcccagcatgctggggtttctgaggatatagctgcagctcccctatcagactagggatc

SEQ ID NO: 294774 - DNA, 593 bp, Homo sapiens
ctcgtagtccagcgacctgagggcaaacaggtggccgttgtccgcgttgatggagaccagggaagagaggggcagccacagaatagcgtcttgactcggacccagccagagaccctcccagaaaaacaaagagaagcaagacttgcctttgtctaagaaatcgctctcctcccgcctccattgcactttccgtcacgctcttccagggaatgtcgccaagctgaacctcagacagagctgggaaacagtcttttgccccacaacctttgtagacggcctagtgaataagcctttccagaggctcagacttgctggctcaaaaatctgcctgggctctcaaccgctggtttaccacactggatccgtgcgtcaccgagcatgcacaatgcctgtggtttaattcgccttcttagtcaacagcgccaccatgcgttcgcttgcagttacaaaatcttggagaaggtgtttttattttgctttatcgattattcttatcaaccctagttgacgctactggaggagtttctcatgttatatgaattaaataaatgcaatctagggaaataaaatgcacttttatctacgagcaaaga

SEQ ID NO: 294775 - DNA, 446 bp, Homo sapiens
tgttctatcgactaaggattctcgattgaaatacaaaacattcagagccacacaactactttccagtactgttaatgaaacctaagccatccctggatttgatattttgcccacaacctttgtagacggcctagtgaataagcctttccagaggctcagacttgctggctcaaaaatctgcctgggctctcaaccgctggtttaccacactggatccgtgcgtcaccgagcatgcacaatgcctgtggtttaattcgccttcttagtcaacagcgccaccatgcgttcgcttgcagttacaaaatcttggagaaggtgtttttattttgctttatcgattattcttatcaaccctagttgacgctactggaggagtttctcatgttatatgaattaaataaatgcaatctagggaaataaaatgcacttttatctacgagcaaaga

SEQ ID NO: 294776 - DNA, 771 bp, Homo sapiens
ctccgtgtgaggacccacctagaagtcaccatctatgaagcaggaagcaggccctcagcagacatgaaatctcctggtgctttgatttggacttcccagcctctagaactaggccaagaaacttgaaaaagtgatagaagcagggtaccttttgcatcatcaaacacagctcaggtgtcttctgagaagtcattttgatacagtatgaattcaataagacaagtcttccattgagcatgcttgggcgtactggtgaggaatcacctggggttgttaccattgagaactagcagaacagtaaccatcatttgctccaatgacacacggtgcatctcttatgctattagaagcaggacagctggatataagcaaccagcaggtacagctggaatagaaaagatagacagtggattctttggcttcatccaagtgggctgaggattgaagtatttttccagtcatgttcttgaacacctactttcatggcatgctgacatttccagactactgaagatgtgatgattaactgatcctgcatttgatgaaaaaaaaagtttgcacattccaaaggagataggtttcaaatgactatatagggtacaatttccactgaagtgatttctcttaatcttaatccttaaccactctcattgctacagtaccttccaaaaattaggagccggggagggatgagaagttaattgagctgagcatctcaggaacaggaagtcacagctgagcagcgagagttgattccaccaagaaaagaaa

SEQ ID NO: 294777 - DNA, 632 bp, Homo sapiens
ctccgtgtgaggacccacctagaagtcaccatctatgaagcaggaagcaggccctcagcagacatgaaatctcctggtgctttgatttggacttcccagcctctagaactaggccaagaaacttgaaaaagtgatagaagcagggtaccttttgcatcatcaaacacagctcaggtgtcttctgagaagtcattttgatacagtatgaattcaataagacaagtcttccattgagcatgcttgggccaggtacagctggaatagaaaagatagacagtggattctttggcttcatccaagtgggctgaggattgaagtatttttccagtcatgttcttgaacacctactttcatggcatgctgacatttccagactactgaagatgtgatgattaactgatcctgcatttgatgaaaaaaaaagtttgcacattccaaaggagataggtttcaaatgactatatagggtacaatttccactgaagtgatttctcttaatcttaatccttaaccactctcattgctacagtaccttccaaaagtaagcatagttcataaagtcttcagactgccttttagcacattaacatactcttcacaatcccacaataaaagcaccttaagtgcaggga

SEQ ID NO: 294778 - DNA, 480 bp, Homo sapiens
ggaaccttcccccagtatctgcattggcctccagtgtggtcggtgacatgggcaccttctcagagcacatatccagaactcgagatgggtattccaggtacagctggaatagaaaagatagacagtggattctttggcttcatccaagtgggctgaggattgaagtatttttccagtcatgttcttgaacacctactttcatggcatgctgacatttccagactactgaagatgtgatgattaactgatcctgcatttgatgaaaaaaaaagtttgcacattccaaaggagataggtttcaaatgactatatagggtacaatttccactgaagtgatttctcttaatcttaatccttaaccactctcattgctacagtaccttccaaaagtaagcatagttcataaagtcttcagactgccttttagcacattaacatactcttcacaatcccacaataaaagcaccttaagtgcaggga

SEQ ID NO: 294779 - DNA, 1026 bp, Homo sapiens
ccaaaaaagagacccggtggagcctcccaggggggaacatcagagccacagggcctggacgctgcatcctgggcccagatccaccagaagctccgggacttctcccgcagcacccaggcagagctggaacgggagcgggcacagctgctggtccgggccacgatggctgaagagcaactttctgagctacaggagtacgtggaccagcacctgggcaggtacaagcacgaaatcctgaggctgaggaagctggcaggtgcaggggacccctggaaagtgggggctgtgcctccagccaagccccagcatccaaggaccggcagccactaggccgtctcccaaggagcagagcagagcagagctcctcagccagcacagaaccctcccacccagccccccataaaacatgagtcaggatagaacccaacacacaaacaagaggggcaggacggacaaaagaagatatccacctacggaggtggccaaaggatatagaagagataacacaaaggatatacttgttaccaaagaggtggcaccgatacacaaggcacagacctcgaacaagctagcaacacaggggatagaagcaacacatggggcacggcagcacagattgagacacacgccgccgcgaggatcacgcgcgcgcaacaaaccatacgtggccgaacccacgtaggcgaccgacactcccactagtactgaacggcggacaccccagacaaacaccctaggctgaggagagtctagcgcacacatccacactaggggagcagagaacacgcacaccctacgaaccgggacgcaccgtcactgacgggccgcgcaccacggcagcacgcgacacaagcccacgagagggaaaagggggcgccacacgaccgccgaatgaacaccggcaccccgcggcaccagacgaccgggccacaggaccgggcacgagccatcaggcgcgagacagaggagggggaatagttcgactaaatagagcagacaccagacattccatcaccacacgcggcc

SEQ ID NO: 294780 - DNA, 891 bp, Homo sapiens
agcggagcgttggtacgtgctttggtgcagggcctcttctcgagcgctgatttccagggtgctgttccagatgccatatccaaaataaatgagcagacctgtggggcgaggggaaagataagtaaactgaggcccaaagaagttaagtaaatttcccaaagtcacaagacaaaggaggggcagagctgtgatttgaagttggtgctgtttgactccaaaggctgtcagcttctttgggcaaagactgagtcatctctgcattctcagcacctggtgcaatttaagcagaaatatcttgaagatttttcgtatcttcagggagattaggaatgggaatggaatgggaacgccaatgcaggaaggatgagaagagagtgtctgcagatctgataataactgtaaaataacatggccacactgagatacagagggaaggttaagcctccttgaacttacttaaattggtggcagcacgagctttcagcatcatggccagcatgaccaagccatttccctggtgttcccctcagcatgaaacatctgtctacttatttctttgctgagcctgaatggaatattccatctctgaaaaataaactttgtgtttaaattgaaatctttattcctatctggcaaattggctatatatcctcaacaattggaaggaagtgatgtatctgctgccatcagctacaaagcactggacgcccactgtgctatttattagatttacatgaattccaggtgaatctgatccagtggctacaaaaaaagatctgaaacttctataagcccagcatctaaatcattttttgactgaaatgagtacaggcaagctctgaggcagctctatccagggctatgacaagaatgaagtgaacacattttacc

SEQ ID NO: 294781 - DNA, 731 bp, Homo sapiens
ctggaaaccatcatttatttttggtaaatgccagtgaggaatatacacgtcattcctgcagaaaagtctatagcatttaagtcttgaaaacaggtgacaattgaaaaacattataatattttcaggtcttttaataattcaatgctctgtgtccttcaggctgtgagaccctaaggtattggggtctggtaatgtcccagctatagcaaagggcctgttgggtgacataggacaaatatacagcaaaattcagaaactgcaagtgcttcctcacttgaacggatctggcccctttgtggtaggggcttgactgttcctagaatgaatgacttaaaataaggtggttaaaaattctgcagtgagtctcgccatggtgaacaaacatgattcagaaatgcctccttctataaaatgaaggagctgggttggagtcagtattaccagccagaccataccctgatgggtaaaggaaattctctaccacagagctcagcagtgaggtggctgagaggaaggcaggcctgcagatgaaagcgtgggagtggagcatgtggggcgggcactgtccggctgggaaaacccagccttcaagaggccattgtcaatcaggctgggcacggtggctcatgcctgtcatcctagcactttgggaggccaaggtgtgagccactgtgcctggccggggaactttgtttttaaacgtttacaaacaaaaagattttcgatgcata

SEQ ID NO: 294782 - DNA, 1194 bp, Homo sapiens
ctgctggtctcattgtgtcagggatagcaaccatgcaggtgctaaccaagcgttaccccaagaactgcctgctgaccgtcatggaccggtatgcagccgaggtgcacaacatggagcaggtggtgatgatccccagccttctgcgggacgtgcagctgagtgggcctgggggccaggcccaggctgaggcccctgatctctacacctacttcaccatgctcaaggccatctgtgtggatgtggaccatgggctgctgccgcgggaggagtggcaggccaaggtggcaggcagcgaagagaatggaaccgcagagacagaggaagtcgaggacgagagtgcctcaggagagctggacctggaagcccagttccacctgcacttctccagcctccatcacatcctcatgcacctcaccgagaaagcccaggaggtgacaaggaaataccaggaaatgacgggacaagtttggtagaccttggacactagggaagatcccttcacatgatagaagacagactctttgatgaggtcggcggagcagttcactagccaatgatgagagcagaaaggcctagacctgcagccagaagtgaaggcggctcagttctccgggatgcttctctacctcctgagcaccaattcctggattccagtcactggctcacctttagaatgtctgttgctattcactgctcccctcgctcctcttaacagcttggggaggtgaccagtggttcaggagggactagacaattacctgtccagtgtggtatggtaggaagagtgtaggtgttggcacgtgaccaaaattcacatccctcctcatggcagtcattcagtatgtgtacttgtacaagttatttaacccattggagcctaaattccctcatctataaaatggggataatattatctacctcacaagcttatgaaaactaaacatgatgaatcaaaagcacttggcatgtgagggctattaaaatagcctgattttttttttctccccctctccccaatgtatttgctctggcccttgctttttaccctccagagctaagaggtagcagagtctcttgggatgagtgattcaccctcttacttggcgaccactgatgagatcaacaacaggtgaactataaacctattatttattgcagaactaataaaaaatccaaagccttgtatttgtaaat

SEQ ID NO: 294783 - DNA, 735 bp, Homo sapiens
ctgctggtctcattgtgtcagggatagcaaccatgcaggtgctaaccaagcgttaccccaagaactgcctgctgaccgtcatggaccggtatgcagccgaggtgcacaacatggagcaggtggtgatgatccccagccttctgcgggacgtgcagctgagtgggcctgggggccaggcccaggctgaggcccctgatctctacacctacttcaccatgctcaaggccatctgtgtggatgtggaccatgggctgctgccgcgggaggagtggcaggccaaggtggcaggcagcgaagagaatggaaccgcagagacagaggaagtcgaggacgagagtgcctcaggagagctggacctggaagcccagttccacctgcacttctccagcctccatcacatcctcatgcacctcaccgagaaagcccaggaggtgacaaggaaataccaggaaatgacgggacaagtttggtagaccttggacactagggaagatcccttcacatgatagaagacagactctttgatgaggtcggcggagcagttcactagccaatgatgagagcagaaaggcctagacctgcagccagaagtgaaggcggcctccaggtttcgttcccgggggaatagcctttcttctttaaccttcccctgggaaggcaaccccaaatttcccctggggaatttcccaaggttcccaacttggggccttcaaacgccgtattttaagggaaaca

SEQ ID NO: 294784 - DNA, 395 bp, Homo sapiens
cggcacgaggaggaagagtgtaggtgttggcagtcattcagtatgtgtacttgtacaagttatttaacccattggagcctaaattccctcatctataaaatggggataatattatctacctcacaagcttatgaaaactaaacatgatgaatcaaaagcacttggcatgtgagggctattaaaatagcctgattttttttttctccccctctccccaatgtatttgctctggcccttgctttttaccctccagagctaagaggtagcagagtctcttgggatgagtgattcaccctcttacttggcgaccactgatgagatcaacaacaggtgaactataaacctattatttattgcagaactaataaaaaatccaaagccttgtatttgtaaat

SEQ ID NO: 294785 - DNA, 1136 bp, Homo sapiens
ctgctggtctcattgtgtcagggatagcaaccatgcaggtgctaaccaagcgttaccccaagaactgcctgctgaccgtcatggaccggtatgcagccgaggtgcacaacatggagcaggtggtgatgatccccagccttctgcgggacgtgcagctgagtgggcctgggggccaggcccaggctgaggcccctgatctctacacctacttcaccatgctcaaggccatctgtgtggatgtggaccatgggctgctgccgcgggaggagtggcaggccaaggtggcaggcagcgaagagaatggaaccgcagagacagaggaagtcgaggacgagagtgcctcaggagagctggacctggaagcccagttccacctgcacttctccagcctccatcacatcctcatgcacctcaccgagaaagcccaggaggtgacaaggaaataccaggaaatgacgggacaagtttggtagaccttggacactagggaagatcccttcacatgatagaagacagactctttgatgaggtcggcggagcagttcactagccaatgatgagagcagaaaggcctagacctgcagccagaagtgaaggcggctcagttctccgggatgcttctctacctcctgagcaccaattcctggattccagtcactggctcacctttagaatgtctgttgctattcactgctcccctcgctcctcttaacagcttggggaggtgaccagtggttcaggagggactagacaattacctgtccagtgtggtatggtaggaagagtgtaggtgttggcacgtgaccaaaattcacatccctcctcatggcagtcattcagtatgtgtacttgtacaagttatttaacccattggagcctaaattccctcatctataaaatggggataatattatctacctcacaagcttatgaaaactaaattctccccctctccccaatgtatttgctctggcccttgctttttaccctccagagctaagaggtagcagagtctcttgggatgagtgattcaccctcttacttggcgaccactgatgagatcaacaacaggtgaactataaacctattatttattgcagaactaataaaaaatccaaagccttgtatttgtaaat

SEQ ID NO: 294786 - DNA, 858 bp, Homo sapiens
ctgctggtctcattgtgtcagggatagcaaccatgcaggtgctaaccaagcgttaccccaagaactgcctgctgaccgtcatggaccggtatgcagccgaggtgcacaacatggagcaggtggtgatgatccccagccttctgcgggacgtgcagctgagtgggcctgggggccaggcccaggctgaggcccctgatctctacacctacttcaccatgctcaaggccatctgtgtggatgtggaccatgggctgctgccgcgggaggagtggcaggccaaggtggcaggcagcgaagagaatggaaccgcagagacagaggaagtcgaggacgagagtgcctcaggagagctggacctggaagcccagttccacctgcacttctccagcctccatcacatcctcatgcacctcaccgagaaagcccaggaggtgacaaggaaataccaggaaatgacgggacaagtttggtagaccttggacactagggaagatcccttcacatgatagaagacagactctttgatgaggtcggcggagcagttcactagccaatgatgagagcagaaaggcctagacctgcagccagaagtgaaggcggctcagttctccgggatgcttctctacctcctgagcaccaattcctggattccagtcactggctcacctttagaatgtctgttgctattcactgctcccctcgctcctcttaacagcttggggaggtgaccagtggttcaggagggactagacaattacctgtccagtgtggtatggtaggaagagtgtaggtgttggcacgtgaatcactctccgggtgtaccgtacgctctgaattcgtacatcgctggtcattagc

SEQ ID NO: 294787 - DNA, 664 bp, Homo sapiens
gtttcagggaagggttttcactcattggtagcaaggactggttgaagattgtaagacgcgtggattgtctgttgtttggaacaacgataaaggacaagagtcgcctgtttcgagtacagttcagtggagagtcaaaggagcaggcgctggaacactgctgcagttgtgttcagaagctggcacaatacataaccgtgcaggtgcctgatggaaacatccaggagcttcagctgattcctggcccacccagggcaactgaaagtcaagggaaggattctgcaaagagtgtcccacggcagcctggatcccaccagcactcagaacaacagcaagtgtgtgtaacagcgggcacaggcgctccagacggaaggacctcactgacgcagttagctcagactcttctggcatcggaggagctgccccatgtctatgaacaatctgcatggggtgcagaagagttaggccccttcctacgtttgtgccttatggatcagaatttcccagcatttgtggaagaggtagaaaaggaactgaaaaagctggcgggtttgagaaattaatgctctatatacatatataactaaggaacttcaaagtattgaaaaatgcttcctcctaaaattaaagaagatattagaataaagagtattatccaaacaccttt

SEQ ID NO: 294788 - DNA, 585 bp, Homo sapiens
tacagtggctcagaagaggctctgaagcaattccgatgtttaaccattccccttgataaatcaaatcacaaggacaggtaatggcttcctagagaggctgactttggaaagaagagaagcatgagcagtaaagtattgataaagtgatactcttgtaaattgctagtaaaaaaaaaagatgatatatgtatctgcaaaatccaaggaagttgcaatttgaaataaaaaattcttgaacagcaaaattgaagacaaaagaaccaaagaccctatttcagggtagactgaatcaagtcttcttgcactcactaaagaaaagacttgcagccatatgaagacaacagcaaagtgaccctgaccattttcttgtagtgacacctccgcatagtgacagatgggctcccagaggagtggattggcaggtcttgccagcacactgtgagttgatcacaagaggaaatcaggcctcacacctgtgctgaaccgagttccaggcacttctctaggtcctgtggaaaaaaaaaagtcatttgaatttctcttcctatagacaataaaggttattaaaaaaaatttctttccatt

SEQ ID NO: 294789 - DNA, 572 bp, Homo sapiens
tagcggacatttgcaaaatgacggtgctaatactcctcgtagtggtaatggtgatggtgctttgttgatgaagatgagtcttgcaggcagttttcattcccaaatattcaatatagctaagacaagatagaacagaattcttttgttatcctggaagccactggcctgtgggtggagggcatggaggtatatgaggtatatgtcttgtgggcttccagatgccaactgcaggtagaagactttggcatgtagatggaaagcactgcgctttctatccacagtgccatattctcagtcacttgggtcctgcccttcctgttaagcagcaggaggcaggctgcttgtgccctctttaccatgggttatggctcagacatacacattgtagtatattatttggctcatataaggcctgaggctcaaaggctacttcaggagaagcagagagggcatgaaggggctgtgcagcctttttagatgagggtgctatggggttcagtcaggatctttggttaggctatattgatcagctttggctgtggtgctcttctagcaaatgtcgctggtctaag

SEQ ID NO: 294790 - DNA, 467 bp, Homo sapiens
agcagtccgaatgggcgtcttctgcacagtcttccagcttccagggagcgtgtgtgttcaccaaggccgaatgctacaagactagggaaacttgtagatcaatgagctttgctgtagggtgggtgagaaattggcttctatattttcccaagtatctgaaacgccttcctctgcctacgccatcgtggaagtctttcaactctgctgaaagtctcaactggacttcctggcaaacttcttagccctgagtcctccacccagcccttatgacagtcccccaaagcaacattcaaatagcctctcgtagtttcaaacttgagaccctcaattctgtattaagaaagattcatttatcccaggctaccatatgcttttgcatggtaaatcgtaactctaaggagagctctgatggccagagtagttcagtaactgcaatgaacctgttagtgtggtatgaagagtttcca

SEQ ID NO: 294791 - DNA, 1762 bp, Homo sapiens
atgaacttcacagtgggtttcaagccgctgctaggggatgcacacagcatggacaacctggagaagcagctcatctgccccatctgcctggagatgttctccaaaccagtggtgatcctgccctgccaacacaacctgtgccgcaaatgtgccaacgacgtcttccaggcctcgaatcctctatggcagtcccggggctccaccactgtgtcttcaggaggccgtttccgctgcccatcgtgcaggcatgaggttgtcctggacagacacggtgtctacggcctgcagcgaaacctgctagtggagaacattatcgacatttacaagcaggagtcatccaggccgctgcactccaaggctgagcagcacctcatgtgcgaggagcatgaagaagagaagatcaatatttactgcctgagctgtgaggtgcccacctgctctctctgcaaggtcttcggtgcccacaaggactgtgaggtggccccactgcccaccatttacaaacgccagaagaaacaggatctcactctgttgcccaggctggagtgcagtggcacaaacacaacttactgcagccttgatctcccgagctcaagtgatcctcccatcttagcctcgcagaacactaagattatagatagtgagctcagcgatggcatcgcgatgctggtggcaggcaatgaccgcgtgcaagcagtgatcacacagatggaggaggtgtgccagactatcgaggacaatagccggaggcagaagcagttgttaaaccagaggtttgagagcctgtgcgcagtgctggaggagcgcaagggtgagctgctgcaggcgctggcccgggagcaagaggagaagctgcagcgcgtccgcggcctcatccgtcagtatggcgaccacctggaggcctcctctaagctggtggagtctgccatccagtccatggaagagccacaaatggcgctgtatctccagcaggccaaggagctgatcaataaggtcggggccatgtcgaaggtggagctggcagggcggccggagccaggctatgagagcatggagcaattcaccgtaagggtggagcacgtggccgaaatgctgcggaccatcgacttccagccaggcgcttccggggaggaagaggaggtggccccagacggagaggagggcagcgcggggccggaggaagagcggccggatgggccttaaggcctgcgccgacccgaccctgctcgagagcccgcgctagagtcggggaggatctgcgcagagaccgcagcatcacccaaatcggcgccggccccgggaggatctcaataaagaactcgagcgtcccagacccgtatctcctttcgctgcccaaccccgcagcctgggcttcgaaggcgacccgcccaccatcctgcccttcccagaacctgagaccgtctggggggcggaagccaaatgaacccctattgggcacctctgtgatgccaggagcgaactggtgagcccagcgccctgggaagagggccgagggcggggcggtggtgccgggacctctgaggtcctggggatttggggacccttggggtccacatgcacctggctgacctggctgaaagccgctgtctcggagccccccacagcattttgttcccctcccgctggcccgggggccccaccttcccacgggttcccacgctgctgtgactgccctgcctctacgacaaaagccaacgggtcttcagtacttttattaaaaaatagtcacgcagaaaaaaac

SEQ ID NO: 294792 - DNA, 630 bp, Homo sapiens
atgaacttcacagtgggtttcaagccgctgctaggggatgcacacagcatggacaacctggagaagcagctcatctgccccatctgcctggagatgttctccaaaccagtggtgatcctgccctgccaacacaacctgtgccgcaaatgtgccaacgacgtcttccaggcctcgaatcctctatggcagtcccggggctccaccactgtgtcttcaggaggccgtttccgctgcccatcgtgcaggcatgaggttgtcctggacagacacggtgtctacggcctgcagcgaaacctgctagtggagaacattatcgacatttacaagcaggagtcatccaggccgctgcactccaaggctgagcagcacctcatgtgcgaggagcatgaagaagagaagatcaatatttactgcctgagctgtgaggtgcccacctgctctctctgcaaggtcttcggtgcccacaaggactgtgaggtggccccactgcccaccatttacaaacgccagaagagtgagctcagcgatggcatcgcgatgctggtggcaggcaatgaccgcgtgcaagcagtgatcacacagatggaggaggtgtgccagactatcgaggtgagcctgggctggagggag

SEQ ID NO: 294793 - DNA, 1195 bp, Homo sapiens
gcacctgcttgcccctacgaccttgggcaagtcaccccctctgagttcgttttctgcttaacgaattgggacgtgccttcccacctaccccgcaggactgtggtgagattcagaaatgggactttgcccaggttggcccagtgcttactctcaccctccttttcttccctgcagcaggccaaggagctgatcaataagtgagtaggcatagcgggaagggaaaggagggggctgcactgctccactggctggggtggggcttgagagtgctggggcattgccagctgagtccgtgtggccactgcagggtcggggccatgtcgaaggtggagctggcagggcggccggagccaggctatgagagcatggagcaattcaccgtaagggtggagcacgtggccgaaatgctgcggaccatcgacttccagccaggtgaaggaggtggccgagggccgctgagacgggttcggaccctctgtgtggggggtgcggcgggcacgatggccgtaaaggcagggactccacctcaccaggccttccttgggctcaggcgcttccggggaggaagaggaggtggccccagacggagaggagggcagcgcggggccggaggaagagcggccggatgggccttaaggcctgcgccgacccgaccctgctcgagagcccgcgctagagtcggggaggatctgcgcagagaccgcagcatcacccaaatcggcgccggccccgggaggatctcaataaagaactcgagcgtcccagacccgtatctcctttcgctgcccaaccccgcagcctgggcttcgaaggcgacccgcccaccatcctgcccttcccagaacctgagaccgtctggggggcggaagccaaatgaacccctattgggcacctctgtgatgccaggagcgaactggtgagcccagcgccctgggaagagggccgagggcggggcggtggtgccgggacctctgaggtcctggggatttggggacccttggggtccacatgcacctggctgacctggctgaaagccgctgtctcggagccccccacagcattttgttcccctcccgctggcccgggggccccaccttcccacgggttcccacgctgctgtgactgccctgcctctacgacaaaagccaacgggtcttcagtacttttattaaaaaatagtcacgcagaaaaaaac

SEQ ID NO: 294794 - DNA, 1422 bp, Homo sapiens
  misc_feature (25)..(25): n is a, c, g, or t
tagtgatctagaggatcccgctgcncctactactaccgccgtgtctggtatctggtggatgttggagactgtctgttccttccccacttagtggtggagggcttctctccacctccttccagaatcactagaatgtgcttccgtacctcttgatggttcaagccttctagattgctgtagatgcccttatggggggtgaggtggaagggccagccctctcctaggcaaccctggctggggtgaggggtgtagctctaggccaggtcccagctctgagtgctgacctgtgtgtgtatcagagtgagctcagcgatggcatcgcgatgctggtggcaggcaatgaccgcgtgcaagcagtgatcacacagatggaggaggtgtgccagactatcgaggacaatagccggaggcagaagcagttgttaaaccagaggtttgagagcctgtgcgcagtgctggaggagcgcaagggtgagctgctgcaggcgctggcccgggagcaagaggagaagctgcagcgcgtccgcggcctcatccgtcagtatggcgaccacctggaggcctcctctaagctggtggagtctgccatccagtccatggaagagccacaaatggcgctgtatctccagcaggccaaggagctgatcaataaggtcggggccatgtcgaaggtggagctggcagggcggccggagccaggctatgagagcatggagcaattcaccgtaagggtggagcacgtggccgaaatgctgcggaccatcgacttccagccaggcgcttccggggaggaagaggaggtggccccagacggagaggagggcagcgcggggccggaggaagagcggccggatgggccttaaggcctgcgccgacccgaccctgctcgagagcccgcgctagagtcggggaggatctgcgcagagaccgcagcatcacccaaatcggcgccggccccgggaggatctcaataaagaactcgagcgtcccagacccgtatctcctttcgctgcccaaccccgcagcctgggcttcgaaggcgacccgcccaccatcctgcccttcccagaacctgagaccgtctggggggcggaagccaaatgaacccctattgggcacctctgtgatgccaggagcgaactggtgagcccagcgccctgggaagagggccgagggcggggcggtggtgccgggacctctgaggtcctggggatttggggacccttggggtccacatgcacctggctgacctggctgaaagccgctgtctcggagccccccacagcattttgttcccctcccgctggcccgggggccccaccttcccacgggttcccacgctgctgtgactgccctgcctctacgacaaaagccaacgggtcttcagtacttttattaaaaaatagtcacgcagaaaaaaac

SEQ ID NO: 294795 - DNA, 1636 bp, Homo sapiens
atgaacttcacagtgggtttcaagccgctgctaggggatgcacacagcatggacaacctggagaagcagctcatctgccccatctgcctggagatgttctccaaaccagtggtgatcctgccctgccaacacaacctgtgccgcaaatgtgccaacgacgtcttccaggcctcgaatcctctatggcagtcccggggctccaccactgtgtcttcaggaggccgtttccgctgcccatcgtgcaggcatgaggttgtcctggacagacacggtgtctacggcctgcagcgaaacctgctagtggagaacattatcgacatttacaagcaggagtcatccaggccgctgcactccaaggctgagcagcacctcatgtgcgaggagcatgaagaagagaagatcaatatttactgcctgagctgtgaggtgcccacctgctctctctgcaaggtcttcggtgcccacaaggactgtgaggtggccccactgcccaccatttacaaacgccagaagagtgagctcagcgatggcatcgcgatgctggtggcaggcaatgaccgcgtgcaagcagtgatcacacagatggaggaggtgtgccagactatcgaggacaatagccggaggcagaagcagttgttaaaccagaggtttgagagcctgtgcgcagtgctggaggagcgcaagggtgagctgctgcaggcgctggcccgggagcaagaggagaagctgcagcgcgtccgcggcctcatccgtcagtatggcgaccacctggaggcctcctctaagctggtggagtctgccatccagtccatggaagagccacaaatggcgctgtatctccagcaggccaaggagctgatcaataaggtcggggccatgtcgaaggtggagctggcagggcggccggagccaggctatgagagcatggagcaattcaccgtaagggtggagcacgtggccgaaatgctgcggaccatcgacttccagccaggcgcttccggggaggaagaggaggtggccccagacggagaggagggcagcgcggggccggaggaagagcggccggatgggccttaaggcctgcgccgacccgaccctgctcgagagcccgcgctagagtcggggaggatctgcgcagagaccgcagcatcacccaaatcggcgccggccccgggaggatctcaataaagaactcgagcgtcccagacccgtatctcctttcgctgcccaaccccgcagcctgggcttcgaaggcgacccgcccaccatcctgcccttcccagaacctgagaccgtctggggggcggaagccaaatgaacccctattgggcacctctgtgatgccaggagcgaactggtgagcccagcgccctgggaagagggccgagggcggggcggtggtgccgggacctctgaggtcctggggatttggggacccttggggtccacatgcacctggctgacctggctgaaagccgctgtctcggagccccccacagcattttgttcccctcccgctggcccgggggccccaccttcccacgggttcccacgctgctgtgactgccctgcctctacgacaaaagccaacgggtcttcagtacttttattaaaaaatagtcacgcagaaaaaaac

SEQ ID NO: 294796 - DNA, 1180 bp, Homo sapiens
aaaagatctgggctgggttctggctcagccactaactcacagtgtcactacggatgggtcactttctgtgttggttctctgtgagtaccctgtgctttcccagccaccgggtctcagccacgccttccctcatccttgctccccatcttttaggacaatagccggaggcagaagcagttgttaaaccagaggtttgagagcctgtgcgcagtgctggaggagcgcaagggtgagctgctgcaggcgctggcccgggagcaagaggagaagctgcagcgcgtccgcggcctcatccgtcagtatggcgaccacctggaggcctcctctaagctggtggagtctgccatccagtccatggaagagccacaaatggcgctgtatctccagcaggccaaggagctgatcaataaggtcggggccatgtcgaaggtggagctggcagggcggccggagccaggctatgagagcatggagcaattcaccgtaagggtggagcacgtggccgaaatgctgcggaccatcgacttccagccaggcgcttccggggaggaagaggaggtggccccagacggagaggagggcagcgcggggccggaggaagagcggccggatgggccttaaggcctgcgccgacccgaccctgctcgagagcccgcgctagagtcggggaggatctgcgcagagaccgcagcatcacccaaatcggcgccggccccgggaggatctcaataaagaactcgagcgtcccagacccgtatctcctttcgctgcccaaccccgcagcctgggcttcgaaggcgacccgcccaccatcctgcccttcccagaacctgagaccgtctggggggcggaagccaaatgaacccctattgggcacctctgtgatgccaggagcgaactggtgagcccagcgccctgggaagagggccgagggcggggcggtggtgccgggacctctgaggtcctggggatttggggacccttggggtccacatgcacctggctgacctggctgaaagccgctgtctcggagccccccacagcattttgttcccctcccgctggcccgggggccccaccttcccacgggttcccacgctgctgtgactgccctgcctctacgacaaaagccaacgggtcttcagtacttttattaaaaaatagtcacgcagaaaaaaac

SEQ ID NO: 294797 - DNA, 552 bp, Homo sapiens
cgctgctaggggatgcacacagcatggacaacctggagaagcagctcatctgccccatctgcctggagatgttctccaaaccagtggtgatcctgccctgccaacacaacctgtgccgcaaatgtgccaacgacgtcttccaggtgggtgccagggacgggcagggccaggtaaagcaatgcagacctgtgggggactgatcaggtcagagctgagaccccagaaggtgatggatagagtgctctctgaggtgggtggtggctgttgtggctggagagcagaagggctggggtccaagcaaatcccagagcaagcatgagtcagcagctccctgcaggctggcaggtacagcctgtgcatagacggcagctggagtgctgggatctaccaaggaaagtagaccctgtggaaactgggagggagggtatcccacaccgggctttataagagcctgtgccagactctgcattccagtttggagtttcagacttcgagagcattgtggaaaatacggagaaaagattaatgagataatgaaacgttaaaaaacaa

SEQ ID NO: 294798 - DNA, 1017 bp, Homo sapiens
taattgctttctttcctgcctggggtttttcaaggttccccccggctttgggtaagggagctctctcagggcttgatggctttacctttgtcgtgtgcttcttgcccagtgtccccacacaacgttgcgcttctccgtggctgcatttagactttaccgtaaatgtgagtttcactgctcacacattgccccccatattatcttccccagagagcaggaggcacccagtattcccacctccttacaacagtgccttgcacagaacaggccctgcgcggatgaaacttagcaaggagagagattcttcctgttgtatcaatataagaaacgggttccaggcctgcctgaatgagttccatacacaatgcattaatataattgttcatagttcctttcaacggcctcttaacaagttcccaaaatgagtattatcagtataatttaaaaagttaacacaaggaggagagatggctgacaataaaatagttatgtacttgatgacaatctgtaatagcttcaggtcggaaacaagtacctttccttttcttgaaacaaagttccagtctctggaacataaaaccgggaaatacatcaactttggggaacaggagaaaaactgtatttattctaaccgaagtactcctctcactttcaggcgtccagcgtctccagagcctctacaagtgcctccatcaaaccagcttttgggaaagaatctgttaagcccattcagctaagcggcacggggtcacagggctttgagtagccttcctcggtgacgctgagtagggaactccgggatggggctccacggtggactctcggggacaggcacccggggccaccctacaaagcctcgccctccaggccacagtccagagccttcggcctgcgcagggtcctcgctgcatccagcggacggtactgagaagccatgcgctggcggtttgatgcaacacgaccctcagggccgacccagcgagtgaccaaacatagcatgtttttgttttgcaactc

SEQ ID NO: 294799 - DNA, 461 bp, Homo sapiens
cagtcatgcttcctgtaaagcctgcagtaatgtggcacagcatgtgcagggctggaaggccgaggaaggctgtgcaaggctgtgtcagcatcaaggaaggcgtccagcgtctccagagcctctacaagtgcctccatcaaaccagcttttgggaaagaatctgttaagcccattcagctaagcggcacggggtcacagggctttgagtagccttcctcggtgacgctgagtagggaactccgggatggggctccacggtggactctcggggacaggcacccggggccaccctacaaagcctcgccctccaggccacagtccagagccttcggcctgcgcagggtcctcgctgcatccagcggacggtactgagaagccatgcgctggcggtttgatgcaacacgaccctcagggccgacccagcgagtgaccaaacatagcatgtttttgttttgcaactc

SEQ ID NO: 294800 - DNA, 1965 bp, Homo sapiens
  misc_feature (25)..(25): n is a, c, g, or t
  misc_feature (28)..(28): n is a, c, g, or t
  misc_feature (32)..(32): n is a, c, g, or t
gggccagcgcggccggggccccctncgncctncccacccagggcgctgagcacgcacgccgccggcctggcggcgttcgcggggcccgggaccagccgccgccttctccaggcgctcctactctctgggcatctgcagtccgagcggaaggggcgggaacgtcggcgacgccgaggagcaaagcccacgatcggcttcccggggcagcggacggctgccttcctcccggcgcaaacgcaccgcccaggagggggcgggctcggcgggtcggggggcggggccggggtccgagctcgggcccgcctccgcctccgccagctcctgtgagctgccgagtgctaggcacccgggctcttctgggggctccagaactaagccacccagacaccatcatcccgaaaaccccagcccttctcccatggcaggctacttgccccccaaaggctacgccccttcgcccccacctccctaccctgtcacccctgggtacccggagccggcgctacatcctgggcccgggcaggcgccagtgcccgcccaggtacctgccccagctcccggcttcgccctcttcccctcgcctggccccgtggccttggggtctgctgcccccttcttgccactgccaggggtgccttctggcctcgaattcctggtgcagattgatcagattttgattcaccagaaggctgagcgagtggaaacgttcctaggctgggagacctgtaatcggtatgaactgcgctctggggccgggcagcccctgggtcaggcggccgaggagagcaactgctgcgcccgtctgtgctgtggcgcccgccggccgcctgcgtgtccgcctggccgaccccggggaccgtgaggtgctgcgtttgctccgcccgctgcactgtggctgcagctgctgcccctgtggcctccaggagatggaagtacaggctccaccaggcaccaccattggccacgtgctacagacctggcatcccttcctccccaagttctccatccaggatgccgatcgccagacagtcttgcgagtggtggggccctgctggacctgtggctgtggcacagacaccaactttgaggtgaagactcgggatgaatcccgcagtgtgggccgcatcagcaagcagtgggggggcctggtccgagaagccctcacagatgcagatgactttggcctacagttcccgctggacctggatgtgagggtgaaggctgtgctgctgggagccacattcctcattgactacatgttctttgagaagcgaggaggcgctgggccctctgccatcaccagttagaggccaccatggtgtgaggagaccatcacctcgaccagaactccagatggtcacctgccctggcccctcctctgggcagcccctttcctccatgtacactgcaggggacagaaggggggccccatccctaccctactccctggccgcctgcccctgtggttcccaaggaggggtatgtatgagagccgctctcctgctacctcccaccactgtcccagcagtccctcggcacacaggcatatcagctttcacactttccccatgcactctctcccacccccttccagggcctctgctccaaaggaggcctctggaacccaggactctggggttttacaagagggctggggtgtggaagggcaagctgcaccaaagacggtggatatagccaccgcccccccgccgctgcctagcatctgcttggccaattagttcagcctcagaccatggcactttgagggggtctctacctccccatcaacagctgcagggggaccccagtgccaacttcctctcccactagggccctgccttcagctggtgcttgctgcgattcctgtgccttatgtaactgcccttccttcccttgccctaggaaaaaggctgcatctttatatgttacattcatataaactttgtaactttttggacattgaaa

SEQ ID NO: 294801 - DNA, 1078 bp, Homo sapiens
  misc_feature (25)..(25): n is a, c, g, or t
  misc_feature (28)..(28): n is a, c, g, or t
  misc_feature (32)..(32): n is a, c, g, or t
gggccagcgcggccggggccccctncgncctncccacccagggcgctgagcacgcacgccgccggcctggcggcgttcgcggggcccgggaccagccgccgccttctccaggcgctcctactctctgggcatctgcagtccgagcggaaggggcgggaacgtcggcgacgccgaggagcaaagcccacgatcggcttcccggggcagcggacggctgccttcctcccggcgcaaacgcaccgcccaggagggggcgggctcggcgggtcggggggcggggccggggtccgagctcgggcccgcctccgcctccgccagctcctgtgagctgccgagtgctaggcacccgggctcttctgggggctccagaactaagccacccagacaccatcatcccgaaaaccccagcccttctcccatggcaggtaagtgcgcgcaagtctgggggtctccgttatccccccacggacttgggagccgggtttgaacacatcctcccggaatgtgctcggactggctgggtggggcccctcccttccttccggggaacctccaccctgctcccctgccccatctttctctgcctcttgccaccacgtttcccccgaagcctcgcggcccatgggctgaggaataaggggatgaggccttgagtccctttctaatctatcctgctcccaccgctttacaggctacttgccccccaaaggctacgccccttcgcccccacctccctaccctgtcacccctgggtacccggaagcccggcgctgaaattccatggagcccagggacaaggacgccaagtagcgcacgcagcaaggctacctaggacacacacgatcaccaggctcacagacccatctttcacactacgcacatgggccccccggtgggacacattgtgcaggctcttgactgacgccccccatttcattgggaccaacatggctcaaggccgatgcaccctatactggggccctccgcaaccgtcctcgggtggcaccacttggacaccagcaatcatcgcaattcagcaagccaaatggctcgatcgccgaagctgggaaaaaatgga

SEQ ID NO: 294802 - DNA, 894 bp, Homo sapiens
  misc_feature (25)..(25): n is a, c, g, or t
  misc_feature (28)..(28): n is a, c, g, or t
  misc_feature (32)..(32): n is a, c, g, or t
gggccagcgcggccggggccccctncgncctncccacccagggcgctgagcacgcacgccgccggcctggcggcgttcgcggggcccgggaccagccgccgccttctccaggcgctcctactctctgggcatctgcagtccgagcggaaggggcgggaacgtcggcgacgccgaggagcaaagcccacgatcggcttcccggggcagcggacggctgccttcctcccggcgcaaacgcaccgcccaggagggggcgggctcggcgggtcggggggcggggccggggtccgagctcgggcccgcctccgcctccgccagctcctgtgagctgccgagtgctaggcacccgggctcttctgggggctccagaactaagccacccagacaccatcatcccgaaaaccccagcccttctcccatggcagctacttgccccccccaaggctagccttgcccactgctacctgtcacccgggtccgggcgggctaatctgggccgggagcgcaggccgccagtactcccgtccggttcgcctcttcctgcggcccgggcttgggttgtgccccttttgcatgcgggtgctttggctcattctgtgcatgatcgattgatccgaggcgggagtgagtcctggtggggctgttcggtatgactggctctggggccgggagccctgggtcaggcggcgagagacaatgtgcgccgtctgtgtgggcgcccgcggcgtggtgtcgctggcgaccgggacgtgaggtggttgtcgccgtgcctgggtgagcgtgccctgggctccaggatggatcagtccacagccaatgcagtgctcgacgatctctcccagtcctcagagcgtgcaacgctggatgggcctgcgtgtgttgacaccatgggag

SEQ ID NO: 294803 - DNA, 1768 bp, Homo sapiens
  misc_feature (21)..(22): n is a, c, g, or t
  misc_feature (24)..(24): n is a, c, g, or t
ggctggtacggtcggagttcnngnatgccgagtgctaggcacccgggctcttctgggggctcagaggcgccgcccaagagaccctgggccggcgccgggcgcagctgcctctccgtctttgtgtctgtctctgtgtctgtctggctatctccgagtttgcctccgcttccagaactaagccacccagacaccatcatcccgaaaaccccagcccttctcccatggcaggctacttgccccccaaaggctacgccccttcgcccccacctccctaccctgtcacccctgggtacccggagccggcgctacatcctgggcccgggcaggcgccagtgcccgcccaggtacctgccccagctcccggcttcgccctcttcccctcgcctggccccgtggccttggggtctgctgcccccttcttgccactgccaggggtgccttctggcctcgaattcctggtgcagattgatcagattttgattcaccagaaggctgagcgagtggaaacgttcctaggctgggagacctgtaatcggtatgaactgcgctctggggccgggcagcccctgggtcaggcggccgaggagagcaactgctgcgcccgtctgtgctgtggcgcccgccggccgcctgcgtgtccgcctggccgaccccggggaccgtgaggtgctgcgtttgctccgcccgctgcactgtggctgcagctgctgcccctgtggcctccaggagatggaagtacaggctccaccaggcaccaccattggccacgtgctacagacctggcatcccttcctccccaagttctccatccaggatgccgatcgccagacagtcttgcgagtggtggggccctgctggacctgtggctgtggcacagacaccaactttgaggtgaagactcgggatgaatcccgcagtgtgggccgcatcagcaagcagtgggggggcctggtccgagaagccctcacagatgcagatgactttggcctacagttcccgctggacctggatgtgagggtgaaggctgtgctgctgggagccacattcctcattgactacatgttctttgagaagcgaggaggcgctgggccctctgccatcaccagttagaggccaccatggtgtgaggagaccatcacctcgaccagaactccagatggtcacctgccctggcccctcctctgggcagcccctttcctccatgtacactgcaggggacagaaggggggccccatccctaccctactccctggccgcctgcccctgtggttcccaaggaggggtatgtatgagagccgctctcctgctacctcccaccactgtcccagcagtccctcggcacacaggcatatcagctttcacactttccccatgcactctctcccacccccttccagggcctctgctccaaaggaggcctctggaacccaggactctggggttttacaagagggctggggtgtggaagggcaagctgcaccaaagacggtggatatagccaccgcccccccgccgctgcctagcatctgcttggccaattagttcagcctcagaccatggcactttgagggggtctctacctccccatcaacagctgcagggggaccccagtgccaacttcctctcccactagggccctgccttcagctggtgcttgctgcgattcctgtgccttatgtaactgcccttccttcccttgccctaggaaaaaggctgcatctttatatgttacattcatataaactttgtaactttttggacattgaaa

SEQ ID NO: 294804 - DNA, 2077 bp, Homo sapiens
  misc_feature (25)..(25): n is a, c, g, or t
  misc_feature (28)..(28): n is a, c, g, or t
  misc_feature (32)..(32): n is a, c, g, or t
gggccagcgcggccggggccccctncgncctncccacccagggcgctgagcacgcacgccgccggcctggcggcgttcgcggggcccgggaccagccgccgccttctccaggcgctcctactctctgggcatctgcagtccgagcggaaggggcgggaacgtcggcgacgccgaggagcaaagcccacgatcggcttcccggggcagcggacggctgccttcctcccggcgcaaacgcaccgcccaggagggggcgggctcggcgggtcggggggcggggccggggtccgagctcgggcccgcctccgcctccgccagctcctgtgagctgccgagtgctaggcacccgggctcttctgggggctccagtcagaggcgccgcccaagagaccctgggccggcgccgggcgcagctgcctctccgtctttgtgtctgtctctgtgtctgtctggctatctccgagtttgcctccgcttccagaactaagccacccagacaccatcatcccgaaaaccccagcccttctcccatggcaggctacttgccccccaaaggctacgccccttcgcccccacctccctaccctgtcacccctgggtacccggagccggcgctacatcctgggcccgggcaggcgccagtgcccgcccaggtacctgccccagctcccggcttcgccctcttcccctcgcctggccccgtggccttggggtctgctgcccccttcttgccactgccaggggtgccttctggcctcgaattcctggtgcagattgatcagattttgattcaccagaaggctgagcgagtggaaacgttcctaggctgggagacctgtaatcggtatgaactgcgctctggggccgggcagcccctgggtcaggcggccgaggagagcaactgctgcgcccgtctgtgctgtggcgcccgccggccgcctgcgtgtccgcctggccgaccccggggaccgtgaggtgctgcgtttgctccgcccgctgcactgtggctgcagctgctgcccctgtggcctccaggagatggaagtacaggctccaccaggcaccaccattggccacgtgctacagacctggcatcccttcctccccaagttctccatccaggatgccgatcgccagacagtcttgcgagtggtggggccctgctggacctgtggctgtggcacagacaccaactttgaggtgaagactcgggatgaatcccgcagtgtgggccgcatcagcaagcagtgggggggcctggtccgagaagccctcacagatgcagatgactttggcctacagttcccgctggacctggatgtgagggtgaaggctgtgctgctgggagccacattcctcattgactacatgttctttgagaagcgaggaggcgctgggccctctgccatcaccagttagaggccaccatggtgtgaggagaccatcacctcgaccagaactccagatggtcacctgccctggcccctcctctgggcagcccctttcctccatgtacactgcaggggacagaaggggggccccatccctaccctactccctggccgcctgcccctgtggttcccaaggaggggtatgtatgagagccgctctcctgctacctcccaccactgtcccagcagtccctcggcacacaggcatatcagctttcacactttccccatgcactctctcccacccccttccagggcctctgctccaaaggaggcctctggaacccaggactctggggttttacaagagggctggggtgtggaagggcaagctgcaccaaagacggtggatatagccaccgcccccccgccgctgcctagcatctgcttggccaattagttcagcctcagaccatggcactttgagggggtctctacctccccatcaacagctgcagggggaccccagtgccaacttcctctcccactagggccctgccttcagctggtgcttgctgcgattcctgtgccttatgtaactgcccttccttcccttgccctaggaaaaaggctgcatctttatatgttacattcatataaactttgtaactttttggacattgaaa

SEQ ID NO: 294805 - DNA, 2333 bp, Homo sapiens
  misc_feature (21)..(22): n is a, c, g, or t
  misc_feature (24)..(24): n is a, c, g, or t
  misc_feature (2271)..(2271): n is a, c, g, or t
ggctggtacggtcggagttcnngnatgccgagtgctaggcacccgggctcttctgggggctcagaggcgccgcccaagagaccctgggccggcgccgggcgcagctgcctctccgtctttgtgtctgtctctgtgtctgtctggctatctccgagtttgcctccgcttccagaactaagccacccagacaccatcatcccgaaaaccccagcccttctcccatggcaggctacttgccccccaaaggctacgccccttcgcccccacctccctaccctgtcacccctgggtacccggagccggcgctacatcctgggcccgggcaggcgccagtgcccgcccaggtacctgccccagctcccggcttcgccctcttcccctcgcctggccccgtggccttggggtctgctgcccccttcttgccactgccaggggtgccttctggcctcgaattcctggtgcagattgatcagattttgattcaccagaaggctgagcgagtggaaacgttcctaggctgggagacctgtaatcggtatgaactgcgctctggggccgggcagcccctgggtcaggcggccgaggagagcaactgctgcgcccgtctgtgctgtggcgcccgccggccgcctgcgtgtccgcctggccgaccccggggaccgtgaggtgctgcgtttgctccgcccgctgcactgtggctgcagctgctgcccctgtggcctccaggagatggaagtacaggctccaccaggcaccaccattggccacgtgctacagacctggcatcccttcctccccaagttctccatccaggatgccgatcgccagacagtcttgcgagtggtggggccctgctggacctgtggctgtggcacagacaccaactttgaggtgaagactcgggatgaatcccgcagtgtgggccgcatcagcaagcagtgggggggcctggtccgagaagccctcacagatgcagatgactttggcctacagttcccgctggacctggatgtgagggtgaaggctgtgctgctgggagccacattcctcattgactacatgttctttgagaagcgaggaggcgctgggccctctgccatcaccagttagaggccaccatggtgtgaggagaccatcacctcgaccagaactccagatggtcacctgccctggcccctcctctgggcagcccctttcctccatgtacactgcaggggacagaaggggggccccatccctaccctactccctggccgcctgcccctgtggttcccaaggaggggtatgtatgagagccgctctcctgctacctcccaccactgtcccagcagtccctcggcacacaggcatatcagctttcacactttccccatgcactctctcccacccccttccagggcctctgctccaaaggaggcctctggaacccaggactctggggttttacaagagggctggggtgtggaagggcaagctgcaccaaagacggtggatatagccaccgcccccccgccgctgcctagcatctgcttggccaattagttcagcctcagaccatggcactttgagggggtctctacctccccatcaacagctgcagggggaccccagtgccaacttcctctcccactagggccctgccttcagctggtgcttgctgcgattcctgtgccttatgtaactgcccttccttcccttgccctaggaaaaaggctgcatctttatatgttacattcatataaactttgtaactttttggacattgaaagatgtatgtaataggggagggtagaagcagttggtatgggaaaaaacaaaggggaatgtgagagctgggctggggcaggggctagtccatctcataatccatactaccagcatcaaatgtccttgagtgcaagagagcaatcgtcatcacccacgatggccctggaccaaacgaaggcagtttgggcctataccccaagtcaatatggtggcttccatcatccaggatggctgccctgcagagtccagtgtggtagctgatggcagttcaggatggctgttcacatggtccagtgtggccccttgatcctctctagcgcgtagaagcttcctctgcatatgatgtatagcagctcttttcctccaagtcctcttgtttgagaatgtagtgggcagactagatccttcttggcccagccaaaggagcttcagccttcagaagccaaggagcatgggagggaggagacatttgccagtgcccaacttctgggctcctcctcccantgtgcctacggcaggttgggatctccccaggtggaacgtcttacccctgtcgggaccttgtt

SEQ ID NO: 294806 - DNA, 1855 bp, Homo sapiens
  misc_feature (25)..(25): n is a, c, g, or t
  misc_feature (28)..(28): n is a, c, g, or t
  misc_feature (32)..(32): n is a, c, g, or t
gggccagcgcggccggggccccctncgncctncccacccagggcgctgagcacgcacgccgccggcctggcggcgttcgcggggcccgggaccagccgccgccttctccaggcgctcctactctctgggcatctgcagtccgagcggaaggggcgggaacgtcggcgacgccgaggagcaaagcccacgatcggcttcccggggcagcggacggctgccttcctcccggcgcaaacgcaccgcccaggagggggcgggctcggcgggtcggggggcggggccggggtccgagctcgggcccgcctccgcctccgccagctcctgtgagctgccgagtgctaggcacccgggctcttctgggggctccagtcagaggcgccgcccaagagaccctgggccggcgccgggcgcagctgcctctccgtctttgtgtctgtctctgtgtctgtctggctatctccgagtttgcctccgcttccagaactaagccacccagacaccatcatcccgaaaaccccagcccttctcccatggcaggctacttgccccccaaaggctacgccccttcgcccccacctccctaccctgtcacccctgggtacccggagccggcgctacatcctgggcccgggcaggcgccagtgcccgcccaggtacctgccccagctcccggcttcgccctcttcccctcgcctggccccgtggccttggggtctgctgcccccttcttgccactgccaggggtgccttctggcctcgaattcctggtgcagattgatcagattttgattcaccagaaggctgagcgagtggaaaatggaagtacaggctccaccaggcaccaccattggccacgtgctacagacctggcatcccttcctccccaagttctccatccaggatgccgatcgccagacagtcttgcgagtggtggggccctgctggacctgtggctgtggcacagacaccaactttgaggtgaagactcgggatgaatcccgcagtgtgggccgcatcagcaagcagtgggggggcctggtccgagaagccctcacagatgcagatgactttggcctacagttcccgctggacctggatgtgagggtgaaggctgtgctgctgggagccacattcctcattgactacatgttctttgagaagcgaggaggcgctgggccctctgccatcaccagttagaggccaccatggtgtgaggagaccatcacctcgaccagaactccagatggtcacctgccctggcccctcctctgggcagcccctttcctccatgtacactgcaggggacagaaggggggccccatccctaccctactccctggccgcctgcccctgtggttcccaaggaggggtatgtatgagagccgctctcctgctacctcccaccactgtcccagcagtccctcggcacacaggcatatcagctttcacactttccccatgcactctctcccacccccttccagggcctctgctccaaaggaggcctctggaacccaggactctggggttttacaagagggctggggtgtggaagggcaagctgcaccaaagacggtggatatagccaccgcccccccgccgctgcctagcatctgcttggccaattagttcagcctcagaccatggcactttgagggggtctctacctccccatcaacagctgcagggggaccccagtgccaacttcctctcccactagggccctgccttcagctggtgcttgctgcgattcctgtgccttatgtaactgcccttccttcccttgccctaggaaaaaggctgcatctttatatgttacattcatataaactttgtaactttttggacattgaaa

SEQ ID NO: 294807 - DNA, 2005 bp, Homo sapiens
  misc_feature (25)..(25): n is a, c, g, or t
  misc_feature (28)..(28): n is a, c, g, or t
  misc_feature (32)..(32): n is a, c, g, or t
gggccagcgcggccggggccccctncgncctncccacccagggcgctgagcacgcacgccgccggcctggcggcgttcgcggggcccgggaccagccgccgccttctccaggcgctcctactctctgggcatctgcagtccgagcggaaggggcgggaacgtcggcgacgccgaggagcaaagcccacgatcggcttcccggggcagcggacggctgccttcctcccggcgcaaacgcaccgcccaggagggggcgggctcggcgggtcggggggcggggccggggtccgagctcgggcccgcctccgcctccgccagctcctgtgagctgccgagtgctaggcacccgggctcttctgggggctccagtcagaggcgccgcccaagagaccctgggccggcgccgggcgcagctgcctctccgtctttgtgtctgtctctgtgtctgtctggctatctccgagtttgcctccgcttccagaactaagccacccagacaccatcatcccgaaaaccccagcccttctcccatggcaggctacttgccccccaaaggctacgccccttcgcccccacctccctaccctgtcacccctgggtacccggagccggcgctacatcctgggcccgggcaggcgccagtgcccgcccaggtacctgccccagctcccggcttcgccctcttcccctcgcctggccccgtggccttggggtctgctgcccccttcttgccactgccaggggtgccttctggcctcgaattcctggtgcagattgatcagattttgattcaccagaaggctgagcgagtggaaacgttcctaggctgggagacctgtaatcggtatgaactgcgctctggggccgggcagcccctgggtcaggcggccgaggagagcaactgctgcgcccgtctgtgctgtggcgcccgccggccgcctgcgtgtccgcctggccgaccccggggaccgtgaggtgctgcgtttgctccgcccgctgcactgtggctgcagctgctgcccctgtggcctccaggagttctccatccaggatgccgatcgccagacagtcttgcgagtggtggggccctgctggacctgtggctgtggcacagacaccaactttgaggtgaagactcgggatgaatcccgcagtgtgggccgcatcagcaagcagtgggggggcctggtccgagaagccctcacagatgcagatgactttggcctacagttcccgctggacctggatgtgagggtgaaggctgtgctgctgggagccacattcctcattgactacatgttctttgagaagcgaggaggcgctgggccctctgccatcaccagttagaggccaccatggtgtgaggagaccatcacctcgaccagaactccagatggtcacctgccctggcccctcctctgggcagcccctttcctccatgtacactgcaggggacagaaggggggccccatccctaccctactccctggccgcctgcccctgtggttcccaaggaggggtatgtatgagagccgctctcctgctacctcccaccactgtcccagcagtccctcggcacacaggcatatcagctttcacactttccccatgcactctctcccacccccttccagggcctctgctccaaaggaggcctctggaacccaggactctggggttttacaagagggctggggtgtggaagggcaagctgcaccaaagacggtggatatagccaccgcccccccgccgctgcctagcatctgcttggccaattagttcagcctcagaccatggcactttgagggggtctctacctccccatcaacagctgcagggggaccccagtgccaacttcctctcccactagggccctgccttcagctggtgcttgctgcgattcctgtgccttatgtaactgcccttccttcccttgccctaggaaaaaggctgcatctttatatgttacattcatataaactttgtaactttttggacattgaaa

SEQ ID NO: 294808 - DNA, 2283 bp, Homo sapiens
  misc_feature (25)..(25): n is a, c, g, or t
  misc_feature (28)..(28): n is a, c, g, or t
  misc_feature (32)..(32): n is a, c, g, or t
gggccagcgcggccggggccccctncgncctncccacccagggcgctgagcacgcacgccgccggcctggcggcgttcgcggggcccgggaccagccgccgccttctccaggcgctcctactctctgggcatctgcagtccgagcggaaggggcgggaacgtcggcgacgccgaggagcaaagcccacgatcggcttcccggggcagcggacggctgccttcctcccggcgcaaacgcaccgcccaggagggggcgggctcggcgggtcggggggcggggccggggtccgagctcgggcccgcctccgcctccgccagctcctgtgagctgccgagtgctaggcacccgggctcttctgggggctccaggtgagcgggggcacagaggggtcagggagaccgcccttggggtggggctgtcggtctgaccgcgggtccatctgtcctgccgtcggcccacagcctcctccgcaggatgggagaacaaagggagggggcggttctggggcccccgagggaatccagggtcccaggtacccggtcccgcccactgacacttgggtttctccccgagttcagaggcgccgcccaagagaccctgggccggcgccgggcgcagctgcctctccgtctttgtgtctgtctctgtgtctgtctggctatctccgagtttgcctccgcttccagaactaagccacccagacaccatcatcccgaaaaccccagcccttctcccatggcaggctacttgccccccaaaggctacgccccttcgcccccacctccctaccctgtcacccctgggtacccggagccggcgctacatcctgggcccgggcaggcgccagtgcccgcccaggtacctgccccagctcccggcttcgccctcttcccctcgcctggccccgtggccttggggtctgctgcccccttcttgccactgccaggggtgccttctggcctcgaattcctggtgcagattgatcagattttgattcaccagaaggctgagcgagtggaaacgttcctaggctgggagacctgtaatcggtatgaactgcgctctggggccgggcagcccctgggtcaggcggccgaggagagcaactgctgcgcccgtctgtgctgtggcgcccgccggccgcctgcgtgtccgcctggccgaccccggggaccgtgaggtgctgcgtttgctccgcccgctgcactgtggctgcagctgctgcccctgtggcctccaggagatggaagtacaggctccaccaggcaccaccattggccacgtgctacagacctggcatcccttcctccccaagttctccatccaggatgccgatcgccagacagtcttgcgagtggtggggccctgctggacctgtggctgtggcacagacaccaactttgaggtgaagactcgggatgaatcccgcagtgtgggccgcatcagcaagcagtgggggggcctggtccgagaagccctcacagatgcagatgactttggcctacagttcccgctggacctggatgtgagggtgaaggctgtgctgctgggagccacattcctcattgactacatgttctttgagaagcgaggaggcgctgggccctctgccatcaccagttagaggccaccatggtgtgaggagaccatcacctcgaccagaactccagatggtcacctgccctggcccctcctctgggcagcccctttcctccatgtacactgcaggggacagaaggggggccccatccctaccctactccctggccgcctgcccctgtggttcccaaggaggggtatgtatgagagccgctctcctgctacctcccaccactgtcccagcagtccctcggcacacaggcatatcagctttcacactttccccatgcactctctcccacccccttccagggcctctgctccaaaggaggcctctggaacccaggactctggggttttacaagagggctggggtgtggaagggcaagctgcaccaaagacggtggatatagccaccgcccccccgccgctgcctagcatctgcttggccaattagttcagcctcagaccatggcactttgagggggtctctacctccccatcaacagctgcagggggaccccagtgccaacttcctctcccactagggccctgccttcagctggtgcttgctgcgattcctgtgccttatgtaactgcccttccttcccttgccctaggaaaaaggctgcatctttatatgttacattcatataaactttgtaactttttggacattgaaa

SEQ ID NO: 294809 - DNA, 1793 bp, Homo sapiens
  misc_feature (22)..(22): n is a, c, g, or t
  misc_feature (43)..(43): n is a, c, g, or t
  misc_feature (80)..(80): n is a, c, g, or t
ccgctgtgccagggagagaagnacggcgaggtcgcccctgggnaggcagaaggcgagccaggagccagtcctggaagccnaatgatcagaggcgccgcccaagagaccctgggccggcgccgggcgcagctgcctctccgtctttgtgtctgtctctgtgtctgtctggctatctccgagtttgcctccgcttccagaactaagccacccagacaccatcatcccgaaaaccccagcccttctcccatggcaggctacttgccccccaaaggctacgccccttcgcccccacctccctaccctgtcacccctgggtacccggagccggcgctacatcctgggcccgggcaggcgccagtgcccgcccaggtacctgccccagctcccggcttcgccctcttcccctcgcctggccccgtggccttggggtctgctgcccccttcttgccactgccaggggtgccttctggcctcgaattcctggtgcagattgatcagattttgattcaccagaaggctgagcgagtggaaacgttcctaggctgggagacctgtaatcggtatgaactgcgctctggggccgggcagcccctgggtcaggcggccgaggagagcaactgctgcgcccgtctgtgctgtggcgcccgccggccgcctgcgtgtccgcctggccgaccccggggaccgtgaggtgctgcgtttgctccgcccgctgcactgtggctgcagctgctgcccctgtggcctccaggagatggaagtacaggctccaccaggcaccaccattggccacgtgctacagacctggcatcccttcctccccaagttctccatccaggatgccgatcgccagacagtcttgcgagtggtggggccctgctggacctgtggctgtggcacagacaccaactttgaggtgaagactcgggatgaatcccgcagtgtgggccgcatcagcaagcagtgggggggcctggtccgagaagccctcacagatgcagatgactttggcctacagttcccgctggacctggatgtgagggtgaaggctgtgctgctgggagccacattcctcattgactacatgttctttgagaagcgaggaggcgctgggccctctgccatcaccagttagaggccaccatggtgtgaggagaccatcacctcgaccagaactccagatggtcacctgccctggcccctcctctgggcagcccctttcctccatgtacactgcaggggacagaaggggggccccatccctaccctactccctggccgcctgcccctgtggttcccaaggaggggtatgtatgagagccgctctcctgctacctcccaccactgtcccagcagtccctcggcacacaggcatatcagctttcacactttccccatgcactctctcccacccccttccagggcctctgctccaaaggaggcctctggaacccaggactctggggttttacaagagggctggggtgtggaagggcaagctgcaccaaagacggtggatatagccaccgcccccccgccgctgcctagcatctgcttggccaattagttcagcctcagaccatggcactttgagggggtctctacctccccatcaacagctgcagggggaccccagtgccaacttcctctcccactagggccctgccttcagctggtgcttgctgcgattcctgtgccttatgtaactgcccttccttcccttgccctaggaaaaaggctgcatctttatatgttacattcatataaactttgtaactttttggacattgaaa

SEQ ID NO: 294810 - DNA, 2549 bp, Homo sapiens
  misc_feature (25)..(25): n is a, c, g, or t
  misc_feature (28)..(28): n is a, c, g, or t
  misc_feature (32)..(32): n is a, c, g, or t
gggccagcgcggccggggccccctncgncctncccacccagggcgctgagcacgcacgccgccggcctggcggcgttcgcggggcccgggaccagccgccgccttctccaggcgctcctactctctgggcatctgcagtccgagcggaaggggcgggaacgtcggcgacgccgaggagcaaagcccacgatcggcttcccggggcagcggacggctgccttcctcccggcgcaaacgcaccgcccaggagggggcgggctcggcgggtcggggggcggggccggggtccgagctcgggcccgcctccgcctccgccagctcctgtgagctgccgagtgctaggcacccgggctcttctgggggctccaggtgagcgggggcacagaggggtcagggagaccgcccttggggtggggctgtcggtctgaccgcgggtccatctgtcctgccgtcggcccacagcctcctccgcaggatgggagaacaaagggagggggcggttctggggcccccgagggaatccagggtcccaggtacccggtcccgcccactgacacttgggtttctccccgagttcagaggcgccgcccaagagaccctgggccggcgccgggcgcagctgcctctccgtctttgtgtctgtctctgtgtctgtctggctatctccgagtttgcctccgcttccagaactaagccacccagacaccatcatcccgaaaaccccagcccttctcccatggcaggtaagtgcgcgcaagtctgggggtctccgttatccccccacggacttgggagccgggtttgaacacatcctcccggaatgtgctcggactggctgggtggggcccctcccttccttccggggaacctccaccctgctcccctgccccatctttctctgcctcttgccaccacgtttcccccgaagcctcgcggcccatgggctgaggaataaggggatgaggccttgagtccctttctaatctatcctgctcccaccgctttacaggctacttgccccccaaaggctacgccccttcgcccccacctccctaccctgtcacccctgggtacccggagccggcgctacatcctgggcccgggcaggcgccagtgcccgcccaggtacctgccccagctcccggcttcgccctcttcccctcgcctggccccgtggccttggggtctgctgcccccttcttgccactgccaggggtgccttctggcctcgaattcctggtgcagattgatcagattttgattcaccagaaggctgagcgagtggaaacgttcctaggctgggagacctgtaatcggtatgaactgcgctctggggccgggcagcccctgggtcaggcggccgaggagagcaactgctgcgcccgtctgtgctgtggcgcccgccggccgcctgcgtgtccgcctggccgaccccggggaccgtgaggtgctgcgtttgctccgcccgctgcactgtggctgcagctgctgcccctgtggcctccaggagatggaagtacaggctccaccaggcaccaccattggccacgtgctacagacctggcatcccttcctccccaagttctccatccaggatgccgatcgccagacagtcttgcgagtggtggggccctgctggacctgtggctgtggcacagacaccaactttgaggtgaagactcgggatgaatcccgcagtgtgggccgcatcagcaagcagtgggggggcctggtccgagaagccctcacagatgcagatgactttggcctacagttcccgctggacctggatgtgagggtgaaggctgtgctgctgggagccacattcctcattgactacatgttctttgagaagcgaggaggcgctgggccctctgccatcaccagttagaggccaccatggtgtgaggagaccatcacctcgaccagaactccagatggtcacctgccctggcccctcctctgggcagcccctttcctccatgtacactgcaggggacagaaggggggccccatccctaccctactccctggccgcctgcccctgtggttcccaaggaggggtatgtatgagagccgctctcctgctacctcccaccactgtcccagcagtccctcggcacacaggcatatcagctttcacactttccccatgcactctctcccacccccttccagggcctctgctccaaaggaggcctctggaacccaggactctggggttttacaagagggctggggtgtggaagggcaagctgcaccaaagacggtggatatagccaccgcccccccgccgctgcctagcatctgcttggccaattagttcagcctcagaccatggcactttgagggggtctctacctccccatcaacagctgcagggggaccccagtgccaacttcctctcccactagggccctgccttcagctggtgcttgctgcgattcctgtgccttatgtaactgcccttccttcccttgccctaggaaaaaggctgcatctttatatgttacattcatataaactttgtaactttttggacattgaaa

SEQ ID NO: 294811 - DNA, 2082 bp, Homo sapiens
  misc_feature (21)..(22): n is a, c, g, or t
  misc_feature (24)..(24): n is a, c, g, or t
ggctggtacggtcggagttcnngnatgccgagtgctaggcacccgggctcttctgggggctcagaggcgccgcccaagagaccctgggccggcgccgggcgcagctgcctctccgtctttgtgtctgtctctgtgtctgtctggctatctccgagtttgcctccgcttccagaactaagccacccagacaccatcatcccgaaaaccccagcccttctcccatggcaggctacttgccccccaaaggctacgccccttcgcccccacctccctaccctgtcacccctgggtacccggagccggcgctacatcctgggcccgggcaggcgccagtgcccgcccaggtacctgccccagctcccggcttcgccctcttcccctcgcctggccccgtggccttggggtctgctgcccccttcttgccactgccaggggtgccttctggcctcgaattcctggtgcagattgatcagattttgattcaccagaaggctgagcgagtggaaacgttcctaggctgggagacctgtaatcggtatgaactgcgctctggggccgggcagcccctgggtcaggcggccgaggagagcaactgctgcgcccgtctgtgctgtggcgcccgccggccgcctgcgtgtccgcctggccgaccccggggaccgtgaggtgctgcgtttgctccgcccgctgcactgtggctgcagctgctgcccctgtggcctccaggagatggaagtacaggctccaccaggcaccaccattggccacgtgctacagacctggcatcccttcctccccaagttctccatccaggatgccgatcgccagacagtcttgcgagtggtggggccctgctggacctgtggctgtggcacagacaccaactttgaggtgaagactcgggatgaatcccgcagtgtgggccgcatcagcaagcagtgggggggcctggtccgagaagccctcacagatgcagatgactttggcctacagttcccgctggacctggatgtgagggtgaaggctgtgctgctgggagccacattcctcattgactacatgttctttgagaagcgaggaggcgctgggccctctgccatcaccagttagaggccaccatggtgtgaggagaccatcacctcgaccagaactccagatggtcacctgccctggcccctcctctgggcagcccctttcctccatgtacactgcaggggacagaaggggggccccatccctaccctactccctggccgcctgcccctgtggttcccaaggaggggtatgtatgagagccgctctcctgctacctcccaccactgtcccagcagtccctcggcacacaggcatatcagctttcacactttccccatgcactctctcccacccccttccagggcctctgctccaaaggaggcctctggaacccaggactctggggttttacaagagggctggggtgtggaagggcaagctgcaccaaagacggtggatatagccaccgcccccccgccgctgcctagcatctgcttggccaattagttcagcctcagaccatggcactttgagggggtctctacctccccatcaacagctgcagggggaccccagtgccaacttcctctcccactagggccctgccttcagctggtgcttgctgcgattcctgtgccttatgtaactgcccttccttcccttgccctaggaaaaaggctgcatctttatatgttacattcatataaactttgtaactttttggacattgaaaaaaaaaaaaaaaaaaaattgtgtgggcggccagcgggcatggaaaaaaagttttctaagaccattcgttggggaggccaggcccccaggtagggtaaaggtggaccactgggcacacagcgtggccccaagggaaaacccggggccacggaccatagggtgtggggtttctcccccaatataaaaaacgccccggggcgaaacccgggcgtgttcttggacaaaactcccagatgggagttcggggggcacataacgggctctacacccggagggtccaagcggagccgaaataaaatactggcccagccgggg

SEQ ID NO: 294812 - DNA, 2047 bp, Homo sapiens
  misc_feature (25)..(25): n is a, c, g, or t
  misc_feature (28)..(28): n is a, c, g, or t
  misc_feature (32)..(32): n is a, c, g, or t
gggccagcgcggccggggccccctncgncctncccacccagggcgctgagcacgcacgccgccggcctggcggcgttcgcggggcccgggaccagccgccgccttctccaggcgctcctactctctgggcatctgcagtccgagcggaaggggcgggaacgtcggcgacgccgaggagcaaagcccacgatcggcttcccggggcagcggacggctgccttcctcccggcgcaaacgcaccgcccaggagggggcgggctcggcgggtcggggggcggggccggggtccgagctcgggcccgcctccgcctccgccagctcctgtgagctgccgagtgctaggcacccgggctcttctgggggctccaggtgagcgggggcacagaggggtcagggagaccgcccttggggtggggctgtcggtctgaccgcgggtccatctgtcctgccgtcggcccacagcctcctccgcaggatgggagaacaaagggagggggcggttctggggcccccgagggaatccagggtcccaggtacccggtcccgcccactgacacttgggtttctccccgagttcagaggcgccgcccaagagaccctgggccggcgccgggcgcagctgcctctccgtctttgtgtctgtctctgtgtctgtctggctatctccgagtttgcctccgcttccagaactaagccacccagacaccatcatcccgaaaaccccagcccttctcccatggcagattgatcagattttgattcaccagaaggctgagcgagtggaaacgttcctaggctgggagacctgtaatcggtatgaactgcgctctggggccgggcagcccctgggtcaggcggccgaggagagcaactgctgcgcccgtctgtgctgtggcgcccgccggccgcctgcgtgtccgcctggccgaccccggggaccgtgaggtgctgcgtttgctccgcccgctgcactgtggctgcagctgctgcccctgtggcctccaggagatggaagtacaggctccaccaggcaccaccattggccacgtgctacagacctggcatcccttcctccccaagttctccatccaggatgccgatcgccagacagtcttgcgagtggtggggccctgctggacctgtggctgtggcacagacaccaactttgaggtgaagactcgggatgaatcccgcagtgtgggccgcatcagcaagcagtgggggggcctggtccgagaagccctcacagatgcagatgactttggcctacagttcccgctggacctggatgtgagggtgaaggctgtgctgctgggagccacattcctcattgactacatgttctttgagaagcgaggaggcgctgggccctctgccatcaccagttagaggccaccatggtgtgaggagaccatcacctcgaccagaactccagatggtcacctgccctggcccctcctctgggcagcccctttcctccatgtacactgcaggggacagaaggggggccccatccctaccctactccctggccgcctgcccctgtggttcccaaggaggggtatgtatgagagccgctctcctgctacctcccaccactgtcccagcagtccctcggcacacaggcatatcagctttcacactttccccatgcactctctcccacccccttccagggcctctgctccaaaggaggcctctggaacccaggactctggggttttacaagagggctggggtgtggaagggcaagctgcaccaaagacggtggatatagccaccgcccccccgccgctgcctagcatctgcttggccaattagttcagcctcagaccatggcactttgagggggtctctacctccccatcaacagctgcagggggaccccagtgccaacttcctctcccactagggccctgccttcagctggtgcttgctgcgattcctgtgccttatgtaactgcccttccttcccttgccctaggaaaaaggctgcatctttatatgttacattcatataaactttgtaactttttggacattgaaa

SEQ ID NO: 294813 - DNA, 2112 bp, Homo sapiens
  misc_feature (21)..(22): n is a, c, g, or t
  misc_feature (24)..(24): n is a, c, g, or t
ggctggtacggtcggagttcnngnatgccgagtgctaggcacccgggctcttctgggggctcagaggcgccgcccaagagaccctgggccggcgccgggcgcagctgcctctccgtctttgtgtctgtctctgtgtctgtctggctatctccgagtttgcctccgcttccagaactaagccacccagacaccatcatcccgaaaaccccagcccttctcccatggcaggctacttgccccccaaaggctacgccccttcgcccccacctccctaccctgtcacccctgggtacccggagccggcgctacatcctgggcccgggcaggcgccagtgcccgcccaggtacctgccccagctcccggcttcgccctcttcccctcgcctggccccgtggccttggggtctgctgcccccttcttgccactgccaggggtgccttctggcctcgaattcctggtgcagattgatcagattttgattcaccagaaggctgagcgagtggaaacgttcctaggctgggagacctgtaatcggtatgaactgcgctctggggccgggcagcccctgggtcaggcggccgaggagagcaactgctgcgcccgtctgtgctgtggcgcccgccggccgcctgcgtgtccgcctggccgaccccggggaccgtgaggtgctgcgtttgctccgcccgctgcactgtggctgcagctgctgcccctgtggcctccaggagatggaagtacaggctccaccaggcaccaccattggccacgtgctacagacctggcatcccttcctccccaagttctccatccaggatgccgatcgccagacagtcttgcgagtggtggggccctgctggacctgtggctgtggcacagacaccaactttgaggtgaagactcgggatgaatcccgcagtgtgggccgcatcagcaagcagtgggggggcctggtccgagaagccctcacagatgcagatgactttggcctacagttcccgctggacctggatgtgagggtgaaggctgtgctgctgggagccacattcctcattgactacatgttctttgagaagcgaggaggcgctgggccctctgccatcaccagttagaggccaccatggtgtgaggagaccatcacctcgaccagaactccagatggtcacctgccctggcccctcctctgggcagcccctttcctccatgtacactgcaggggacagaaggggggccccatccctaccctactccctggccgcctgcccctgtggttcccaaggaggggtatgtatgagagccgctctcctgctacctcccaccactgtcccagcagtccctcggcacacaggcatatcagctttcacactttccccatgcactctctcccacccccttccagggcctctgctccaaaggaggcctctggaacccaggactctggggttttacaagagggctggggtgtggaagggcaagctgcaccaaagacggtggatatagccaccgcccccccgccgctgcctagcatctgcttggccaattagttcagcctcagaccatggcactttgagggggtctctacctccccatcaacagctgcagggggaccccagtgccaacttcctctcccactagggccctgccttcagctggtgcttgctgcgattcctgtgccttatgtaactgcccttccttcccttgccctaggaaaaaggctgcatctttatatgttacattcatataaactttgtaactttttggacattgaaagatgtatgtaataggggagggtagaagcagttggtatgggaaaaaacaaaggggaatgtgagagctgggctggggcaggggctagtccatctcataatccatactaccagcatcaaatgtccttgagtgcaagagagcaatcgtcatcacccacgatggccctggaccaaacgaaggcagtttgggcctataccccaagtcaatatggtggcttccatcatccaggatggctgccctgcagagtccagtgtggtagctgatggcagttcaggatggctgttcacatggtccagtgtggccccttgatcctctctagcgcgtagccccacagagagacattcggt

SEQ ID NO: 294814 - DNA, 1825 bp, Homo sapiens
  misc_feature (25)..(25): n is a, c, g, or t
  misc_feature (28)..(28): n is a, c, g, or t
  misc_feature (32)..(32): n is a, c, g, or t
gggccagcgcggccggggccccctncgncctncccacccagggcgctgagcacgcacgccgccggcctggcggcgttcgcggggcccgggaccagccgccgccttctccaggcgctcctactctctgggcatctgcagtccgagcggaaggggcgggaacgtcggcgacgccgaggagcaaagcccacgatcggcttcccggggcagcggacggctgccttcctcccggcgcaaacgcaccgcccaggagggggcgggctcggcgggtcggggggcggggccggggtccgagctcgggcccgcctccgcctccgccagctcctgtgagctgccgagtgctaggcacccgggctcttctgggggctccaggtgagcgggggcacagaggggtcagggagaccgcccttggggtggggctgtcggtctgaccgcgggtccatctgtcctgccgtcggcccacagcctcctccgcaggatgggagaacaaagggagggggcggttctggggcccccgagggaatccagggtcccaggtacccggtcccgcccactgacacttgggtttctccccgagttcagaggcgccgcccaagagaccctgggccggcgccgggcgcagctgcctctccgtctttgtgtctgtctctgtgtctgtctggctatctccgagtttgcctccgcttccagaactaagccacccagacaccatcatcccgaaaaccccagcccttctcccatggcagattgatcagattttgattcaccagaaggctgagcgagtggaaaatggaagtacaggctccaccaggcaccaccattggccacgtgctacagacctggcatcccttcctccccaagttctccatccaggatgccgatcgccagacagtcttgcgagtggtggggccctgctggacctgtggctgtggcacagacaccaactttgaggtgaagactcgggatgaatcccgcagtgtgggccgcatcagcaagcagtgggggggcctggtccgagaagccctcacagatgcagatgactttggcctacagttcccgctggacctggatgtgagggtgaaggctgtgctgctgggagccacattcctcattgactacatgttctttgagaagcgaggaggcgctgggccctctgccatcaccagttagaggccaccatggtgtgaggagaccatcacctcgaccagaactccagatggtcacctgccctggcccctcctctgggcagcccctttcctccatgtacactgcaggggacagaaggggggccccatccctaccctactccctggccgcctgcccctgtggttcccaaggaggggtatgtatgagagccgctctcctgctacctcccaccactgtcccagcagtccctcggcacacaggcatatcagctttcacactttccccatgcactctctcccacccccttccagggcctctgctccaaaggaggcctctggaacccaggactctggggttttacaagagggctggggtgtggaagggcaagctgcaccaaagacggtggatatagccaccgcccccccgccgctgcctagcatctgcttggccaattagttcagcctcagaccatggcactttgagggggtctctacctccccatcaacagctgcagggggaccccagtgccaacttcctctcccactagggccctgccttcagctggtgcttgctgcgattcctgtgccttatgtaactgcccttccttcccttgccctaggaaaaaggctgcatctttatatgttacattcatataaactttgtaactttttggacattgaaa

SEQ ID NO: 294815 - DNA, 2286 bp, Homo sapiens
  misc_feature (21)..(22): n is a, c, g, or t
  misc_feature (24)..(24): n is a, c, g, or t
  misc_feature (2224)..(2224): n is a, c, g, or t
ggctggtacggtcggagttcnngnatgccgagtgctaggcacccgggctcttctgggggctcagaggcgccgcccaagagaccctgggccggcgccgggcgcagctgcctctccgtctttgtgtctgtctctgtgtctgtctggctatctccgagtttgcctccgcttccagaactaagccacccagacaccatcatcccgaaaaccccagcccttctcccatggcaggctacttgccccccaaaggctacgccccttcgcccccacctccctaccctgtcacccctgggtacccggagccggcgctacatcctgggcccgggcaggcgccagtgcccgcccaggtacctgccccagctcccggcttcgccctcttcccctcgcctggccccgtggccttggggtctgctgcccccttcttgccactgccaggggtgccttctggcctcgaattcctggtgcagattgatcagattttgattcaccagaaggctgagcgagtggaaacgttcctaggctgggagacctgtaatcggtatgaactgcgctctggggccgggcagcccctgggtcaggcggccgaggagagcaactgctgcgcccgtctgtgctgtggcgcccgccggccgcctgcgtgtccgcctggccgaccccggggaccgtgaggtgctgcgtttgctccgcccgctgcactgtggctgcagctgctgcccctgtggcctccaggagatggaagtacaggctccaccaggcaccaccattggccacgtgctacagacctggcatcccttcctccccaagttctccatccaggatgccgatcgccagacagtcttgcgagtggtggggccctgctggacctgtggctgtggcacagacaccaactttgaggtgaagactcgggatgaatcccgcagtgtgggccgcatcagcaagcagtgggggggcctggtccgagaagccctcacagatgcagatgactttggcctacagttcccgctggacctggatgtgagggtgaaggctgtgctgctgggagccacattcctcattgactacatgttctttgagaagcgaggaggcgctgggccctctgccatcaccagttagaggccaccatggtgtgaggagaccatcacctcgaccagaactccagatggtcacctgccctggcccctcctctgggcagcccctttcctccatgtacactgcaggggacagaaggggggccccatccctaccctactccctggccgcctgcccctgtggttcccaaggaggggtatgtatgagagccgctctcctgctacctcccaccactgtcccagcagtccctcggcacacaggcatatcagctttcacactttccccatgcactctctcccacccccttccagggcctctgctccaaaggaggcctctggaacccaggactctggggttttacaagagggctggggtgtggaagggcaagctgcaccaaagacggtggatatagccaccgcccccccgccgctgcctagcatctgcttggccaattagttcagcctcagaccatggcactttgagggggtctctacctccccatcaacagctgcagggggaccccagtgccaacttcctctcccactagggccctgccttcagctggtgcttgctgcgattcctgtgccttatgtaactgcccttccttcccttgccctaggaaaaaggctgcatctttatatgttacattcatataaactttgtaactttttggacattgaaagatgtatgtaataggggagggtagaagcagttggtatgggaaaaaacaaaggggaatgtgagagctgggctggggcaggggctagtccatctcataatccatactaccagcatcaaatgtccttgagtgcaagagagcaatcgtcatcacccacgatggccctggaccaaacgaaggcagtttgggcctataccccaagtcaatatggtggcttccatcatccaggatggtgttcacatggtccagtgtggccccttgatcctctctagcgcgtagaagcttcctctgcatatgatgtatagcagctcttttcctccaagtcctcttgtttgagaatgtagtgggcagactagatccttcttggcccagccaaaggagcttcagccttcagaagccaaggagcatgggagggaggagacatttgccagtgcccaacttctgggctcctcctcccantgtgcctacggcaggttgggatctccccaggtggaacgtcttacccctgtcgggaccttgtt

SEQ ID NO: 294816 - DNA, 1743 bp, Homo sapiens
  misc_feature (25)..(25): n is a, c, g, or t
  misc_feature (28)..(28): n is a, c, g, or t
  misc_feature (32)..(32): n is a, c, g, or t
gggccagcgcggccggggccccctncgncctncccacccagggcgctgagcacgcacgccgccggcctggcggcgttcgcggggcccgggaccagccgccgccttctccaggcgctcctactctctgggcatctgcagtccgagcggaaggggcgggaacgtcggcgacgccgaggagcaaagcccacgatcggcttcccggggcagcggacggctgccttcctcccggcgcaaacgcaccgcccaggagggggcgggctcggcgggtcggggggcggggccggggtccgagctcgggcccgcctccgcctccgccagctcctgtgagctgccgagtgctaggcacccgggctcttctgggggctccagtcagaggcgccgcccaagagaccctgggccggcgccgggcgcagctgcctctccgtctttgtgtctgtctctgtgtctgtctggctatctccgagtttgcctccgcttccagaactaagccacccagacaccatcatcccgaaaaccccagcccttctcccatggcaggctacttgccccccaaaggctacgccccttcgcccccacctccctaccctgtcacccctgggtacccgctgcgtgtccgcctggccgaccccggggaccgtgaggtgctgcgtttgctccgcccgctgcactgtggctgcagctgctgcccctgtggcctccaggagatggaagtacaggctccaccaggcaccaccattggccacgtgctacagacctggcatcccttcctccccaagttctccatccaggatgccgatcgccagacagtcttgcgagtggtggggccctgctggacctgtggctgtggcacagacaccaactttgaggtgaagactcgggatgaatcccgcagtgtgggccgcatcagcaagcagtgggggggcctggtccgagaagccctcacagatgcagatgactttggcctacagttcccgctggacctggatgtgagggtgaaggctgtgctgctgggagccacattcctcattgactacatgttctttgagaagcgaggaggcgctgggccctctgccatcaccagttagaggccaccatggtgtgaggagaccatcacctcgaccagaactccagatggtcacctgccctggcccctcctctgggcagcccctttcctccatgtacactgcaggggacagaaggggggccccatccctaccctactccctggccgcctgcccctgtggttcccaaggaggggtatgtatgagagccgctctcctgctacctcccaccactgtcccagcagtccctcggcacacaggcatatcagctttcacactttccccatgcactctctcccacccccttccagggcctctgctccaaaggaggcctctggaacccaggactctggggttttacaagagggctggggtgtggaagggcaagctgcaccaaagacggtggatatagccaccgcccccccgccgctgcctagcatctgcttggccaattagttcagcctcagaccatggcactttgagggggtctctacctccccatcaacagctgcagggggaccccagtgccaacttcctctcccactagggccctgccttcagctggtgcttgctgcgattcctgtgccttatgtaactgcccttccttcccttgccctaggaaaaaggctgcatctttatatgttacattcatataaactttgtaactttttggacattgaaa

SEQ ID NO: 294817 - DNA, 1320 bp, Homo sapiens
  misc_feature (21)..(22): n is a, c, g, or t
  misc_feature (24)..(24): n is a, c, g, or t
ggctggtacggtcggagttcnngnatgccgagtgctaggcacccgggctcttctgggggctcagaggcgccgcccaagagaccctgggccggcgccgggcgcagctgcctctccgtctttgtgtctgtctctgtgtctgtctggctatctccgagtttgcctccgcttccagaactaagccacccagacaccatcatcccgaaaaccccagcccttctcccatggcaggctacttgccccccaaaggctacgccccttcgcccccacctccctaccctgtcacccctgggtacccggagccggcgctacatcctgggcccgggcaggcgccagtgcccgcccaggtacctgccccagctcccggcttcgccctcttcccctcgcctggccccgtggccttggggtctgctgcccccttcttgccactgccaggggtgccttctggcctcgaattcctggtgcagattgatcagattttgattcaccagaaggctgagcgagtggaaacgttcctaggctgggagacctgtaatcggtatgaactgcgctctggggccgggcagcccctgggtcaggcggccgaggagagcaactgctgcgcccgtctgtgctgtggcgcccgccggccgcctgcgtgtccgcctggccgaccccggggaccgtgaggtgctgcgtttgctccgcccgctgcactgtggctgcagctgctgcccctgtggcctccaggagatggaagtacaggctccaccaggcaccaccattggccacgtgctacagacctggcatcccttcctccccaagttctccatccaggatgccgatcgccagacagtcttgcgagtggtggggccctgctggacctgtggctgtggcacagacaccaactttgaggtgaagactcgggatgaatcccgcagtgtgggccgcatcagcaagcagtgggggggcctggtccgagaagccctcacagatgcagatgactttggcctacagttcccgctggacctggatgtgagggtgaaggctgtgctgctgggagccacattcctcattgactacatgttctttgagaagcgaggaggcgctgggccctctgccatcaccagttagaggccaccatggtgtgaggagaccatcacctcgaccagaactccagatggtcacctgccctggcccctcctctgggcagcccctttcctccatgtacactgcaggggacagaaggggggccccatccccttccttcccttgccctaggaaaaaggctgcatctttatatgttacattcatataaactttgtaactttttggacattgaaa

SEQ ID NO: 294818 - DNA, 1624 bp, Homo sapiens
  misc_feature (25)..(25): n is a, c, g, or t
  misc_feature (28)..(28): n is a, c, g, or t
  misc_feature (32)..(32): n is a, c, g, or t
  misc_feature (1562)..(1562): n is a, c, g, or t
gggccagcgcggccggggccccctncgncctncccacccagggcgctgagcacgcacgccgccggcctggcggcgttcgcggggcccgggaccagccgccgccttctccaggcgctcctactctctgggcatctgcagtccgagcggaaggggcgggaacgtcggcgacgccgaggagcaaagcccacgatcggcttcccggggcagcggacggctgccttcctcccggcgcaaacgcaccgcccaggagggggcgggctcggcgggtcggggggcggggccggggtccgagctcgggcccgcctccgcctccgccagctcctgtgagctgccgagtgctaggcacccgggctcttctgggggctccagaactaagccacccagacaccatcatcccgaaaaccccagcccttctcccatggcagattgatcagattttgattcaccagaaggctgagcgagtggaaaatggaagtacaggctccaccaggcaccaccattggccacgtgctacagacctggcatcccttcctccccaagttctccatccaggatgccgatcgccagacagtcttgcgagtggtggggccctgctggacctgtggctgtggcacagacaccaactttgaggtgaagactcgggatgaatcccgcagtgtgggccgcatcagcaagcagtgggggggcctggtccgagaagccctcacagatgcagatgactttggcctacagttcccgctggacctggatgtgagggtgaaggctgtgctgctgggagccacattcctcattgactacatgttctttgagaagcgaggaggcgctgggccctctgccatcaccagttagaggccaccatggtgtgaggagaccatcacctcgaccagaactccagatggtcacctgccctggcccctcctctgggcagcccctttcctccatgtacactgcaggggacagaaggggggccccatccccttccttcccttgccctaggaaaaaggctgcatctttatatgttacattcatataaactttgtaactttttggacattgaaagatgtatgtaataggggagggtagaagcagttggtatgggaaaaaacaaaggggaatgtgagagctgggctggggcaggggctagtccatctcataatccatactaccagcatcaaatgtccttgagtgcaagagagcaatcgtcatcacccacgatggccctggaccaaacgaaggcagtttgggcctataccccaagtcaatatggtggcttccatcatccaggatggctgccctgcagagtccagtgtggtagctgatggcagttcaggatggctgttcacatggtccagtgtggccccttgatcctctctagcgcgtagaagcttcctctgcatatgatgtatagcagctcttttcctccaagtcctcttgtttgagaatgtagtgggcagactagatccttcttggcccagccaaaggagcttcagccttcagaagccaaggagcatgggagggaggagacatttgccagtgcccaacttctgggctcctcctcccantgtgcctacggcaggttgggatctccccaggtggaacgtcttacccctgtcgggaccttgtt

SEQ ID NO: 294819 - DNA, 1013 bp, Homo sapiens
  misc_feature (951)..(951): n is a, c, g, or t
taggatccccaattagcttgcgacaggcatatcagctttcacactttccccatgcactctctcccacccccttccagggcctctgctccaaaggaggcctctggaacccaggactctggggttttacaagagggctggggtgtggaagggcaagctgcaccaaagacggtggatatagccaccgcccccccgccgctgcctagcatctgcttggccaattagttcagcctcagaccatggcactttgagggggtctctacctccccatcaacagctgcagggggaccccagtgccaacttcctctcccactagggccctgccttcagctggtgcttgctgcgattcctgtgccttatgtaactgcccttccttcccttgccctaggaaaaaggctgcatctttatatgttacattcatataaactttgtaactttttggacattgaaagatgtatgtaataggggagggtagaagcagttggtatgggaaaaaacaaaggggaatgtgagagctgggctggggcaggggctagtccatctcataatccatactaccagcatcaaatgtccttgagtgcaagagagcaatcgtcatcacccacgatggccctggaccaaacgaaggcagtttgggcctataccccaagtcaatatggtggcttccatcatccaggatggctgccctgcagagtccagtgtggtagctgatggcagttcaggatggctgttcacatggtccagtgtggccccttgatcctctctagcgcgtagaagcttcctctgcatatgatgtatagcagctcttttcctccaagtcctcttgtttgagaatgtagtgggcagactagatccttcttggcccagccaaaggagcttcagccttcagaagccaaggagcatgggagggaggagacatttgccagtgcccaacttctgggctcctcctcccantgtgcctacggcaggttgggatctccccaggtggaacgtcttacccctgtcgggaccttgtt

SEQ ID NO: 294820 - DNA, 1308 bp, Homo sapiens
  misc_feature (25)..(25): n is a, c, g, or t
  misc_feature (28)..(28): n is a, c, g, or t
  misc_feature (32)..(32): n is a, c, g, or t
  misc_feature (1304)..(1304): n is a, c, g, or t
gggccagcgcggccggggccccctncgncctncccacccagggcgctgagcacgcacgccgccggcctggcggcgttcgcggggcccgggaccagccgccgccttctccaggcgctcctactctctgggcatctgcagtccgagcggaaggggcgggaacgtcggcgacgccgaggagcaaagcccacgatcggcttcccggggcagcggacggctgccttcctcccggcgcaaacgcaccgcccaggagggggcgggctcggcgggtcggggggcggggccggggtccgagctcgggcccgcctccgcctccgccagctcctgtgagctgccgagtgctaggcacccgggctcttctgggggctccagtcagaggcgccgcccaagagaccctgggccggcgccgggcgcagctgcctctccgtctttgtgtctgtctctgtgtctgtctggctatctccgagtttgcctccgcttccagaactaagccacccagacaccatcatcccgaaaaccccagcccttctcccatggcaggctacttgccccccaaaggctacgccccttcgcccccacctccctaccctgtcacccctgggtacccggagccggcgctacatcctgggcccgggcaggcgccagtgcccgcccaggtacctgccccagctcccggcttcgccctcttcccctcgcctggccccgtggccttggggtctgctgcccccttcttgccactgccaggggtgccttctggcctcgaattcctggtgcagattgatcagattttgattcaccagaaggctgagcgagtggaaaatggaagtacaggctccaccaggcaccaccattggccacgtgctacagacctggcatcccttcctccccaagttctccatccaggatgccgatcgccagacagtcttgcgagtggtggggccctgctggacctgtggctgtggcacagacaccaactttgaggtgaagactcgggatgaatcccgcagtgtgggccgcatcagcaagcagtgggggggcctggtccgagaagccctcacagatgcagatgactttggcctacagttcccgctggacctggatgtgagggtgaaggctgtgctgctgggagccacattcctcattgtgagttggctgcccctgcccccacctcctgcctgtcctttgctgtcatttgaagctttatgcatttcctggcctcttgctaggggaaagtcaggaataggtgttgtgggggttgaggttctagagctggcctgtgacagcgcaagctgggctggcccagccgngatc

SEQ ID NO: 294821 - DNA, 1330 bp, Homo sapiens
  misc_feature (25)..(25): n is a, c, g, or t
  misc_feature (28)..(28): n is a, c, g, or t
  misc_feature (32)..(32): n is a, c, g, or t
gggccagcgcggccggggccccctncgncctncccacccagggcgctgagcacgcacgccgccggcctggcggcgttcgcggggcccgggaccagccgccgccttctccaggcgctcctactctctgggcatctgcagtccgagcggaaggggcgggaacgtcggcgacgccgaggagcaaagcccacgatcggcttcccggggcagcggacggctgccttcctcccggcgcaaacgcaccgcccaggagggggcgggctcggcgggtcggggggcggggccggggtccgagctcgggcccgcctccgcctccgccagctcctgtgagctgccgagtgctaggcacccgggctcttctgggggctccaggtgagcgggggcacagaggggtcagggagaccgcccttggggtggggctgtcggtctgaccgcgggtccatctgtcctgccgtcggcccacagcctcctccgcaggatgggagaacaaagggagggggcggttctggggcccccgagggaatccagggtcccaggtacccggtcccgcccactgacacttgggtttctccccgagttcagaggcgccgcccaagagaccctgggccggcgccgggcgcagctgcctctccgtctttgtgtctgtctctgtgtctgtctggctatctccgagtttgcctccgcttccagaactaagccacccagacaccatcatcccgaaaaccccagcccttctcccatggcagattgatcagattttgattcaccagaaggctgagcgagtggaaagtaagtagaaggagtgggaggttggacctcatgatggtggcccggatggtgggctcctgggcgcgcgaggctctacgagtctccccgtgtcacctcgggcagcgttcctaggctgggagacctgtaatcggtatgaactgcgctctggggccgggcagcccctgggtcaggcggccgaggagagcaactgctgcgcccgtctgtgctgtggcgcccgccggccgcctgcgtgtccgcctggccgaccccggggaccgtgaggtgctgcgtttgctccgcccgctgcactgtggctgcagctgctgcccctgtggcctccaggagatggaagtacaggctccaccaggcaccaccattggccacgtgctacagacctggcatcccttcctccccaagttctccatccaggatgccgatcgccagacagtcttgcgagtggtggggccctgctggacctgtggctgtggcacagacaccaactttgaggtgaagactcgggatgaaattccgcaagtgtgggcccgaatcagcaaagcagtgtagg

SEQ ID NO: 294822 - DNA, 626 bp, Homo sapiens
atgtctagggtattctgttggtggtatatttaccccggatccacagaatcgaccaagccccacagctgttgaatcaagaccatcaaagagctccacatagtcatagccacagtctgcttcttcctccacttcaaatgtctggaaggataattcaagtcgagagccccgttctgatactaatagccattcacagtcaacctgtcctgggtagttgttatcaccaaactgagcatcgtcagatatgttttccacaactggagagtcagatagtgtcatgggtgtccacccaggccccagacatggacgacctgggttggaatctcagtcccagtgcctgctggctctgtgactctggcccaggaagagctgcaggggaggacctggagatctggtacaggcagccttttgtgtgtctgcctcacagatacaagttagcaccacaaagaccaggatccagaagaagcaacccttcgccagccacagctgggaataaaaatcaaggaagaactgaagaaattaaacagaagaggaaaaatgagttcatagaggctttatgaatctgaaaatcactggaagttgtctttatggaactttattaaacacttctagaaaaatggcctacattt

SEQ ID NO: 294823 - DNA, 865 bp, Homo sapiens
tcttcaggtactgttgagtacaacgtgcggatatcccaggaaactgtggctgcctgaaacgaacaatgaaaagaaattgagtcctccggcttagaagtgtcgagcagaccagcacactgaacacacaaaaggctccaaaacatgtctcatctcctctaaagaggtgaggaccaaacattctacatatgggaagatgtgagcattaatagaaacgaggtgctccaacaatataaagacacctactgcaccaggacctccccctggcaaagactctgaggtctgtggtctgagtttaccatccaagaaagcccagtgaagagggttgcctgctgcgaggcctgcagacatggtctagggaagagaaatggactgaagagcggcccagcactgccagctctcaccggctccataccacctggctgcccgcatttctccttcagggccagcctcattcctgcacagggcctttgcccatgctcctctgcctctccaaaagtctttttctttcctcattctttagaaatctcaggttttgtataggtgccagctccttttcaaaagctttctaattcatccaacacacatttttcttccctgaatgctgttatttactctctgtagcacacatgaagtctgcagcttacccatagaatattttaggccgaaaggttatgctgctgatgaattcagccggtcattttacctgtgtgttttattgtttataagcaagccacattacatctgctttgggggtaaaatataacaactggaaaataagttttgccatgttccttattactcctttgctatgttccattcattccttttaaagaataaagtgctcgtatctacatatatgctttca

SEQ ID NO: 294824 - DNA, 940 bp, Homo sapiens
tcttcaggtactgttgagtacaacgtgcggatatcccaggaaactgtggctgcctgaaacgaacaatgaaaagaaattgagtcctccggcttagaagtgtcgagcagaccagcacactgaacacacaaaagatctctttaatgtgtctccactgaagcaaaaatgaattgatcgaatacaaagaaaactgtaaacaatcatatttggctccaaaacatgtctcatctcctctaaagaggtgaggaccaaacattctacatatgggaagatgtgagcattaatagaaacgaggtgctccaacaatataaagacacctactgcaccaggacctccccctggcaaagactctgaggtctgtggtctgagtttaccatccaagaaagcccagtgaagagggttgcctgctgcgaggcctgcagacatggtctagggaagagaaatggactgaagagcggcccagcactgccagctctcaccggctccataccacctggctgcccgcatttctccttcagggccagcctcattcctgcacagggcctttgcccatgctcctctgcctctccaaaagtctttttctttcctcattctttagaaatctcaggttttgtataggtgccagctccttttcaaaagctttctaattcatccaacacacatttttcttccctgaatgctgttatttactctctgtagcacacatgaagtctgcagcttacccatagaatattttaggccgaaaggttatgctgctgatgaattcagccggtcattttacctgtgtgttttattgtttataagcaagccacattacatctgctttgggggtaaaatataacaactggaaaataagttttgccatgttccttattactcctttgctatgttccattcattccttttaaagaataaagtgctcgtatctacatatatgctttca

SEQ ID NO: 294825 - DNA, 2644 bp, Homo sapiens
taggagtgaaggaaaggcggggacccggatgtgtgtggtggcggcggccgaagagcttgtgtgcggagctgagaggcctatggatgaggaggacgcggcggccccggtttgttctcatgaacaagatggatgacctcaacctgcactaccggtttctgaattggcgccggcggatccgggagattcgagaggtccgagctttccgatatcaggagaggttcaaacatatccttgtagatggagatactttaagttatcatggaaactctggtgaagttggctgctacgtggcttctcgacccctgaccaaggacagcaattattttgaggtgtctattgtggacagtggagtccggggcaccattgctgtggggctggtccctcagtactacagcttggatcaccagcctggctggttgcctgactctgtagcctaccatgctgatgatggcaagctgtacaatggccgagccaagggccgccagtttgggtcaaagtgcaactccggggaccggattggctgtggcattgagcctgtgtcctttgatgtgcagaccgcccagatcttcttcaccaaaaatgggaagcgggtgggctctaccatcatgcccatgtccccagatggactgttcccagcagtgggcatgcactccctgggtgaggaggtgcggctgcacctcaacgctgagctgggccgtgaggacgacagcgtcatgatggtggacagttacgaggatgaatggggccggctacatgatgtcagagtctgtgggactctgctggagtacttagggaagggcaaaagcatcgtggatgtggggctggcccaggcccggcacccactcagcacccgcagccactacttcgaggtggagatcgtggaccctggagagaaatgctacatcgccctggggctggcacggaaggactatcccaagaacaggcaccctggctggagcagagggtctgtggcttatcatgcagacgatgggaagatcttccatggcagtggtgtgggggacccctttgggccacgctgttacaaaggggacatcatgggctgtggaatcatgttcccccgggactacattttggacagtgagggggacagtgatgacagttgtgacacagtgatcctgtctccgactgcccgggccgtccggaacgtgcggaatgtcatgtacctgcaccaggaaggggaagaggaagaggaggaagaggaagaggaagaggatggggaagagatagagccggagcatgagggcaggaaggtggtggttttcttcactcggaatggcaagatcattgggaagaaggatgctgttgttccttctggaggcttcttccccaccattggaatgctgagctgcggggagaaagtcaaagtagatctgcaccccttgagtggctagggcctcccctccagacctgctccttctccctgctcaccctctgctgggccaggcacccagttcctgacttcccagaggcttcgtttacccagcaggcccctggaggtgtgtagtcactctgcccccactggctcaggcccctgtcacgcttctctgtgcccacgtttctgacctggtgctgccactgttgtcagtccctgggcctgagtccctggttggacaggaatggacccaaagaatggtgttggtatgtgggtggtcccactcgctttggtcagtgggcttctgggtccccctttccctcaccggccctgtgtgggtggagaggcgtgagcaccctatctcagctgctattcgggcatgatgctttgtagagggtagagtagacagccccctcccctactcaccatggtatttctccttgaattcctctttcttgttttctttcctggttgtgtgaaccagttgctgctgtcatacccctggcagggccaggggacctctctttggtcatctctgtcctttcactggctgctgccccaggaagactcctctaggctctccatctttcccttgagagctggctccccaccccaacctgctcaggcaccacagaggatctaggtctctggctccccatacctggacccacatgggtgggtgcctgttgcatgtttaagagagaggggctgtgaggtgacagggcactagggccttcactcctttctccccttccatcctttctttaccagtgccacccatgtccctagctcccgggtattggggctgaggctctggggcctgtctccctgccagcgtgagggcaagaccccagagccttagctgagcaagcccagaggggcagcgtggcccctccctccccttttcctgccccgtcccatgcctcagcttgctgcttgtgccagttgcctgtttcgcttcagtgtttgattctagcacttacatgtgtcctccccaccaagccctctatctccttctaatccttcaacccctggccccctccccgtaacagtgacttttccagggaggaagaggcagcaggagctgttggccttggtttgcacagagcgggtagggctgtagggaaagcgggtgagctgttgtgctgctgggcctccctttggccctcgcttcccaccctacgatgtatgaaatgtatgtacagaccagagatgtttatacagccgataaagatggagtttccgtattta

SEQ ID NO: 294826 - DNA, 2217 bp, Homo sapiens
taggagtgaaggaaaggcggggacccggatgtgtgtggtggcggcggccgaagagcttgtgtgcggagctgagaggcctatggatgaggaggacgcggcggccccggtttgttctcatgaacaagatggatgacctcaacctgcactaccggtttctgaattggcgccggcggatccgggagattcgagaggtccgagctttccgatatcaggagaggttcaaacatatccttgtagatggagatactttaagttatcatggaaactctggtgaagttggctgctacgtggcttctcgacccctgaccaaggacagcaattattttgaggtgtctattgtggacagtggagtccggggcaccattgctgtggggctggtccctcagtactacagcttggatcaccagcctggctggttgcctgactctgtagcctaccatgctgatgatggcaagctgtacaatggccgagccaagggccgccagtttgggtcaaagtgcaactccggggaccggattggctgtggcattgagcctgtgtcctttgatgtgcagaccgcccagatcttcttcaccaaaaatgggaagcgggtgggctctaccatcatgcccatgtccccagatggactgttcccagcagtgggcatgcactccctgggtgaggaggtgcggctgcacctcaacgctgagctgggccgtgaggacgacagcgtcatgatggtggacagttacgaggatgaatggggccggctacatgatgtcagagtctgtgggactctgctggagtacttagggaagggcaaaagcatcgtggatgtggggctggcccaggcccggcacccactcagcacccgcagccactacttcgaggtggagatcgtggaccctggagagaaatgctacatcgccctggggctggcacggaaggactatcccaagaacaggcaccctggctggagcagagggtctgtggcttatcatgcagacgatgggaagatcttccatggcagtggtgtgggggacccctttgggccacgctgttacaaaggggacatcatgggctgtggaatcatgttcccccgggactacattttggacagtgagggggacagtgatgacagttgtgacacagtgatcctgtctccgactgcccgggccgtccggaacgtgcggaatgtcatgtacctgcaccaggaaggggaagaggaagaggaggaagaggaagaggaagaggatggggaagagatagagccggagcatgagggcaggaaggtggtggttttcttcactcggaatggcaagatcattgggaagaaggatgctgttgttccttctggaggcttcttccccaccattggaatgctgagctgcggggagaaagtcaaagtagatctgcaccccttgagtggctagggcctcccctccagacctgctccttctccctgctcaccctctgctgggccaggcacccagttcctgacttcccagaggcttcgtttacccagcaggcccctggaggtgtgtagtcactctgcccccactggctctccatctttcccttgagagctggctccccaccccaacctgctcaggcaccacagaggatctaggtctctggctccccatacctggacccacatgggtgggtgcctgttgcatgtttaagagagaggggctgtgaggtgacagggcactagggccttcactcctttctccccttccatcctttctttaccagtgccacccatgtccctagctcccgggtattggggctgaggctctggggcctgtctccctgccagcgtgagggcaagaccccagagccttagctgagcaagcccagaggggcagcgtggcccctccctccccttttcctgccccgtcccatgcctcagcttgctgcttgtgccagttgcctgtttcgcttcagtgtttgattctagcacttacatgtgtcctccccaccaagccctctatctccttctaatccttcaacccctggccccctccccgtaacagtgacttttccagggaggaagaggcagcaggagctgttggccttggtttgcacagagcgggtagggctgtagggaaagcgggtgagctgttgtgctgctgggcctccctttggccctcgcttcccaccctacgatgtatgaaatgtatgtacagaccagagatgtttatacagccgataaagatggagtttccgtattta

SEQ ID NO: 294827 - DNA, 1091 bp, Homo sapiens
  misc_feature (1)..(2): n is a, c, g, or t
  misc_feature (6)..(6): n is a, c, g, or t
  misc_feature (11)..(11): n is a, c, g, or t
  misc_feature (19)..(19): n is a, c, g, or t
  misc_feature (49)..(49): n is a, c, g, or t
  misc_feature (54)..(54): n is a, c, g, or t
  misc_feature (57)..(57): n is a, c, g, or t
  misc_feature (60)..(60): n is a, c, g, or t
  misc_feature (70)..(70): n is a, c, g, or t
  misc_feature (73)..(73): n is a, c, g, or t
  misc_feature (328)..(328): n is a, c, g, or t
  misc_feature (344)..(344): n is a, c, g, or t
  misc_feature (362)..(362): n is a, c, g, or t
  misc_feature (364)..(364): n is a, c, g, or t
  misc_feature (378)..(378): n is a, c, g, or t
  misc_feature (415)..(415): n is a, c, g, or t
  misc_feature (417)..(417): n is a, c, g, or t
  misc_feature (437)..(437): n is a, c, g, or t
  misc_feature (443)..(443): n is a, c, g, or t
  misc_feature (452)..(452): n is a, c, g, or t
  misc_feature (455)..(455): n is a, c, g, or t
  misc_feature (459)..(459): n is a, c, g, or t
  misc_feature (471)..(471): n is a, c, g, or t
nngccnggcgnggtggcgngtgcctgtagtcccagctactcgggaggcngaggnagnagnatcgcttganccnaggagttctgggctgtagtgcactatgccgatcgggtgtccgcactaagttcggcatcaatatggtgacctcccgggagcgggggaccaccaggagctgactaaggctttggaacagaaaccagatgatacacaatattattgtcaaagagcttattgtcacattcttcttgggaattactgtgttgctgttgctgatgtaaagaagtctcgtgaactcaatccaaataattccactgctgtgctgagaaaaggnatatgtgaataccatnaaaaaaactatgctgctncnctagaaacttttanagaaggacaaaaattagatatagagacggggtttcancntgttggccaggctggtctcnaactcntgacctcangtnatcnacctgccttggnctcccaaagtgctgggattacaggtgcagatgctaatttcagtgtctggattaaaaggtgtcaagaagctcagaatggctcagaatctgaagtgtggactcatcagtcaaaaatcaagtatgactggtatcaaacagaatctcaagtagtcattacaatttgaaactggaacttcttcatcctataataccagaacagagcacgtttaaagtactttcaacaaagattgaaattaaactgaaaaagccagaggctgtgagatgggaaaagctagaggggcaaggagatgtgcctacgccaaaacaattcgtagcagatgtaaagaacctatatccatcatcatctccttatacaagaaattgggataaattggttggtgagatcaaagaagaagaaaagaatgaaaagttggagggagatgcagctttaaacagattatttcagcagatctattcagatggttctgatgaagtgaaacgtgccatgaacaaatcctttatggagtcgggtggtacagttttgagtaccaactggtctgatgtaggtaaaaggaaagttgaaatcaatcctcctgatgatatggaatggaaaaagtactaaataaattaatttgctctcaa

SEQ ID NO: 294828 - DNA, 1058 bp, Homo sapiens
  misc_feature (1054)..(1055): n is a, c, g, or t
tggctgcttaagacggaagctcggttgatgtttctgcagaagttttcccccttggtcggtggcggagctgctgagcgcgatagtagcagctccggcggcagcaacattgactacgaggaatggcggcggctgccgcaggacctgcagcatcccagaggtttttccagagcttctcagatgctctaatcgaccaggacccccaggcggcgttagagtagagacggggtttcaccatgttagccagactagtctcgatctgctgacctcgtgatccacctgccttggcctcccaaagtgctgggattacaggcatgagccaccatgcctggccaaaaacccatctttttctacatagttgctgttgctgatgtaaagaagtctcgtgaactcaatccaaataattccactgctgtgctgagaaaagggtatgcaatagctactctttttgttgagcttggactgtaaataatagatgtttaatttgttgaatgagttcattgtaagctttataagtagtaaaattatttatacatattatagcagagatatgattcaattttaaatataaagttatagttctattattttgttaaccataatatgtgataggagatctatacttaatatattttaaaatagtgatgattgaaataactgcagggtatagatgaaactgatgcatttcacattccttttttgtttatcatttggaatttactctatttaactgactggtgaacatcctattattcaaccaagctgaataggctacatttaatgctatgaaagctctgtatctatgtgctttatatcccatcttgtttctgttgataagtgtaactttattctttaagtaagaaactgctttaattcctttgtataattatattttggaataagcaagtatgtataattaaagtgaaattccttctgaagtaagttctaaaattgaattttactggaaattatactagatgttaacagtattttagaaagtctcttggcttactaacatatgcttaaaataaattttttctttcaacaatagaaaaannaaa

SEQ ID NO: 294829 - DNA, 955 bp, Homo sapiens
tggctgcttaagacggaagctcggttgatgtttctgcagaagttttcccccttggtcggtggcggagctgctgagcgcgatagtagcagctccggcggcagcaacattgactacgaggaatggcggcggctgccgcaggacctgcagcatcccagaggtttttccagagcttctcagatgctctaatcgaccaggacccccaggcggcgttagaggtgggagagccttttctgcttcctccactcccggctgacccgcctccttccagcaccgcctgattaggactcaggctctagtgatgctgcgtctcagccccagtattgagattctcggtctcctttctctctctcacggtagccgcgttacctcagactcctgtcttgccctttccacttccagactcttgcattcctgaagcttctgagaaaaacttcctctatttattgggagcatggttggcatctgcagttgggctgaaaggatttttttttttaatgactagaagagaaaagtggactctgggctcgatgaaaattaattttttcttttgacaatcattgttgccattcttatgtaaaagtgtcggtatgaagtcagtctactggaacaaaaacctcttccctcacgtcccggaaactttccagatgtcttgtcatagttcattattcactcatttgtttatttatcaaaaaattttttaggagttgctgtgtgcaaaggcgctcattgctatgggttagtcttagttatatacttagctaacctagagatcactgcttgtaggtgtgcagtgaagacaaactataaagctgtaaaggaatgtaaaagagcaagagttgataagagttgaagaagagcctaagctaaagataaatgatgctgtgggtcacagaattttaacaggagatcttttttgttttttgttttgtttgtttctttttgctttaaagcacag

SEQ ID NO: 294830 - DNA, 926 bp, Homo sapiens
gttaacttattcatcgactcattatttactgtgttattacctgtagagatataacatacatattatttattttaggtgaaagagcttatgatcctaagcacttccatattagggtcagtagaatcatgattgatgatcattatgtccccactctacagtaagttttatgctaagttgactatcagaagagggctaaatatattgggcttggttttctgaaaatattttaatttaactaaaaatattaaacttgaaatcagtaagatggtggtattctccaaggaagtaaatgagtggatgactcaagatcctgaaaacatcatagtgattcactgtaaaggaggcaaagtcttataaaatctgctttaggagacagaactgggcttgaagccttgtctttcaaagacaaaatccatgcaagaccaagtgttggagcaggcgatggatatgatctaaaagtcaaaatagtgatggagaaaaaggttgtcttttcctgtacttacttaagaaattgttaggtatttcatgacactgaaacagagcaataattgatgtattcaacagtccacctctgtatgatgatgtgaaagtgcaatttttctctttggtgagtaatcaagaaacagcctctgccattgttcttgtctggtcttttgaatgattttatttaagatttgctttactacacttcccaacaagggagatgacagatgtcatcccacagagggagggtgagaaaaacaataaatcagatttataacagatttttttaaaataacatatgtaatttgaataatttttgttcatttgttttttctaaattgtaaattttctaattttttctaaatttacatatattagttatcaaatacaaaaaatacaaaataaacacaaaaaataaaagccaagatgctaaaaaaaccaaa

SEQ ID NO: 294831 - DNA, 852 bp, Homo sapiens
tggctgcttaagacggaagctcggttgatgtttctgcagaagttttcccccttggtcggtggcggagctgctgagcgcgatagtagcagctccggcggcagcaacattgactacgaggaatggcggcggctgccgcaggacctgcagcatcccagaggtgcagattttaatttcagtgactgaattaaaaggtgtcaagaagctcagaatggaagtcgtgcagtttctagacaagaagcatccaaaccactatcaagtctacaatctatgcagtatgtacattactctgtattttgctactgtagatagaaaacagattactgcatgtaagaaggtgattttgttttttatattgcatttaatcataagtgtgtagtggtggtgaggaatgaatttaaaaccccatcttggactggccccatttggatagaaggagttaacccagcagcacaaagtaccctatgaaggaggcagctctggcaggaccaatgatgctagagtggaggcaaaccattttagggaagatctgttctagtgatattaggtttaggaaaatctttctgtttttcctgccagattgggttatgaggacatagataatttaacaaatgagtcctctgatccatcagcagtgggttgtgatgagagcagggccctagatgggaaaaaaagcaaaaaactctgtagaaaataggttgtaacccagcttaccactgtctgtcttgatttttttcctctacctgtatactcaatagacattttcaggggggcaatcattttggtcagctacatttgcctcttgtgtgggttctaactaccctgcaataatataatgaatagtctgctagaaag

SEQ ID NO: 294832 - DNA, 760 bp, Homo sapiens
tggctgcttaagacggaagctcggttgatgtttctgcagaagttttcccccttggtcggtggcggagctgctgagcgcgatagtagcagctccggcggcagcaacattgactacgaggaatggcggcggctgccgcaggacctgcagcatcccagaggtttttccagagcttctcagatgctctaatcgaccaggacccccaggcggcgttagagagctgactaaggctttggaacagaaaccagatgatacacaatattattgtcaaagagcttattgtcacattcttcttgggaattactgtggtagtttttcttataaagtatattgtccctttttaataagttacttatacattttacccatggccaattaatcaaataaaataaaggttgtctttgaggatttttaaattggtctttcatacaaggtaaagtagctcaagtgtgacagacatgttgaacaacacctatttaaattttatggatgtctctttttcctcagtgggtggataatgtatatagatttcattcgtagttattgggtaggctgataaagaattagtatcatatttactatttgacagagtattaaaatgaaatgctcttctttgtattttttttttataaaaaagaatgtggccaggcatggtggctcactcctgtaatcccagcactttgggaggccaaagcaggaggatcatatgaacccaggagttcgagtccagcctggacaacagagcaagaccctatctatacta

SEQ ID NO: 294833 - DNA, 767 bp, Homo sapiens
tggctgcttaagacggaagctcggttgatgtttctgcagaagttttcccccttggtcggtggcggagctgctgagcgcgatagtagcagctccggcggcagcaacattgactacgaggaatggcggcggctgccgcaggacctgcagcatcccagaggaagtcgtgcagtttctagacaagaagcatccaaaccactatcaagtctacaatctatgcatcttataaaatctgctttaggagacagaactgggcttgaagccttgtctttcaaagacaaaatccatgcaagaccaagtgttggagcaggcgatggatatgatctaaaagtcaaaatagtgatggagaaaaaggttgtcttttcctgtacttacttaagaaattgttaggtatttcatgacactgaaacagagcaataattgatgtattcaacagtccacctctgtatgatgatgtgaaagtgcaatttttctctttggctaaggaagcaagaaagtggaggggcgggcagagccagatccagtggtttcactcatgcaagacagaagtcactgtctatcctgtggctggaggggctactttgctcagaagacacaggtctttttaagtcatcaatgtgttgacaacagtcaactcactctctcgcctcaattccgcacgcacacatttacgctatctcctctctctcaactcacgtacctccccacatcaccgtctctccttctctctttttttctcttgctcttcttccatctcctctaccatctcc

SEQ ID NO: 294834 - DNA, 710 bp, Homo sapiens
tggctgcttaagacggaagctcggttgatgtttctgcagaagttttcccccttggtcggtggcggagctgctgagcgcgatagtagcagctccggcggcagcaacattgactacgaggaatggcggcggctgccgcaggacctgcagcatcccagaggtatttcatgacactgaaacagagcaataattgatgtattcaacagtccacctctgtatgatgatgtgaaagtgcaatttttctctttgccggcacttcacgagctccgtggggcagagcaccagtgcagcaaaggcagaggcgaaggaaccggcggctgcattctgcagatcactgaaagcacacaagcagacagttacccctcagtttcttcattcctttggcactcaccacacagacagcactttggtgataaagcagggctaaggaagcaagaaagtggaggggcgggcagagccagatccagtggtttcactcatgcaagacagaagtcactgtctatcctgtggctggaggggctactttgctcagaagacacaggtctttttaagtcatcaatgtgttgacaacagtcaactcactctctcgcctcaattccgcacgcacacatttacgctatctcctctctctcaactcacgtacctccccacatcaccgtctctccttctctctttttttctcttgctcttcttccatctcctctaccatctcc

SEQ ID NO: 294835 - DNA, 857 bp, Homo sapiens
gggagccgccgtggggacaggctgtgtgcaggagctcaccatttccagggtcttggaggggtagttagccattcactttgcccccagctcaccacgcgcagcgccatgaccagcaagggtcccgaggaggagcacccatcggtgacgctcttccgccagtacctgcgtatccgcactgtccagcccaagcctgactatggtgagaagacggtggttccagagcctgtgacggggcctaagggacggggactgtgctctaaaccagcctccaacccctgtcacccagctgagccccactctgctgtcccaaatggctccccaacccctccagccattccccaagtaaatagactgaggcagcccctccaggttagggaggaaccctttccccagagactctgctgctgaccaaggttactcctggcagctggttaaagaaaaacttcacctcactctccagggcaggagtggtgggggaagcctgaggcagccacagggaaaggagaggccctccagaagcccactggggctggacaaaggccacagcccttagggagtcaagcttggtggctagggcctgggaggtggctcctgcctgttatcccagcacttcaggaggttgaggctggcagattgcttgggcccaggagttcaagactagcttgagcaacatggcaagactctgtctctacagaaaaaatacaaaaattagtcaggaatggtggcacacctgtagtcccagctactccagaggttgaggtgggaggatcgcttgagcctgggaggttgaggctgcagtgagccgagatcgcaccacttcactcctgccttggtgacagagtgagaccctgtctcaa

SEQ ID NO: 294836 - DNA, 1660 bp, Homo sapiens
aactcgcggggcggcgctggccgcggcggccgctgcccggggacgggatccggatctaatcctccagtaatctcgctgaggcccgaaccagaggcgggcggggacatccgcgccgacgcggccgctggcgccgggacggccctcactgacggtcttcggtctccgccccgacatccggcctcggccacgtggtgggcggaccggggcggtcctgagcctgcgacctcgcaggcgacctcgctggaccctaagtccaggccacagtcagggaagggcgctgagaggcgagcgtgagcccagcgacaggagagtgagctcaccacgcgcagcgccatgaccagcaagggtcccgaggaggagcacccatcggtgacgctcttccgccagtacctgcgtatccgcactgtccagcccaagcctgactatggagctgctgtggctttctttgaggagacagcccgccagctgggcctgggctgtcagaaagtagaggtggcacctggctatgtggtgaccgtgttgacctggccaggcaccaaccctacactctcctccatcttgctcaactcccacacggatgtggtgcctgtcttcaaggaacattggagtcacgacccctttgaggccttcaaggattctgagggctacatctatgccaggggtgcccaggacatgaagtgcgtcagcatccagtacctggaagctgtgaggaggctgaaggtggagggccaccggttccccagaaccatccacatgacctttgtgcctgatgaggaggttgggggtcaccaaggcatggagctgttcgtgcagcggcctgagttccacgccctgagggcaggctttgccctggatgagggcatagccaatcccactgatgccttcactgtcttttatagtgagcggagtccctggtgggtgcgggttaccagcactgggaggccaggccatgcctcacgcttcatggaggacacagcagcagagaagctgcacaaggttgtaaactccatcctggcattccgggagaaggaatggccagaggctgcagtcaaacccccacctgaaagaggggtccgtgacctccgtgaacctgactaagctagagggtggcgtggcctataacgtgatacctgccaccatgagcgccagctttgacttccgtgtggcaccggatgtggacttcaaggcttttgaggagcagctgcagagctggtgccaggcagctggcgagggggtcaccctagagtttgctcagaagtggatgcacccccaagtgacacctactgatgactcaaacccttggtgggcagcttttagccgggtctgcaaggatatgaacctcactctggagcctgagatcatgcctgctgccactgacaaccgctatatccgcgcggtgggggtcccagctctaggcttctcacccatgaaccgcacacctgtgctgctgcacgaccacgatgaacggctgcatgaggctgtgttcctccgtggggtggacatatatacacgcctgctgcctgcccttgccagtgtgcctgccctgcccagtgacagctgagccctggaactcctaaacctttgcccctggggcttccatcccaaccagtgccaaggacctcctcttcccccttccaaataataaagtctatggacaggg

SEQ ID NO: 294837 - DNA, 1144 bp, Homo sapiens
  misc_feature (970)..(970): n is a, c, g, or t
  misc_feature (1005)..(1005): n is a, c, g, or t
  misc_feature (1024)..(1024): n is a, c, g, or t
  misc_feature (1031)..(1031): n is a, c, g, or t
aactcgcggggcggcgctggccgcggcggccgctgcccggggacgggatccggatctaatcctccagtaatctcgctgaggcccgaaccagaggcgggcggggacatccgcgccgacgcggccgctggcgccgggacggccctcactgacggtcttcggtctccgccccgacatccggcctcggccacgtggtgggcggaccggggcggtcctgagcctgcgacctcgcaggcgacctcgctggaccctaagtccaggccacagtcagggaagggcgctgagaggcgagcgtgagcccagcgacaggagagtgagctcaccacgcgcagcgccatgaccagcaagggtcccgaggaggagcacccatcggtgacgctcttccgccagtacctgcgtatccgcactgtccagcccaagcctgactatggagctgctgtggctttctttgaggagacagcccgccagctgggcctgggctgtcagaaagtagaggtggcacctggctatgtggtgaccgtgttgacctggccaggcaccaaccctacactctcctccatcttgctcaactcccacacggatgtggtgcctgtcttcaaggaacattggagtcacgacccctttgaggccttcaaggattctgagggctacatctatgccaggggtgcccaggacatgaagtgcgtcagcatccagtacctggaagctgtgaggaggctgaaggtggagggccaccggttccccagaaccatccacatgacctttgtgcctgatgaggaggttgggggtcaccaaggcatggagctgttcgtgcagcggcctgagttccacgccctgagggcaggctttgccctggatgagggcatagccaatcccactgatgccttcactgtcttttatagtgagcggagtccctggtgggtgcgggttacaacactgggaggcaggcatgctcacgctcatggaggacacngagcgagaagttggcaaggttgtaactccactggntcggggaggagggaggggnaaacccnctgaaaaggcggaccggaacgctaaaagggggggcgcaacggagagcgcaaggcctactggggcagggaaagatagacacacacgagcgccagaggcgccataggccccaaaa

SEQ ID NO: 294838 - DNA, 917 bp, Homo sapiens
  misc_feature (743)..(743): n is a, c, g, or t
  misc_feature (778)..(778): n is a, c, g, or t
  misc_feature (797)..(797): n is a, c, g, or t
  misc_feature (804)..(804): n is a, c, g, or t
aaaacaaaaatggctaagatagaggccctgcgtttatctcgggaagggcgctgagaggcgagcgtgagcccagcgacaggagagtgagctcaccacgcgcagcgccatgaccagcaagggtcccgaggaggagcacccatcggtgacgctcttccgccagtacctgcgtatccgcactgtccagcccaagcctgactatggagctgctgtggctttctttgaggagacagcccgccagctgggcctgggctgtcagaaagtagaggtggcacctggctatgtggtgaccgtgttgacctggccaggcaccaaccctacactctcctccatcttgctcaactcccacacggatgtggtgcctgtcttcaaggaacattggagtcacgacccctttgaggccttcaaggattctgagggctacatctatgccaggggtgcccaggacatgaagtgcgtcagcatccagtacctggaagctgtgaggaggctgaaggtggagggccaccggttccccagaaccatccacatgacctttgtgcctgatgaggaggttgggggtcaccaaggcatggagctgttcgtgcagcggcctgagttccacgccctgagggcaggctttgccctggatgagggcatagccaatcccactgatgccttcactgtcttttatagtgagcggagtccctggtgggtgcgggttacaacactgggaggcaggcatgctcacgctcatggaggacacngagcgagaagttggcaaggttgtaactccactggntcggggaggagggaggggnaaacccnctgaaaaggcggaccggaacgctaaaagggggggcgcaacggagagcgcaaggcctactggggcagggaaagatagacacacacgagcgccagaggcgccataggccccaaaa

SEQ ID NO: 294839 - DNA, 422 bp, Homo sapiens
cctttgccccttcaattcttcgctttctccctccccattcatcaggctctttctcctacaggaacctcactctggagcctgagatcatgcctgctgccactgacaaccgctatatccgcgcggtgggggtcccagctctaggcttctcacccatgaaccgcacacctgtgctgctgcacgaccacgatgaacggctgcatgaggctgtgttcctccgtggggtggacatatatacacgcctgctgcctgcccttgccagtgtgcctgccctgcccagtgacagctgagccctggaactcctaaacctttgcccctggggcttccatcccaaccagtgccaaggacctcctcttcccccttccaaataataaagtctatggacagggctgtctctgaagtactaacacaaggaaaaaaaaaaa

SEQ ID NO: 294840 - DNA, 881 bp, Homo sapiens
  misc_feature (758)..(758): n is a, c, g, or t
gctaggtaaggcgcgtgttaatcggacgagggaggcgagcgtgagctccagcgacaggagagtgagctcaccacgcgcagcgccatgaccagcaagggtcccgaggaggagcacccatcggtgacgctcttccgccagtacctgcgtatccgcactgtccagcccaagcctgactatggagctgctgtggctttctttgaggagacagcccgccagctgggcctgggctgtcagaaagtagaggtggcacctggctatgtggtgaccgtgttgacctggccaggcaccaaccctacactctcctccatcttgctcaactcccacacggatgtggtgcctgtcttcaaggaacattggagtcacgacccctttgaggccttcaaggattctgagggctacatctatgccaggggtgcccaggacatgaagtgcgtcagcatccagtacctggaagctgtgaggaggctgaaggtggagggccaccggttccccagaaccatccacatgacctttgtgcctgatgaggaggttgggggtcaccaaggcatggagctgttcgtgcagcggcctgagttccacgccctgagggcaggctttgccctggatgagggcatagccaatcccactgatgccttcactgtcttttatagtgagcggagtccctggtgggtgcgggttaccagcactgggaggccaggccatgcctcacgcttcatggaggacacagcagcagagaagctgcacaggttgtaaactcnatcctggcatcgcgggacaaccgaatggcacgaggctgcagtcaacacccagacctgacagaacgggacacagaacctcgggaacccgaactaccacaaaggacggctggcccaaaacgagat

SEQ ID NO: 294841 - DNA, 651 bp, Homo sapiens
aactcgcggggcggcgctggccgcggcggccgctgcccggggacgggatccggatctaatcctccagtaatctcgctgaggcccgaaccagaggcgggcggggacatccgcgccgacgcggccgctggcgccgggacggccctcactgacggtcttcggtctccgccccgacatccggcctcggccacgtggtgggcggaccggggcggtcctgagcctgcgacctcgcaggcgacctcgctggaccctaagtccaggccacagtcagggaagggcgctgagaggcgagcgtgagcccagcgacaggagagtgaggtgggggccctggggagggatagagggactggggctccgtggcttgaaagccgggcaactgggaggcgttggggtttttcttgtttgttttttgtttttgtttttgcctttttttttttttaggagggcggggggagtacaagtctgggttcaaaccttgctcagctactctatgagctgtccttgaacctctctgagcctctcagctttctcctctgtaaagtgggcattctgagcacaaacttcatggggctcttttggggattaaataaggaaatgtgctggaagcagacagcccagcgcctgaaacagaatgggtgctccttaatgggggct

SEQ ID NO: 294842 - DNA, 279 bp, Homo sapiens
ggaggtgttatgtactaggcacagcccactctatgggaaatagggcaagatgcccaggcccatgtgttcctccgtggggtggacatatatacacgcctgctgcctgcccttgccagtgtgcctgccctgcccagtgacagctgagccctggaactcctaaacctttgcccctggggcttccatcccaaccagtgccaaggacctcctcttcccccttccaaataataaagtctatggacagggctgtctctgaagtactaacacaaggaaaaaaaaaaa

SEQ ID NO: 294843 - DNA, 1696 bp, Homo sapiens
aactcgcggggcggcgctggccgcggcggccgctgcccggggacgggatccggatctaatcctccagtaatctcgctgaggcccgaaccagaggcgggcggggacatccgcgccgacgcggccgctggcgccgggacggccctcactgacggtcttcggtctccgccccgacatccggcctcggccacgtggtgggcggaccggggcggtcctgagcctgcgacctcgcaggcgacctcgctggaccctaagtccaggccacagtcagggaagggcgctgagaggcgagcgtgagcccagcgacaggagagtgagctcaccacgcgcagcgccatgaccagcaagggtcccgaggaggagcacccatcggtgacgctcttccgccagtacctgcgtatccgcactgtccagcccaagcctgactatggagctgctgtggctttctttgaggagacagcccgccagctgggcctgggctgtcagaaagtagaggtggcacctggctatgtggtgaccgtgttgacctggccaggcaccaaccctacactctcctccatcttgctcaactcccacacggatgtggtgcctgtcttcaaggaacattggagtcacgacccctttgaggccttcaaggattctgagggctacatctatgccaggggtgcccaggacatgaagtgcgtcagcatccagtacctggaagctgtgaggaggctgaaggtggagggccaccggttccccagaaccatccacatgacctttgtgcctgatgaggaggttgggggtcaccaaggcatggagctgttcgtgcagcggcctgagttccacgccctgagggcaggctttgccctggatgagggcatagccaatcccactgatgccttcactgtcttttatagtgagcggagtccctggtgggtgcgggttaccagcactgggaggccaggccatgcctcacgcttcatggaggacacagcagcagagaagctgcacaaggttgtaaactccatcctggcattccgggagaaggaatggccagaggctgcagtcaaacccccacctgaaagaggggtccgtgacctccgtgaacctgactaagctagagggtggcgtggcctataacgtgatacctgccaccatgagcgccagctttgacttccgtgtggcaccggatgtggacttcaaggcttttgaggagcagctgcagagctggtgccaggcagctggcgagggggtcaccctagagtttgctcagaagtggatgcacccccaagtgacacctactgatgactcaaacccttggtgggcagcttttagccgggtctgcaaggatatgaacctcactctggagcctgagatcatgcctgctgccactgacaaccgctatatccgcgcggtgggggtcccagctctaggcttctcacccatgaaccgcacacctgtgctgctgcacgaccacgatgaacggctgcatgaggctgtgttcctccgtggggtggacatatatacacgcctgctgcctgcccttgccagtgtgcctgccctgcccagtgacagctgagccctggaactcctaaacctttgcccctggggcttccatcccaaccagtgccaaggacctcctcttcccccttccaaataataaagtctatggacagggctgtctctgaagtactaacacaaggaaaaaaaaaaa

SEQ ID NO: 294844 - DNA, 1454 bp, Homo sapiens
ggacgcgtgggtcgacccacgcgatgggaagggcgctgagaggcgagcgtgagcccagcgacaggagagtgagctcaccacgcgcagcgccatgaccagcaagggtcccgaggaggagcacccatcggtgacgctcttccgccagtacctgcgtatccgcactgtccagcccaagcctgactatggagctgctgtggctttctttgaggagacagcccgccagctgggcctgggctgtcagaaagtagaggtggcacctggctatgtggtgaccgtgttgacctggccaggcaccaaccctacactctcctccatcttgctcaactcccacacggatgtggtgcctgtcttcaaggaacattggagtcacgacccctttgaggccttcaaggattctgagggctacatctatgccaggggtgcccaggacatgaagtgcgtcagcatccagtacctggaagctgtgaggaggctgaaggtggagggccaccggttccccagaaccatccacatgacctttgtgcctgatgaggaggttgggggtcaccaaggcatggagctgttcgtgcagcggcctgagttccacgccctgagggcaggctttgccctggatgagggcatagccaatcccactgatgccttcactgtcttttatagtgagcggagtccctggtgggtgcgggttaccagcactgggaggccaggccatgcctcacgcttcatggaggacacagcagcagagaagctgcacaaggttgtaaactccatcctggcattccgggagaaggaatggccagaggctgcagtcaaacccccacctgaaagaggggtccgtgacctccgtgaacctgactaagctagagggtggcgtggcctataacgtgatacctgccaccatgagcgccagctttgacttccgtgtggcaccggatgtggacttcaaggcttttgaggagcagctgcagagctggtgccaggcagctggcgagggggtcaccctagagtttgctcagaagtggatgcacccccaagtgacacctactgatgactcaaacccttggtgggcagcttttagccgggtctgcaaggatatgaacctcactctggagcctgagatcatgcctgctgccactgacaaccgctatatccgcgcggtgggggtcccagctctaggcttctcacccatgaaccgcacacctgtgctgctgcacgaccacgatgaacggctgcatgaggctgtgttcctccgtggggtggacatatatacacgcctgctgcctgcccttgccagtgtgcctgccctgcccagtgacagctgagccctggaactcctaaacctttgcccctggggcttccatcccaaccagtgccaaggacctcctcttcccccttccaaataataaagtctatggacagggctgtctctgaagtactaacacaaggaaaaaaaaaaa

SEQ ID NO: 294845 - DNA, 1455 bp, Homo sapiens
tcggtctaggtacgaggctgggtgtcgggaagggcgctgagaggcgagcgtgagcccagcgacaggagagtgagctcaccacgcgcagcgccatgaccagcaagggtcccgaggaggagcacccatcggtgacgctcttccgccagtacctgcgtatccgcactgtccagcccaagcctgactatggagctgctgtggctttctttgaggagacagcccgccagctgggcctgggctgtcagaaagtagaggtggcacctggctatgtggtgaccgtgttgacctggccaggcaccaaccctacactctcctccatcttgctcaactcccacacggatgtggtgcctgtcttcaaggaacattggagtcacgacccctttgaggccttcaaggattctgagggctacatctatgccaggggtgcccaggacatgaagtgcgtcagcatccagtacctggaagctgtgaggaggctgaaggtggagggccaccggttccccagaaccatccacatgacctttgtgcctgatgaggaggttgggggtcaccaaggcatggagctgttcgtgcagcggcctgagttccacgccctgagggcaggctttgccctggatgagggcatagccaatcccactgatgccttcactgtcttttatagtgagcggagtccctggtgggtgcgggttaccagcactgggaggccaggccatgcctcacgcttcatggaggacacagcagcagagaagctgcacaaggttgtaaactccatcctggcattccgggagaaggaatggccagaggctgcagtcaaacccccacctgaaagaggggtccgtgacctccgtgaacctgactaagctagagggtggcgtggcctataacgtgatacctgccaccatgagcgccagctttgacttccgtgtggcaccggatgtggacttcaaggcttttgaggagcagctgcagagctggtgccaggcagctggcgagggggtcaccctagagtttgctcagaagtggatgcacccccaagtgacacctactgatgactcaaacccttggtgggcagcttttagccgggtctgcaaggatatgaacctcactctggagcctgagatcatgcctgctgccactgacaaccgctatatccgcgcggtgggggtcccagctctaggcttctcacccatgaaccgcacacctgtgctgctgcacgaccacgatgaacggctgcatgaggctgtgttcctccgtggggtggacatatatacacgcctgctgcctgcccttgccagtgtgcctgccctgcccagtgacagctgagccctggaactcctaaacctttgcccctggggcttccatcccaaccagtgccaaggacctcctcttcccccttccaaataataaagtctatggacagggctgtctctgaagtactaacacaaggaaaaaaaaaaa

SEQ ID NO: 294846 - DNA, 1580 bp, Homo sapiens
aactcgcggggcggcgctggccgcggcggccgctgcccggggacgggatccggatctaatcctccagtaatctcgctgaggcccgaaccagaggcgggcggggacatccgcgccgacgcggccgctggcgccgggacggccctcactgacggtcttcggtctccgccccgacatccggcctcggccacgtggtgggcggaccggggcggtcctgagcctgcgacctcgcaggcgacctcgctggaccctaagtccaggccacagtcagggaagggcgctgagaggcgagcgtgagcccagcgacaggagagtgagctcaccacgcgcagcgccatgaccagcaagggtcccgaggaggagcacccatcggtgacgctcttccgccagtacctgcgtatccgcactgtccagcccaagcctgactatggagctgctgtggctttctttgaggagacagcccgccagctgggcctgggctgtcagaaagtagaggtggcacctggctatgtggtgaccgtgttgacctggccaggcaccaaccctacactctcctccatcttgctcaactcccacacggatgtggtgcctgtcttcaaggaacattggagtcacgacccctttgaggccttcaaggattctgagggctacatctatgccaggggtgcccaggacatgaagtgcgtcagcatccagtacctggaagctgtgaggaggctgaaggtggagggccaccggttccccagaaccatccacatgacctttgtgcctgatgaggaggttgggggtcaccaaggcatggagctgttcgtgcagcggcctgagttccacgccctgagggcaggctttgccctggatgagggcatagccaatcccactgatgccttcactgtcttttatagtgagcggagtccctggtgggtgcgggttaccagcactgggaggccaggccatgcctcacgcttcatggaggacacagcagcagagaagctgcacaaggttgtaaactccatcctggcattccgggagaaggaatggccagaggctgcagtcaaacccccacctgaaagaggggtccgtgacctccgtgaacctgactaagctagagggtggcgtggcctataacgtgatacctgccaccatgagcgccagctttgacttccgtgtggcaccggatgtggacttcaaggcttttgaggagcagctgcagagctggtgccaggcagctggcgagggggtcaccctagagtttgctcaggaacctcactctggagcctgagatcatgcctgctgccactgacaaccgctatatccgcgcggtgggggtcccagctctaggcttctcacccatgaaccgcacacctgtgctgctgcacgaccacgatgaacggctgcatgaggctgtgttcctccgtggggtggacatatatacacgcctgctgcctgcccttgccagtgtgcctgccctgcccagtgacagctgagccctggaactcctaaacctttgcccctggggcttccatcccaaccagtgccaaggacctcctcttcccccttccaaataataaagtctatggacaggg

SEQ ID NO: 294847 - DNA, 1508 bp, Homo sapiens
aactcgcggggcggcgctggccgcggcggccgctgcccggggacgggatccggatctaatcctccagtaatctcgctgaggcccgaaccagaggcgggcggggacatccgcgccgacgcggccgctggcgccgggacggccctcactgacggtcttcggtctccgccccgacatccggcctcggccacgtggtgggcggaccggggcggtcctgagcctgcgacctcgcaggcgacctcgctggaccctaagtccaggccacagtcagggaagggcgctgagaggcgagcgtgagcccagcgacaggagagtgagctcaccacgcgcagcgccatgaccagcaagggtcccgaggaggagcacccatcggtgacgctcttccgccagtacctgcgtatccgcactgtccagcccaagcctgactatggagctgctgtggctttctttgaggagacagcccgccagctgggcctgggctgtcagaaagtagaggtggcacctggctatgtggtgaccgtgttgacctggccaggcaccaaccctacactctcctccatcttgctcaactcccacacggatgtggtgcctgtcttcaaggaacattggagtcacgacccctttgaggccttcaaggattctgagggctacatctatgccaggggtgcccaggacatgaagtgcgtcagcatccagtacctggaagctgtgaggaggctgaaggtggagggccaccggttccccagaaccatccacatgacctttgtgcctgatgaggaggttgggggtcaccaaggcatggagctgttcgtgcagcggcctgagttccacgccctgagggcaggctttgccctggatgagggcatagccaatcccactgatgccttcactgtcttttatagtgagcggagtccctggtgggtgcgggttaccagcactgggaggccaggccatgcctcacgcttcatggaggacacagcagcagagaagctgcacaaggttgtaaactccatcctggcattccgggagaaggaatggccagaggctgcagtcaaacccccacctgaaagaggggtccgtgacctccgtgaacctgactaagctagagggtggcgtggcctataacgtgatacctgccaccatgagcgccagctttgacttccgtgtggcaccggatgtggacttcaaggcttttgaggagcagctgcagagctggtgccaggcagctggcgagggggtcaccctagagtttgctcaggtatggacttgggacatgtgatgggagagtgtgggagccgggggagacccaagtgtgcaacagtggagtgtgtgcttggtgtgtctgcatatgtctgggcatttctttatctgtgacagacacattttattccaacaagcattcattgtagaggccactgtgggtgctggggaatgctgtggggagtaaaattaggcacagttcatgcccttgtatggtgaaacggggagatataaatcaaacatttatgtga

SEQ ID NO: 294848 - DNA, 1591 bp, Homo sapiens
aactcgcggggcggcgctggccgcggcggccgctgcccggggacgggatccggatctaatcctccagtaatctcgctgaggcccgaaccagaggcgggcggggacatccgcgccgacgcggccgctggcgccgggacggccctcactgacggtcttcggtctccgccccgacatccggcctcggccacgtggtgggcggaccggggcggtcctgagcctgcgacctcgcaggcgacctcgctggaccctaagtccaggccacagtcagggaagggcgctgagaggcgagcgtgagcccagcgacaggagagtgagctcaccacgcgcagcgccatgaccagcaagggtcccgaggaggagcacccatcggtgacgctcttccgccagtacctgcgtatccgcactgtccagcccaagcctgactatggcaccaaccctacactctcctccatcttgctcaactcccacacggatgtggtgcctgtcttcaaggaacattggagtcacgacccctttgaggccttcaaggattctgagggctacatctatgccaggggtgcccaggacatgaagtgcgtcagcatccagtacctggaagctgtgaggaggctgaaggtggagggccaccggttccccagaaccatccacatgacctttgtgcctgatgaggaggttgggggtcaccaaggcatggagctgttcgtgcagcggcctgagttccacgccctgagggcaggctttgccctggatgagggcatagccaatcccactgatgccttcactgtcttttatagtgagcggagtccctggtgggtgcgggttaccagcactgggaggccaggccatgcctcacgcttcatggaggacacagcagcagagaagctgcacaaggttgtaaactccatcctggcattccgggagaaggaatggccagaggctgcagtcaaacccccacctgaaagaggggtccgtgacctccgtgaacctgactaagctagagggtggcgtggcctataacgtgatacctgccaccatgagcgccagctttgacttccgtgtggcaccggatgtggacttcaaggcttttgaggagcagctgcagagctggtgccaggcagctggcgagggggtcaccctagagtttgctcagaagtggatgcacccccaagtgacacctactgatgactcaaacccttggtgggcagcttttagccgggtctgcaaggatatgaacctcactctggagcctgagatcatgcctgctgccactgacaaccgctatatccgcgcggtgggggtcccagctctaggcttctcacccatgaaccgcacacctgtgctgctgcacgaccacgatgaacggctgcatgaggctgtgttcctccgtggggtggacatatatacacgcctgctgcctgcccttgccagtgtgcctgccctgcccagtgacagctgagccctggaactcctaaacctttgcccctggggcttccatcccaaccagtgccaaggacctcctcttcccccttccaaataataaagtctatggacagggctgtctctgaagtactaacacaaggaaaaaaaaaaa

SEQ ID NO: 294849 - DNA, 1526 bp, Homo sapiens
aactcgcggggcggcgctggccgcggcggccgctgcccggggacgggatccggatctaatcctccagtaatctcgctgaggcccgaaccagaggcgggcggggacatccgcgccgacgcggccgctggcgccgggacggccctcactgacggtcttcggtctccgccccgacatccggcctcggccacgtggtgggcggaccggggcggtcctgagcctgcgacctcgcaggcgacctcgctggaccctaagtccaggccacagtcagggaagggcgctgagaggcgagcgtgagcccagcgacaggagagtgagctcaccacgcgcagcgccatgaccagcaagggtcccgaggaggagcacccatcggtgacgctcttccgccagtacctgcgtatccgcactgtccagcccaagcctgactatggaacattggagtcacgacccctttgaggccttcaaggattctgagggctacatctatgccaggggtgcccaggacatgaagtgcgtcagcatccagtacctggaagctgtgaggaggctgaaggtggagggccaccggttccccagaaccatccacatgacctttgtgcctgatgaggaggttgggggtcaccaaggcatggagctgttcgtgcagcggcctgagttccacgccctgagggcaggctttgccctggatgagggcatagccaatcccactgatgccttcactgtcttttatagtgagcggagtccctggtgggtgcgggttaccagcactgggaggccaggccatgcctcacgcttcatggaggacacagcagcagagaagctgcacaaggttgtaaactccatcctggcattccgggagaaggaatggccagaggctgcagtcaaacccccacctgaaagaggggtccgtgacctccgtgaacctgactaagctagagggtggcgtggcctataacgtgatacctgccaccatgagcgccagctttgacttccgtgtggcaccggatgtggacttcaaggcttttgaggagcagctgcagagctggtgccaggcagctggcgagggggtcaccctagagtttgctcagaagtggatgcacccccaagtgacacctactgatgactcaaacccttggtgggcagcttttagccgggtctgcaaggatatgaacctcactctggagcctgagatcatgcctgctgccactgacaaccgctatatccgcgcggtgggggtcccagctctaggcttctcacccatgaaccgcacacctgtgctgctgcacgaccacgatgaacggctgcatgaggctgtgttcctccgtggggtggacatatatacacgcctgctgcctgcccttgccagtgtgcctgccctgcccagtgacagctgagccctggaactcctaaacctttgcccctggggcttccatcccaaccagtgccaaggacctcctcttcccccttccaaataataaagtctatggacagggctgtctctgaagtactaacacaaggaaaaaaaaaaa

SEQ ID NO: 294850 - DNA, 1609 bp, Homo sapiens
  misc_feature (536)..(536): n is a, c, g, or t
  misc_feature (541)..(541): n is a, c, g, or t
  misc_feature (566)..(566): n is a, c, g, or t
  misc_feature (581)..(581): n is a, c, g, or t
  misc_feature (583)..(583): n is a, c, g, or t
  misc_feature (629)..(629): n is a, c, g, or t
aactcgcggggcggcgctggccgcggcggccgctgcccggggacgggatccggatctaatcctccagtaatctcgctgaggcccgaaccagaggcgggcggggacatccgcgccgacgcggccgctggcgccgggacggccctcactgacggtcttcggtctccgccccgacatccggcctcggccacgtggtgggcggaccggggcggtcctgagcctgcgacctcgcaggcgacctcgctggaccctaagtccaggccacagtcagggaagggcgctgagaggcgagcgtgagcccagcgacaggagagtgagctcaccacgcgcagcgccatgaccagcaagggtcccgaggaggagcacccatcggtgacgctcttccgccagtacctgcgtatccgcactgtccagcccaagcctgactatggtggcacctggctatgtggtgaccgtgttgacctggccaggcaccaaccctacactctcctccatcttgctcaactcccacacggatgtggtgcctgtcttcaagaacntggantcacgaccctttgaggcttcaaggntctgaaggctacatnangccagggtgccagacatgaattcgtcagatccatactggaagtgtnaggagctgaagtggaaggcacggttccccagccatcacatgactttgtgcctgatgaggaggttgggggtcaccaaggcatggagctgttcgtgcagcggcctgagttccacgccctgagggcaggctttgccctggatgagggcatagccaatcccactgatgccttcactgtcttttatagtgagcggagtccctggtgggtgcgggttaccagcactgggaggccaggccatgcctcacgcttcatggaggacacagcagcagagaagctgcacaaggttgtaaactccatcctggcattccgggagaaggaatggccagaggctgcagtcaaacccccacctgaaagaggggtccgtgacctccgtgaacctgactaagctagagggtggcgtggcctataacgtgatacctgccaccatgagcgccagctttgacttccgtgtggcaccggatgtggacttcaaggcttttgaggagcagctgcagagctggtgccaggcagctggcgagggggtcaccctagagtttgctcagaagtggatgcacccccaagtgacacctactgatgactcaaacccttggtgggcagcttttagccgggtctgcaaggatatgaacctcactctggagcctgagatcatgcctgctgccactgacaaccgctatatccgcgcggtgggggtcccagctctaggcttctcacccatgaaccgcacacctgtgctgctgcacgaccacgatgaacggctgcatgaggctgtgttcctccgtggggtggacatatatacacgcctgctgcctgcccttgccagtgtgcctgccctgcccagtgacagctgagccctggaactcctaaacctttgcccctggggcttccatcccaaccagtgccaaggacctcctcttcccccttccaaataataaagtctatggacagggctgtctctgaagtactaacacaaggaaaaaaaaaaa

SEQ ID NO: 294851 - DNA, 1147 bp, Homo sapiens
  misc_feature (601)..(601): n is a, c, g, or t
  misc_feature (606)..(606): n is a, c, g, or t
  misc_feature (631)..(631): n is a, c, g, or t
  misc_feature (646)..(646): n is a, c, g, or t
  misc_feature (648)..(648): n is a, c, g, or t
  misc_feature (694)..(694): n is a, c, g, or t
aactcgcggggcggcgctggccgcggcggccgctgcccggggacgggatccggatctaatcctccagtaatctcgctgaggcccgaaccagaggcgggcggggacatccgcgccgacgcggccgctggcgccgggacggccctcactgacggtcttcggtctccgccccgacatccggcctcggccacgtggtgggcggaccggggcggtcctgagcctgcgacctcgcaggcgacctcgctggaccctaagtccaggccacagtcagggaagggcgctgagaggcgagcgtgagcccagcgacaggagagtgagctcaccacgcgcagcgccatgaccagcaagggtcccgaggaggagcacccatcggtgacgctcttccgccagtacctgcgtatccgcactgtccagcccaagcctgactatggagctgctgtggctttctttgaggagacagcccgccagctgggcctgggctgtcagaaagtagaggtggcacctggctatgtggtgaccgtgttgacctggccaggcaccaaccctacactctcctccatcttgctcaactcccacacggatgtggtgcctgtcttcaagaacntggantcacgaccctttgaggcttcaaggntctgaaggctacatnangccagggtgccagacatgaattcgtcagatccatactggaagtgtnaggagctgaagtggaaggcacggttccccagccatcacatgactttgtgcctgatgaggaggttgggggtcaccaaggcatggagctgttcgtgcagcggcctgagttccacgccctgagggcaggctttgccctggatgagggcatagccaatcccactgatgccttcactgtcttttatagtgagcggagtccctggtgggtgcgggttaccagcactgggaggccaggccatgcgtgttcctccgtggggtggacatatatacacgcctgctgcctgcccttgccagtgtgcctgccctgcccagtgacagctgagccctggaactcctaaacctttgcccctggggcttccatcccaaccagtgccaaggacctcctcttcccccttccaaataataaagtctatggacagggctgtctctgaagtactaacacaaggaaaaaaaaaaa

SEQ ID NO: 294852 - DNA, 970 bp, Homo sapiens
ggaggtgttatgtactaggcacagcccactctatgggaaatagggcaagatgcccaggcccatgtcctgatcctgccattcttcctgtccctcagaagtggatgcacccccaagtgacacctactgatgactcaaacccttggtgggcagcttttagccgggtctgcaaggatatgaacctcactctggagcctgagatcatgcctgctgccactgacaaccgctatatccgcgcggtgggggtcccagctctaggcttctcacccatgaaccgcacacctgtgctgctgcacgaccacgatgaacggctgcatgaggctgtgttcctccgtggggtggacatatatacacgcctgctgcctgcccttgccagtgtgcctgccctgcccagtgacagctgagccctggaactcctaaacctttgcccctggggcttccatcccaaccagtgccaaggacctcctcttcccccttccaaataataaagtctatggacagggaaaaaaaagaaaaaaaaaaaaaaaaaaaaacaaaaaaaaaagaaaaacaaaaaaaaaaaaaaaaaaaacaaagggggggggcgcacaaaagatacacccaagaggagcccaaaaaaagagaaacgcagaattgtaaacaaaaggagaccacaaagaggacggaaaaaaaacacaaacaaaggagaacagaaaaaaaacggagacgagacgagagaagacagcagacaaagagggacactaggaagagagcacacaacaaacccgggaggcggggacacaaccaacagtgagcacaaacaacccacacaaaaaacacaaaaaaaacacccaccaagccgcagacactacacagcgtaaacgaggatcacaacagccggtggagaaaagaaacagcaaataaaagcgtcacgacaacaacgaaaatagtaaccagcgataactaacatcacgaggaatattttcaccagggg

SEQ ID NO: 294853 - DNA, 3968 bp, Homo sapiens
ggcagtgccgtagtagcgggccacggagatagacagctttggagctgctgaactccgagcacagggtgaagaccccggcgctaccaaccacagcctggcagcctggtctccgcggcacccactggggctgcatccccctcccccgagagggctgcgcaggcgggaagacgccagaggccagcttcggtcccccttctgtctctcggttcctctttcctcccaagtaagggaataaaccgcgaagaaggagcgccccgggccaccgcgcaaccaagtgttgcctggtgaggaagagccaggacttctgaatttaccttgaatacagacaggaggatgttgcctaaggaatagcagagatcttgtctcatcttctgagaggtgcctgctgctgctgtatacacttgagtgctcccagaagtctcctgaaaggcttacatcgcaaacctgcaatgagccaggccctgggctgggcctccacttcagcctagtgaacaaaactccatcactgccctttagccactcacataaagtttaaaaatgggtgaagaacggtgggtctccctcactccagaagaatttgaccaactccagaaatattcagaatattcctccaagaagataaaagatgccttgactgaatttaatgagggtgggagcctcaaacaatatgacccacatgagccgattagctatgatgtcttcaagctgttcatgagggcgtacctggaggtggaccttccccagccactgagcactcacctcttcctggccttcagccagaagcccagacacgagacctctgaccacccgacggagggagccagcaacagtgaggccaacagcgcagatactaatatacagaatgcagataatgccaccaaagcagacgaggcctgtgcccctgatactgaatcaaatatggctgagaagcaagcaccagctgaagaccaagtggctgcgacccccctggaaccccccgtccctcggtcttcaagctcggaatccccagtggtgtacctgaaggatgttgtgtgctacctgtccctgctggagacggggaggcctcaggataagctggagttcatgtttcgcctctatgattcagatgagaacggtctcctggaccaagcggagatggattgcattgtcaaccaaatgctgcatattgcccagtacctggagtgggatcccacagagctgaggcctatattgaaggagatgctgcaagggatggactacgaccgggacggctttgtgtctctacaggaatgggtccatggagggatgaccaccatcccattgctggtgctcctggggatggatgactctggctccaagggggatggggggcacgcctggaccatgaagcacttcaagaaaccaacctactgcaacttctgccatatcatgctcatgggcgtccgcaagcaaggcctgtgctgcacttactgtaaatacactgtccacgaacgctgtgtgtccaaaaacattcctggttgtgtcaaaacgtactcaaaagccaaaaggagtggtgaggtgatgcagcacgcatgggtggaagggaactcctccgtcaagtgtgaccggtgccacaaaagtatcaagtgctaccagagtgtcaccgcgcggcactgcgtgtggtgccggatgacgtttcaccgcaaatgtgaattatcaacgttgtgtgacggtggggaactcagagaccacatcttactgcccacctccatatgccccatcacccgggacaggccaggtgagaagtctgatggctgcgtgtccgccaagggcgaacttgtcatgcagtataagatcatccccaccccgggtacccaccccctgctggtcttggtgaaccccaagagtggagggagacaaggagaaagaattcttcggaaattccactatctgctcaaccccaaacaagttttcaacctggacaatggggggcctactccagggttgaactttttccgtgatactccagacttccgtgttttggcctgtggtggagatgggacagttggctggattttggattgcattgataaggccaactttgcaaagcatccaccagtggctgtcctgcctcttggaacaggaaatgaccttgcccgttgtctccgctggggaggaggttatgaagggggcagcttgacaaaaatcctgaaagacattgagcagagccccttggtgatgctggaccgctggcatctggaagtcatccccagagaggaagtggaaaacggggaccaggtcccatacagcatcatgaacaactatttctccattggtgtggacgcttccattgcacacagattccatgtgatgagagagaaacatcctgaaaaattcaacagcaggatgaagaacaagctgtggtactttgaatttggcacctcggagacttttgcagcgacctgcaagaaactccacgaccacattgagttggagtgtgatggggttggggtggacctgagcaacatcttcctggaaggcattgccattctcaacattcccagcatgtacggaggcaccaatctctggggagaaaacaagaagaaccgggctgtgatccgggaaagcaggaagggtgtcactgaccccaaagaactgaaattctgcgttcaagacctcagtgaccagctccttgaagtggtggggctagaaggagccatggagatggggcagatctacaccggcctgaagagtgcaggcaggaggctggcccagtgcgcctctgtcaccatcaggacaaacaagctgctgccaatgcaagtggatggagaaccctggatgcagccatgttgcacgattaaaattactcacaagaaccaagcgcccatgatgatggggcctccccagaagagcagcttcttctcgttgagaaggaagagccgttcaaaagactaaacagtgtgccaaacaccagctaaaccaagagagaaagcaagaaactataatgcacactcacacacaatttatgtgcacactcacacatgcacacacacacacacatacacactcttctctaaccagtggaagcaaagccacccttcgggaagaaaacgtcaccttgccatacattctgtttcaacagtgggtacacccctaacagagccagtgccaacaaaacattttgaatggacttagggcccatgaggttgtggctggcttaggcagcaacctccacattcccacaggccttgagcagaattttctgagactgaagggaaatccccctttctttctaccagccctgcaagtttcctcatggacgctcgcgaggagcaggctgcaggtttcctgcctatggtgagatcagatgtggccaagggaaggagctctggttccagagaatttgcacaaagttccctctgtacagagacaaaacggcctccggctctcagagcataatccttggcagggctcagcaggcgcacgttggtttcttggtcgtcctttgagtgacaacttctccgtgaacctgctgaagaggcagaaaggctgtggaaagctgtatttccattcttgggtttctgcgccgtcggtgggcacttgttattttccaggaaccttctcctggtgtctacatgtttgcttagaggcggctccaagagcccccagagctgcctgcatagcacaccttagatgtggtatttattttcttagttctgtgaacacctgggagggagagcggagaaactgggatttatttttcaaattggtgtcataatattgtgtaaaaagggaaggaaaaaaaaaaccacccccagcttctttctttttcaagccaaagcgtgtttcctgtttgagttccaagccctggtggcagactattcctgaaggcagaaaagatgggaaggaaggaactttgctggggaaaccaggagacggttccctcctgcttctttgcactcaccactcccagagtatgacctgaaggaccttctgatggtcttaacgtg

SEQ ID NO: 294854 - DNA, 807 bp, Homo sapiens
cacgcacgcacacacacagagcaccttgggttgtgacacactgaggacactaacagatggccttttctctccgtcctccagtgtgatggggttggggtggacctgagcaacatcttcctggaaggcattgccattctcaacattcccagcatgtacggaggcaccaatctctggggagaaaacaagaagaaccgggctgtgatccgggaaagcaggaagggtgtcactgaccccaaagaactgaaattctgcgttcaaggtaagccaggaatgaggataattgttttaggtcaatgcccagtagtaggtgccctcaggtggatgtcagcaggcctcgtaaggccccacagcccagcaaggactccatgctctgtggatatgctgactcgtcatccgatgttgcaaagtttacaacttaatccagaagacaaaaattcacaataagggtgtcctcaatgacagtcagttgtcaagctgtggggctccatgaggttcagagtcaaatgctgccaatgtcaaggttaccagggttctccaatagctaaatccaatagtcagttcctaaccctcatcttgccacagctgtcagtggcatgtgacccagctgatcactccctcttcctggaaacgcttggtccacttggcttctaggacttgatttgctcatggttttcctccccgctcactggtcactccttctcggtctcatttctctctgacctcttgatgctggaggatccccaggcagggtccttgaccctcttctcttcactgtctgtacttaagcccttgatcaccccatccagt

SEQ ID NO: 294855 - DNA, 518 bp, Homo sapiens
cattcaaactggagacacttagctacttagcccctccgaaaattcagccagtggaaaaacacctgactgcctgccctcctgcttctcatctgcctctccgaagctgtcttggcttcaactctcatctcacgccccctattggatgaagcagagctaatttctttttcttttacctttcaagtataagatcatccccaccccgggtacccaccccctgctggtcttggtgaaccccaagagtggagggagacaaggagaaagaattcttcggaaattccactatctgctcaaccccaaacaagttttcaacctggacaatggggggcctactccagggttgaactttttccgtgatactccagacttccgtgttttggcctgtggtggagatgggacagttggctggattttggattgcattggtaagcatgggctgagagggcgtttgctgcttatttatagtaagcgtatttacaatcagcagaaggcaataaaaaagaaagagacatggagccatg

SEQ ID NO: 294856 - DNA, 1741 bp, Homo sapiens
gcgtcccttccctccgcactgcactgtcatgaccactcaccaaggatctgctttgtctctttcactttcaggacgcttccattgcacacagattccatgtgatgagagagaaacatcctgaaaaattcaacagcaggatgaagaacaagctgtggtactttgaatttggcacctcggagacttttgcagcgacctgcaagaaactccacgaccacattgagttggagtgtgatggggttggggtggacctgagcaacatcttcctggaaggcattgccattctcaacattcccagcatgtacggaggcaccaatctctggggagaaaacaagaagaaccgggctgtgatccgggaaagcaggaagggtgtcactgaccccaaagaactgaaattctgcgttcaagacctcagtgaccagctccttgaagtggtggggctagaaggagccatggagatggggcagatctacaccggcctgaagagtgcaggcaggaggctggcccagtgcgcctctgtcaccatcaggacaaacaagctgctgccaatgcaagtggatggagaaccctggatgcagccatgttgcacgattaaaattactcacaagaaccaagcgcccatgatgatggggcctccccagaagagcagcttcttctcgttgagaaggaagagccgttcaaaagactaaacagtgtgccaaacaccagctaaaccaagagagaaagcaagaaactataatgcacactcacacacaatttatgtgcacactcacacatgcacacacacacacacatacacactcttctctaaccagtggaagcaaagccacccttcgggaagaaaacgtcaccttgccatacattctgtttcaacagtgggtacacccctaacagagccagtgccaacaaaacattttgaatggacttagggcccatgaggttgtggctggcttaggcagcaacctccacattcccacaggccttgagcagaattttctgagactgaagggaaatccccctttctttctaccagccctgcaagtttcctcatggacgctcgcgaggagcaggctgcaggtttcctgcctatggtgagatcagatgtggccaagggaaggagctctggttccagagaatttgcacaaagttccctctgtacagagacaaaacggcctccggctctcagagcataatccttggcagggctcagcaggcgcacgttggtttcttggtcgtcctttgagtgacaacttctccgtgaacctgctgaagaggcagaaaggctgtggaaagctgtatttccattcttgggtttctgcgccgtcggtgggcacttgttattttccaggaaccttctcctggtgtctacatgtttgcttagaggcggctccaagagcccccagagctgcctgcatagcacaccttagatgtggtatttattttcttagttctgtgaacacctgggagggagagcggagaaactgggatttatttttcaaattggtgtcataatattgtgtaaaaagggaaggaaaaaaaaaaccacccccagcttctttctttttcaagccaaagcgtgtttcctgtttgagttccaagccctggtggcagactattcctgaaggcagaaaagatgggaaggaaggaactttgctggggaaaccaggagacggttccctcctgcttctttgcactcaccactcccagagtatgacctgaaggaccttctgatggtcttaacgtg

SEQ ID NO: 294857 - DNA, 3173 bp, Homo sapiens
ggcagtgccgtagtagcgggccacggagatagacagctttggagctgctgaactccgagcacagggtgaagaccccggcgctaccaaccacagcctggcagcctggtctccgcggcacccactggggctgcatccccctcccccgagagggctgcgcaggcgggaagacgccagaggccagcttcggtcccccttctgtctctcggttcctctttcctcccaagtaagggaataaaccgcgaagaaggagcgccccgggccaccgcgcaaccaagtgttgcctggtgaggaagagccaggacttctgaatttaccttgaatacagacaggaggatgttgcctaaggaatagcagagatcttgtctcatcttctgagaggtgcctgctgctgctgtatacacttgagtgctcccagaagtctcctgaaaggcttacatcgcaaacctgcaatgagccaggccctgggctgggcctccacttcagcctagtgaacaaaactccatcactgccctttagccactcacataaagtttaaaaatgggtgaagaacggtgggtctccctcactccagaagaatttgaccaactccagaaatattcagaatattcctccaagaagataaaagatgccttgactgaatttaatgagggtgggagcctcaaacaatatgacccacatgagccgattagctatgatgtcttcaagctgttcatgagggcgtacctggaggtggaccttccccagccactgagcactcacctcttcctggccttcagccagaagcccagacacgagacctctgaccacccgacggagggagccagcaacagtgaggccaacagcgcagatactaatatacagaatgcagataatgccaccaaagcagacgaggcctgtgcccctgatactgaatcaaatatggctgagaagcaagcaccagctgaagaccaagtggctgcgacccccctggaaccccccgtccctcggtcttcaagctcggaatccccagtggtgtacctgaaggatgttgtgtgctacctgtccctgctggagacggggaggcctcaggataagctggagttcatgtttcgcctctatgattcagatgagaacggtctcctggaccaagcggagatggattgcattgtcaaccaaatgctgcatattgcccagtacctggagtgggatcccacagagctgaggcctatattgaaggagatgctgcaagggatggactacgaccgggacggctttgtgtctctacaggaatgggtccatggagggatgaccaccatcccattgctggtgctcctggggatggatgactctggctccaagggggatggggggcacgcctggaccatgaagcacttcaagaaaccaacctactgcaacttctgccatatcatgctcatgggcgtccgcaagcaaggcctgtgctgcacttactgtaaatacactgtccacgaacgctgtgtgtccaaaaacattcctggttgtgtcaaaacgtactcaaaagccaaaaggagtggtgaggtgatgcagcacgcatgggtggaagggaactcctccgtcaagtgtgaccggtgccacaaaagtatcaagtgctaccagagtgtcaccgcgcggcactgcgtgtggtgccggatgacgtttcaccgcaaatgtgaattatcaacgttgtgtgacggtggggaactcagagaccacatcttactgcccacctccatatgccccatcacccgggacaggccaggtgagaagtctgatggctgcgtgtccgccaagggcgaacttgtcatgcagtataagatcatccccaccccgggtacccaccccctgctggtcttggtgaaccccaagagtggagggagacaaggagaaagaattcttcggaaattccactatctgctcaaccccaaacaagttttcaacctggacaatggggggcctactccagggttgaactttttccgtgatactccagacttccgtgttttggcctgtggtggagatgggacagttggctggattttggattgcattgataaggccaactttgcaaagcatccaccagtggctgtcctgcctcttggaacaggaaatgaccttgcccgttgtctccgctggggaggaggttatgaagggggcagcttgacaaaaatcctgaaagacattgagcagagccccttggtgatgctggaccgctggcatctggaagtcatccccagagaggaagtggaaaacggggaccaggtcccatacagcatcatgaacaactatttctccattggtgtggacgcttccattgcacacagattccatgtgatgagagagaaacatcctgaaaaattcaacagcaggatgaagaacaagctgtggtactttgaatttggcacctcggagacttttgcagcgacctgcaagaaactccacgaccacattgagttggagtgtgatggggttggggtggacctgagcaacatcttcctggaaggcattgccattctcaacattcccagcatgtacggaggcaccaatctctggggagaaaacaagaagaaccgggctgtgatccgggaaagcaggaagggtgtcactgaccccaaagaactgaaattctgcgttcaagacctcagtgaccagctccttgaagtggtggggctagaaggagccatggagatggggcagatctacaccggcctgaagagtgcaggcaggaggctggcccagtgcgcctctgtcaccatcaggacaaacaagctgctgccaatgcaagtggatggagaaccctggatgcagccatgttgcacggtgagtcttgccaatctttgagatggggatgagaagccttatttttgagcccttttgggaactgacttaatatgaaatcactgaatctcagagtcgcagggactgtggaagattatctagtgcaacccctcttccactttattatccatccactcatttacctgggcaactcttaatgaaaacctgctatatgccagacactgtgaagcgccggtcacaaaattgaatgagacatagaaccaacttcgaggagttcacagttctagtcagtgaattctgagacttcatctactgtatcctgggacagcctcagcttgaatcatgtcaatgggcaagggaatttactacctcaaaaggaa

SEQ ID NO: 294858 - DNA, 3127 bp, Homo sapiens
ggcagtgccgtagtagcgggccacggagatagacagctttggagctgctgaactccgagcacagggtgaagaccccggcgctaccaaccacagcctggcagcctggtctccgcggcacccactggggctgcatccccctcccccgagagggctgcgcaggcgggaagacgccagaggccagcttcggtcccccttctgtctctcggttcctctttcctcccaagtaagggaataaaccgcgaagaaggagcgccccgggccaccgcgcaaccaagtgttgcctggtgaggaagagccaggacttctgaatttaccttgaatacagacaggaggatgttgcctaaggaatagcagagatcttgtctcatcttctgagaggtgcctgctgctgctgtatacacttgagtgctcccagaagtctcctgaaaggcttacatcgcaaacctgcaatgagccaggccctgggctgggcctccacttcagcctagtgaacaaaactccatcactgccctttagccactcacataaagtttaaaaatgggtgaagaacggtgggtctccctcactccagaagaatttgaccaactccagaaatattcagaatattcctccaagaagataaaagatgccttgactgaatttaatgagggtgggagcctcaaacaatatgacccacatgagccgattagctatgatgtcttcaagctgttcatgagggcgtacctggaggtggaccttccccagccactgagcactcacctcttcctggccttcagccagaagcccagacacgagacctctgaccacccgacggagggagccagcaacagtgaggccaacagcgcagatactaatatacagaatgcagataatgccaccaaagcagacgaggcctgtgcccctgatactgaatcaaatatggctgagaagcaagcaccagctgaagaccaagtggctgcgacccccctggaaccccccgtccctcggtcttcaagctcggaatccccagtggtgtacctgaaggatgttgtgtgctacctgtccctgctggagacggggaggcctcaggataagctggagttcatgtttcgcctctatgattcagatgagaacggtctcctggaccaagcggagatggattgcattgtcaaccaaatgctgcatattgcccagtacctggagtgggatcccacagagctgaggcctatattgaaggagatgctgcaagggatggactacgaccgggacggctttgtgtctctacaggaatgggtccatggagggatgaccaccatcccattgctggtgctcctggggatggatgactctggctccaagggggatggggggcacgcctggaccatgaagcacttcaagaaaccaacctactgcaacttctgccatatcatgctcatgggcgtccgcaagcaaggcctgtgctgcacttactgtaaatacactgtccacgaacgctgtgtgtccaaaaacattcctggttgtgtcaaaacgtactcaaaagccaaaaggagtggtgaggtgatgcagcacgcatgggtggaagggaactcctccgtcaagtgtgaccggtgccacaaaagtatcaagtgctaccagagtgtcaccgcgcggcactgcgtgtggtgccggatgacgtttcaccgcaaatgtgaattatcaacgttgtgtgacggtggggaactcagagaccacatcttactgcccacctccatatgccccatcacccgggacaggccaggtgagaagtctgatggctgcgtgtccgccaagggcgaacttgtcatgcagtataagatcatccccaccccgggtacccaccccctgctggtcttggtgaaccccaagagtggagggagacaaggagaaagaattcttcggaaattccactatctgctcaaccccaaacaagttttcaacctggacaatggggggcctactccagggttgaactttttccgtgatactccagacttccgtgttttggcctgtggtggagatgggacagttggctggattttggattgcattgataaggccaactttgcaaagcatccaccagtggctgtcctgcctcttggaacaggaaatgaccttgcccgttgtctccgctggggaggaggttatgaagggggcagcttgacaaaaatcctgaaagacattgagcagagccccttggtgatgctggaccgctggcatctggaagtcatccccagagaggaagtggaaaacggggaccaggtcccatacagcatcatgaacaactatttctccattggtgtggacgcttccattgcacacagattccatgtgatgagagagaaacatcctgaaaaattcaacagcaggatgaagaacaagctgtggtactttgaatttggcacctcggagacttttgcagcgacctgcaagaaactccacgaccacattgagttggagtgtgatggggttggggtggacctgagcaacatcttcctggaaggcattgccattctcaacattcccagcatgtacggaggcaccaatctctggggagaaaacaagaagaaccgggctgtgatccgggaaagcaggaagggtgtcactgaccccaaagaactgaaattctgcgttcaagacctcagtgaccagctccttgaagtggtggggctagaaggagccatggagatggggcagatctacaccggcctgaagagtgcaggcaggaggctggcccagtgcgcctctgtcaccatcaggacaaacaagctgctgccaatgcaagtggatggagaaccctggatgcagccatgttgcacgattaaaattactcacaagaaccaagcgcccatgatgatggggcctccccagaagagcagcttcttctcgttgagaaggaagagccgttcaaaagactaaacagtgtgccaaacaccagctaaaccaagagagaaagcaagaaactataatgcacactcacacacaatttatgtgcacactcacacatgcacacacacacacacatacacactcttctctaaccagtggaagcaaagccacccttcgggaagaaaacgtcaccttgccatacattctgtttcaacgagacatcatgcgggccggctgtgttttt

SEQ ID NO: 294859 - DNA, 3180 bp, Homo sapiens
ggcagtgccgtagtagcgggccacggagatagacagctttggagctgctgaactccgagcacagggtgaagaccccggcgctaccaaccacagcctggcagcctggtctccgcggcacccactggggctgcatccccctcccccgagagggctgcgcaggcgggaagacgccagaggccagcttcggtcccccttctgtctctcggttcctctttcctcccaagtaagggaataaaccgcgaagaaggagcgccccgggccaccgcgcaaccaagtgttgcctggtgaggaagagccaggacttctgaatttaccttgaatacagacaggaggatgttgcctaaggaatagcagagatcttgtctcatcttctgagaggtgcctgctgctgctgtatacacttgagtgctcccagaagtctcctgaaaggcttacatcgcaaacctgcaatgagccaggccctgggctgggcctccacttcagcctagtgaacaaaactccatcactgccctttagccactcacataaagtttaaaaatgggtgaagaacggtgggtctccctcactccagaagaatttgaccaactccagaaatattcagaatattcctccaagaagataaaagatgccttgactgaatttaatgagggtgggagcctcaaacaatatgacccacatgagccgattagctatgatgtcttcaagctgttcatgagggcgtacctggaggtggaccttccccagccactgagcactcacctcttcctggccttcagccagaagcccagacacgagacctctgaccacccgacggagggagccagcaacagtgaggccaacagcgcagatactaatatacagaatgcagataatgccaccaaagcagacgaggcctgtgcccctgatactgaatcaaatatggctgagaagcaagcaccagctgaagaccaagtggctgcgacccccctggaaccccccgtccctcggtcttcaagctcggaatccccagtggtgtacctgaaggatgttgtgtgctacctgtccctgctggagacggggaggcctcaggataagctggagttcatgtttcgcctctatgattcagatgagaacggtctcctggaccaagcggagatggattgcattgtcaaccaaatgctgcatattgcccagtacctggagtgggatcccacagagctgaggcctatattgaaggagatgctgcaagggatggactacgaccgggacggctttgtgtctctacaggaatgggtccatggagggatgaccaccatcccattgctggtgctcctggggatggatgactctggctccaagggggatggggggcacgcctggaccatgaagcacttcaagaaaccaacctactgcaacttctgccatatcatgctcatgggcgtccgcaagcaaggcctgtgctgcacttactgtaaatacactgtccacgaacgctgtgtgtccaaaaacattcctggttgtgtcaaaacgtactcaaaagccaaaaggagtggtgaggtgatgcagcacgcatgggtggaagggaactcctccgtcaagtgtgaccggtgccacaaaagtatcaagtgctaccagagtgtcaccgcgcggcactgcgtgtggtgccggatgacgtttcaccgcaaatgtgaattatcaacgttgtgtgacggtggggaactcagagaccacatcttactgcccacctccatatgccccatcacccgggacaggccaggtgagaagtctgatggctgcgtgtccgccaagggcgaacttgtcatgcagtataagatcatccccaccccgggtacccaccccctgctggtcttggtgaaccccaagagtggagggagacaaggagaaagaattcttcggaaattccactatctgctcaaccccaaacaagttttcaacctggacaatggggggcctactccagggttgaactttttccgtgatactccagacttccgtgttttggcctgtggtggagatgggacagttggctggattttggattgcattgataaggccaactttgcaaagcatccaccagtggctgtcctgcctcttggaacaggaaatgaccttgcccgttgtctccgctggggaggaggttatgaagggggcagcttgacaaaaatcctgaaagacattgagcagagccccttggtgatgctggaccgctggcatctggaagtcatccccagagaggaagtggaaaacggggaccaggtcccatacagcatcatgaacaactatttctccattggtgtggacgcttccattgcacacagattccatgtgatgagagagaaacatcctgaaaaattcaacagcaggatgaagaacaagctgtggtactttgaatttggcacctcggagacttttgcagcgacctgcaagaaactccacgaccacattgagttggagtgtgatggggttggggtggacctgagcaacatcttcctggaaggcattgccattctcaacattcccagcatgtacggaggcaccaatctctggggagaaaacaagaagaaccgggctgtgatccgggaaagcaggaagggtgtcactgaccccaaagaactgaaattctgcgttcaaggtaagccaggaatgaggataattgttttaggtcaatgcccagtagtaggtgccctcaggtggatgtcagcaggcctcgtaaggccccacagcccagcaaggactccatgctctgtggatatgctgactcgtcatccgatgttgcaaagtttacaacttaatccagaagacaaaaattcacaataagggtgtcctcaatgacagtcagttgtcaagctgtggggctccatgaggttcagagtcaaatgctgccaatgtcaaggttaccagggttctccaatagctaaatccaatagtcagttcctaaccctcatcttgccacagctgtcagtggcatgtgacccagctgatcactccctcttcctggaaacgcttggtccacttggcttctaggacttgatttgctcatggttttcctccccgctcactggtcactccttctcggtctcatttctctctgacctcttgatgctggaggatccccaggcagggtccttgaccctcttctcttcactgtctgtacttaagcccttgatcaccccatccagt

SEQ ID NO: 294860 - DNA, 312 bp, Homo sapiens
ccatcccctgcaccctgtgcctctcattgtctatcacttccctggccttttcattcctgtccccatcagctcctccatgtcctactgcctccctttccattcctttcacctgccagcttttctattccttttccttctctcttcctctctgtccctttgcttctctccactgactttgcccttttgccccttctcagccgattagctatgatgtcttcaagctgttcatgagggcgtacctggaggtggaccttccccagccactgagcactcacctcttcctggccttcagccagaagcccagacacgaga

SEQ ID NO: 294861 - DNA, 584 bp, Homo sapiens
ataagggaattttgggcccctcgagggcccaagaatttcgggcacgaggggccaaataatttcagtgtggtgtattattaaatagaaaaaaaaaattttgtttcctaggttgaaggtctaattgatacgtttgacttatgatgaccatttatgcactttcaaatgaatttgctttcaaaataaatgaagagcagctgtccttctttcctcttttaagtgttcagctgtggcatgctcagaggttcctgctggattccagctggagcggtgtgatacccttctttttcagctgttcgtgccttcctttcttgtatccaccaaagtggagacaaatacatgatctcaaagatacacagtacctacttaattccagctgatgggagaccaaagaatttgcaagtggatggtttggtatcactgtaaataaaaagagggcctgggaattcttgcgattccatctctaaaaaaaaaaagtctcattttgtgccttacacatctgcagtatttatcatgttccaacttggtgactgtcaggcagtgcaatacatcagcagtttatcaccgaagagctgaggaatacctcc

SEQ ID NO: 294862 - DNA, 1333 bp, Homo sapiens
cgatgaactatctgctttcttaatgtggtctggcttactctcacttgttcttttgctttgcatcccctttgggaactctgtctgcgctaacgtgtatacgccccgatgatctgaatcgtacctctctttgggctttctttgcactaccatagccggagtctatcgtctcttgtgtcaagatatgggcgcaaaaagttttcgataatcgacatacaattattccaaagtttacccgctgggcggatcccggaacaaatgcccggggaattgcggccattagcgggcgcggtgacattttggtatctttcatctgaccatccatatccaatgttctcatttaaacattacccagcatcattgtttataatcagaaactctggtccttctgtctggtggcacttagagtcttttgtgccataatgcagcagtatggagggaggattttatggagaaatggggatagtcttcatgaccacaaataaataaaggaaaactaagctgcattgtgggttttgaaaaggttattatacttcttaacaattctttttttcagggacttttctagctgtatgactgttacttgaccttctttgaaaagcattcccaaaatgctctattttagatagattaacattaaccaacataattttttttagatcgagtcagcataaatttctaagtcagcctctagtcgtggttcatctctttcacctgcattttatttggtgtttgtctgaagaaaggaaagaggaaagcaaatacgaattgtactatttgtaccaaatctttgggattcattggcaaataatttcagtgtggtgtattattaaatagaaaaaaaaaattttgtttcctaggttgaaggtctaattgatacgtttgacttatgatgaccatttatgcactttcaaatgaatttgctttcaaaataaatgaagagcagctgtccttctttcctcttttaagtgttcagctgtggcatgctcagaggttcctgctggattccagctggagcggtgtgatacccttctttttcagctgttcgtgccttcctttcttgtatccaccaaagtggagacaaatacatgatctcaaagatacacagtacctacttaattccagctgatgggagaccaaagaatttgcaagtggatggtttggtatcactgtaaataaaaagagggcctgggaattcttgcgattccatctctaaaaaaaaaaagtctcattttgtgccttacacatctgcagtatttatcatgttccaacttggtgactgtcaggcagtgcaatacatcagcagtttatcaccgaagagctgaggaatacctcc

SEQ ID NO: 294863 - DNA, 1191 bp, Homo sapiens
cgatgaactatctgctttcttaatgtggtctggcttactctcacttgttcttttgctttgcatcccctttgggaactctgtctgcgctaacgtgtatacgccccgatgatctgaatcgtacctctctttgggctttctttgcactaccatagccggagtctatcgtctcttgtgtcaagatatgggcgcaaaaagttttcgataatcgacatacaattattccaaagtttacccgctgggcggatcccggaacaaatgcccggggaattgcggccattagcgggcgcggtgacattttggtatctttcatctgaccatccatatccaatgttctcatttaaacattacccagcatcattgtttataatcagaaactctggtccttctgtctggtggcacttagagtcttttgtgccataatgcagcagtatggagggaggattttatggagaaatggggatagtcttcatgaccacaaataaataaaggaaaactaagctgcattgtgggttttgaaaaggttattatacttcttaacaattctttttttcagggacttttctagctgtatgactgttacttgaccttctttgaaaagcattcccaaaatgctctattttagatagattaacattaaccaacataattttttttagatcgagtcagcataaatttctaagtcagcctctagtcgtggttcatctctttcacctgcattttatttggtgtttgtctgaagaaaggaaagaggaaagcaaatacgaattgtactatttgtaccaaatctttgggattcattggcaaataatttcagtgtggtgtattattaaatagaaaaaaaaaattttgtttcctaggttgaaggtctaattgatacgtttgacttatgatgaccatttatgcactttcaaatgaatttgctttcaaaataaatgaagagcagctgtccttctttcctcttttaagtgttcagctgtggcatgctcagaggttcctgctggattccagctggagcggtgtgatacccttctttttcagctgttcgtgccttcctttcttgtatccaccaaagtggagacaaatacatgatctcaaagatacacagtacctacttaattccagctgatgggagaccaaagaatttgcaagtggatggtttggtatcactgtaaataaaaagagggcctggga

SEQ ID NO: 294864 - DNA, 1185 bp, Homo sapiens
  misc_feature (1150)..(1150): n is a, c, g, or t
cgatgaactatctgctttcttaatgtggtctggcttactctcacttgttcttttgctttgcatcccctttgggaactctgtctgcgctaacgtgtatacgccccgatgatctgaatcgtacctctctttgggctttctttgcactaccatagccggagtctatcgtctcttgtgtcaagatatgggcgcaaaaagttttcgataatcgacatacaattattccaaagtttacccgctgggcggatcccggaacaaatgcccggggaattgcggccattagcgggcgcggtgacattttggtatctttcatctgaccatccatatccaatgttctcatttaaacattacccagcatcattgtttataatcagaaactctggtccttctgtctggtggcacttagagtcttttgtgccataatgcagcagtatggagggaggattttatggagaaatggggatagtcttcatgaccacaaataaataaaggaaaactaagctgcattgtgggttttgaaaaggttattatacttcttaacaattctttttttcagggacttttctagctgtatgactgttacttgaccttctttgaaaagcattcccaaaatgctctattttagatagattaacattaaccaacataattttttttagatcgagtcagcataaatttctaagtcagcctctagtcgtggttcatctctttcacctgcattttatttggtgtttgtctgaagaaaggaaagaggaaagcaaatacgaattgtactatttgtaccaaatctttgggattcattggcaaataatttcagtgtggtgtattattaaatagaaaaaaaaaattttgtttcctaggttgaaggtctaattgatacgtttgacttatgatgaccatttatgcactttcaaatgaatttgctttcaaaataaatgaagagcagctgtccttctttcctcttttaagtgttcagctgtggcatgctcagaggttcctgctggattccagctggagcggtgtgatacccttctttttcagctgttcgtgccttcctttcttgtatccaccaaagtggagacaaatacatgatctcaaagatacacagtacctacttaattccagctgatgggagaccaaagaatttgccatntgcctatgaagtgttactctaggacagctatacca

SEQ ID NO: 294865 - DNA, 1279 bp, Homo sapiens
cgatgaactatctgctttcttaatgtggtctggcttactctcacttgttcttttgctttgcatcccctttgggaactctgtctgcgctaacgtgtatacgccccgatgatctgaatcgtacctctctttgggctttctttgcactaccatagccggagtctatcgtctcttgtgtcaagatatgggcgcaaaaagttttcgataatcgacatacaattattccaaagtttacccgctgggcggatcccggaacaaatgcccggggaattgcggccattagcgggcgcggtgacattttggtatctttcatctgaccatccatatccaatgttctcatttaaacattacccagcatcattgtttataatcagaaactctggtccttctgtctggtggcacttagagtcttttgtgccataatgcagcagtatggagggaggattttatggagaaatggggatagtcttcatgaccacaaataaataaaggaaaactaagctgcattgtgggttttgaaaaggttattatacttcttaacaattctttttttcagggacttttctagctgtatgactgttacttgaccttctttgaaaagcattcccgagtcagcataaatttctaagtcagcctctagtcgtggttcatctctttcacctgcattttatttggtgtttgtctgaagaaaggaaagaggaaagcaaatacgaattgtactatttgtaccaaatctttgggattcattggcaaataatttcagtgtggtgtattattaaatagaaaaaaaaaattttgtttcctaggttgaaggtctaattgatacgtttgacttatgatgaccatttatgcactttcaaatgaatttgctttcaaaataaatgaagagcagctgtccttctttcctcttttaagtgttcagctgtggcatgctcagaggttcctgctggattccagctggagcggtgtgatacccttctttttcagctgttcgtgccttcctttcttgtatccaccaaagtggagacaaatacatgatctcaaagatacacagtacctacttaattccagctgatgggagaccaaagaatttgcaagtggatggtttggtatcactgtaaataaaaagagggcctgggaattcttgcgattccatctctaaaaaaaaaaagtctcattttgtgccttacacatctgcagtatttatcatgttccaacttggtgactgtcaggcagtgcaatacatcagcagtttatcaccgaagagctgaggaatacctcc

SEQ ID NO: 294866 - DNA, 1279 bp, Homo sapiens
cgatgaactatctgctttcttaatgtggtctggcttactctcacttgttcttttgctttgcatcccctttgggaactctgtctgcgctaacgtgtatacgccccgatgatctgaatcgtacctctctttgggctttctttgcactaccatagccggagtctatcgtctcttgtgtcaagatatgggcgcaaaaagttttcgataatcgacatacaattattccaaagtttacccgctgggcggatcccggaacaaatgcccggggaattgcggccattagcgggcgcggtgacattttggtatctttcatctgaccatccatatccaatgttctcatttaaacattacccagcatcattgtttataatcagaaactctggtccttctgtctggtggcacttagagtcttttgtgccataatgcagcagtatggagggaggattttatggagaaatggggatagtcttcatgaccacaaataaataaaggaaaactaagctgcattgtgggttttgaaaaggttattatacttcttaacaattctttttttcagggacttttctagctgtatgactgttacttgaccttctttgaaaagcattcccaaaatgctctattttagatagattaacattaaccaacataattttttttagatcgagtcagcataaatttctaagtcagcctctagtcgtggttcatctctttcacctgcattttatttggtgtttgtctgaagaaaggaaagaggaaagcaaatacgaattgtactatttgtaccaaatctttgggattcattggcaaataatttcagtgtggtgtattattaaatagaaaaaaaaaattttgtttcctaggttgaaggtctaattgatacgtttgacttatgatgaccatttatgcactttcaaatgaatttgctttccatgctcagaggttcctgctggattccagctggagcggtgtgatacccttctttttcagctgttcgtgccttcctttcttgtatccaccaaagtggagacaaatacatgatctcaaagatacacagtacctacttaattccagctgatgggagaccaaagaatttgcaagtggatggtttggtatcactgtaaataaaaagagggcctgggaattcttgcgattccatctctaaaaaaaaaaagtctcattttgtgccttacacatctgcagtatttatcatgttccaacttggtgactgtcaggcagtgcaatacatcagcagtttatcaccgaagagctgaggaatacctcc

SEQ ID NO: 294867 - DNA, 969 bp, Homo sapiens
atcagacctgagacccaggcaccgaggagggtgctgactgtaggtgaatggtagtggagccagactttcactgtattctgtgcaggggacggagccccttgccttcatgccccttgcctgcgtgcccctgagcttgtagagaaaggggccgatgctgtcgctcgcattcaatatagagtaatgcggcattgttctatagagaatgaaaaggttattatacttcttaacaattctttttttcagggacttttctagctgtatgactgttacttgaccttctttgaaaagcattcccgagtcagcataaatttctaagtcagcctctagtcgtggttcatctctttcacctgcattttatttggtgtttgtctgaagaaaggaaagaggaaagcaaatacgaattgtactatttgtaccaaatctttgggattcattggcaaataatttcagtgtggtgtattattaaatagaaaaaaaaaattttgtttcctaggttgaaggtctaattgatacgtttgacttatgatgaccatttatgcactttcaaatgaatttgctttcaaaataaatgaagagcagctgtccttctttcctcttttaagtgttcagctgtggcatgctcagaggttcctgctggattccagctggagcggtgtgatacccttctttttcagctgttcgtgccttcctttcttgtatccaccaaagtggagacaaatacatgatctcaaagatacacagtacctacttaattccagctgatgggagaccaaagaatttgcaagtggatggtttggtatcactgtaaataaaaagagggcctgggaattcttgcgattccatctctaaaaaaaaaaagtctcattttgtgccttacacatctgcagtatttatcatgttccaacttggtgactgtcaggcagtgcaatacatcagcagtttatcaccgaagagctgaggaatacctcc

SEQ ID NO: 294868 - DNA, 1278 bp, Homo sapiens
cgatgaactatctgctttcttaatgtggtctggcttactctcacttgttcttttgctttgcatcccctttgggaactctgtctgcgctaacgtgtatacgccccgatgatctgaatcgtacctctctttgggctttctttgcactaccatagccggagtctatcgtctcttgtgtcaagatatgggcgcaaaaagttttcgataatcgacatacaattattccaaagtttacccgctgggcggatcccggaacaaatgcccggggaattgcggccattagcgggcgcggtgacattttggtatctttcatctgaccatccatatccaatgttctcatttaaacattacccagcatcattgtttataatcagaaactctggtccttctgtctggtggcacttagagtcttttgtgccataatgcagcagtatggagggaggattttatggagaaatggggatagtcttcatgaccacaaataaataaaggaaaactaagctgcattgtgggttttgaaaaggttattatacttcttaacaattctttttttcagggacttttctagctgtatgactgttacttgaccttctttgaaaagcattcccaaaatgctctattttagatagattaacattaaccaacataattttttttagatcgagtcagcataaatttctaagtcagcctctagtcgtggttcatctctttcacctgcattttatttggtgtttgtctgaagaaaggaaagaggaaagcaaatacgaattgtactatttgtaccaaatctttgggattcattggcaaataatttcagtgtggtgtattattaaatagaaaaacatttatgcactttcaaatgaatttgctttcaaaataaatgaagagcagctgtccttctttcctcttttaagtgttcagctgtggcatgctcagaggttcctgctggattccagctggagcggtgtgatacccttctttttcagctgttcgtgccttcctttcttgtatccaccaaagtggagacaaatacatgatctcaaagatacacagtacctacttaattccagctgatgggagaccaaagaatttgcaagtggatggtttggtatcactgtaaataaaaagagggcctgggaattcttgcgattccatctctaaaaaaaaaaagtctcattttgtgccttacacatctgcagtatttatcatgttccaacttggtgactgtcaggcagtgcaatacatcagcagtttatcaccgaagagctgaggaatacctcc

SEQ ID NO: 294869 - DNA, 1020 bp, Homo sapiens
cgatgaactatctgctttcttaatgtggtctggcttactctcacttgttcttttgctttgcatcccctttgggaactctgtctgcgctaacgtgtatacgccccgatgatctgaatcgtacctctctttgggctttctttgcactaccatagccggagtctatcgtctcttgtgtcaagatatgggcgcaaaaagttttcgataatcgacatacaattattccaaagtttacccgctgggcggatcccggaacaaatgcccggggaattgcggccattagcgggcgcggtgacattttggtatctttcatctgaccatccatatccaatgttctcatttaaacattacccagcatcattgtttataatcagaaactctggtccttctgtctggtggcacttagagtcttttgtgccataatgcagcagtatggagggaggattttatggagaaatggggatagtcttcatgaccacaaataaataaaggaaaactaagctgcattgtgggttttgaaaaggttattatacttcttaacaattctttttttcagggacttttctagctgtatgactgttacttgaccttctttgaaaagcattcccaaaatgctctattttagatagattaacattaaccaacataattttttttagatcgagtcagcataaatttctaagtcagcctctagtcgtggttcatctctttcacctgcattttatttggtgtttgtctgaagaaaggaaagaggaaagcaaatacgaattgtactatttgtaccaaatctttgggattcattggcaaataatttcagtgtggtgtattattaaatagaaaaagacaaatacaactccgagcctggggcccggtacctcaatttcgccccttatagggaggcggatattcacaatcaactgggccgtcgcgttttaccaacgtccgggatctgggatacaccttggcgggtaccccaacttaatgcgcctttgaagcactattcccttttctgcaggctgccgg

SEQ ID NO: 294870 - DNA, 523 bp, Homo sapiens
cgtacccatctgctcccatcagagaaaaaaaaaattttgtttcctaggttgaaggtctaattgatacgtttgacttatgatgaccatttatgcactttcaaatgaatttgctttcaaaataaatgaagagcagctgtccttctttcctcttttaagtgttcagctgtggcatgctcagaggttcctgctggattccagctggagcggtgtgatacccttctttttcagctgttcgtgccttcctttcttgtatccaccaaagtggagacaaatacatgatctcaaagatacacagtacctacttaattccagctgatgggagaccaaagaatttgcaagtggatggtttggtatcactgtaaataaaaagagggcctgggaattcttgcgattccatctctaaaaaaaaaaagtctcattttgtgccttacacatctgcagtatttatcatgttccaacttggtgactgtcaggcagtgcaatacatcagcagtttatcaccgaagagctgaggaatacctcc

SEQ ID NO: 294871 - DNA, 3619 bp, Homo sapiens
cgctgtcaggatgaggaggcggaggtcggcggtcgggtccgtctctgcccgcggctgtggcggcgccggcggatccagccttagcggtttctctctgggcggcggcggcggcggctcggttgacgcctcctccgccagctgagcccgcgggagcccaggacgccgcttccccgcccatccccgctccccgaggccggccgcctggtcatggcgcagccgggcccggcttcccagcctgacgtttctcttcagcaacgggtagcagaattggaaaaaattaatgcagaatttttacgtgcacaacagcagcttgaacaagaatttaatcaaaagagagcaaaatttaaggagttatatttggctaaagaggaggatctgaagaggcaaaatgcagtattacaagctgcacaagatgatttgggacaccttcgaacccagctgtgggaagctcaagcagagatggagaatattaaggcgattgccacagtctctgagaacaccaagcaagaagctatagatgaagtgaaaagacagtggagagaagaagttgcttcacttcaggctgttatgaaagaaacagttcgtgactatgagcaccagttccaccttaggctggagcaggagcgaacacagtgggcacagtatagagaatccgcagagagggaaatagctgatttaagaagaaggctgtctgaaggtcaagaggaggaaaatttagaaaatgaaatgaaaaaggcccaagaggatgctgagaaacttcggtccgttgtgatgccaatggaaaaaggaaattgcagctttgaaggataaactgacagaggctgaagacaaaattaaagagctggaggcctcaaaggttaaagaactgaatcattatctggaagctgagaaatcttgtaggactgatctagagatgtatgtagctgttttgaatactcagaaatctgttctacaggaagatgctgagaaactgcggaaagaattgcatgaagtttgccatctcttggagcaagagcgacaacaacacaaccagttaaaacatacgtggcagaaggccaatgaccagtttctggaatctcagcgtttactgatgagagacatgcagcgaatggagattgtgctaacttcagaacagctccgacaagttgaagaactgaagaagaaagatcaggaggatgatgaacaacaaagactcaataagagaaaggatcacaaaaaagcagatgttgaggaagaaataaaaataccagtagtgtgtgctttaactcaagaagaatcttcagcccagttatcaaatgaagaggagcatttagacagcacccgtggctcagttcattccttagatgcaggcttgctgttgccatctggagatcctttcagtaaatcggacaatgacatgtttaaagatggactcaggagagcacagtctacagacagcttgggaacctcgggctcattgcaatccaaagctttaggctataactacaaagcaaaatctgctggaaacctggacgagtcagattttggaccactggtaggagcagattcagtgtctgagaactttgatactgcatcccttgggtcactccagatgccaagtgggtttatgttaaccaaagatcaggaaagagcaatcaaggcgatgacaccagaacaagaagagacagcgtccctcctctccagcgttacccagggcatggagagtgcctatgtgtcccctagtggttatcgtttagttagtgaaacagaatggaatctcttgcagaaagaggtacataatgctggaaataaacttggtagacgttgtgatatgtgttccaattacgaaaaacagttacaaggaattcagattcaggaggctgaaacgagagaccaggtgaaaaaactacagctgatgctaaggcaagctaatgaccagttagagaagacaatgaaagataagcaggagctggaagacttcataaagcaaagcagcgaagattcgagtcaccagatctctgcactcgtcctaagagcccaggcctccgagatcttacttgaagagttacagcaggggctttcccaggcaaagagggatgttcaggaacagatggcggtgctgatgcagtcacgggaacaggtttcagaagagctggtgaggttacagaaagataatgacagtctccagggaaagcacagcctgcatgtgtcattacagcaagcagaagacttcatcctcccagacactacagaggcactgcgggagttggtattaaaataccgtgaggacatcattaatgtgcggacagcagcagaccacgtagaagaaaagctgaaggctgagatacttttcctaaaagagcagatccaagcagaacagtgtttaaaagaaaatcttgaagaaactctgcaactagaaatagaaaactgcaaggaggaaatagcttctatttctagcctaaaagctgaattagaaagaataaaagtggaaaaaggacagttggagtccacattaagagagaagtctcaacagcttgagagtcttcaggaaataaagatcagtttggaagagcagttaaagaaagagactgctgctaaggctaccgttgaacaactaatgtttgaagagaagaataaagctcagagattacagacagaattagatgtcagtgagcaagtccagagggattttgtaaagctttcacagacccttcaggtgcagttagagcggatccggcaagctgactccttggagagaatccgggcaattctgaatgatactaaactgacagacattaaccagcttcctgagacatgacaccctcatggcaggattctagcctgcactttgggtttttaactcatctttagagcaacagtaattattatttaactcttaactgaagaaagagaagtcacaacaaaaggaagactggagaaatgcttacttctagagggagaagactgtgcggcacaggaaacagcaaacagtggggtgatctgcagcccagagaccttcaaatgcgaacactataaactccaggcttgattccaacaggcgtgggatcagatttggtgatggaaaaagcgctgtttccttgcctgctttctccaagacagattttcggaacacatttccctaccctaaagcgacatcccagtagtgtttggaattttctgttcatagatattggaagagagaatttgctttatctgttgtctagagctcatcagtaacagtattcagttagcagacagaagtgtagtatgctgtatgaatattttatattaaaatatgaaggtttgagagcaggcaaaaaaaatactgactgtattttgttttccttttaccattttatcttatcttgctttggaggaccttaaatgctactgaaacttacctgagaaccataggactgtggcaaacaaaaccaattcatgaagtgaattaatgatgaggatctgaaaacttggctggggctatatatactggaagttgaaggttaaaggaaaagcacaagaaactttggaagcactttttctgcatacttagatgatcttcatgggcccacagggtaccaggataaagccgaactggtaccatctactcttttgaagtgttttagtctagttattggat

SEQ ID NO: 294872 - DNA, 3520 bp, Homo sapiens
cgctgtcaggatgaggaggcggaggtcggcggtcgggtccgtctctgcccgcggctgtggcggcgccggcggatccagccttagcggtttctctctgggcggcggcggcggcggctcggttgacgcctcctccgccagctgagcccgcgggagcccaggacgccgcttccccgcccatccccgctccccgaggccggccgcctggtcatggcgcagccgggcccggcttcccagcctgacgtttctcttcagcaacgggtagcagaattggaaaaaattaatgcagaatttttacgtgcacaacagcagcttgaacaagaatttaatcaaaagagagcaaaatttaaggagttatatttggctaaagaggaggatctgaagaggcaaaatgcagtattacaagctgcacaagatgatttgggacaccttcgaacccagctgtgggaagctcaagcagagatggagaatattaaggcgattgccacagtctctgagaacaccaagcaagaagctatagatgaagtgaaaagacagtggagagaagaagttgcttcacttcaggctgttatgaaagaaacagttcgtgactatgagcaccagttccaccttaggctggagcaggagcgaacacagtgggcacagtatagagaatccgcagagagggaaatagctgatttaagaagaaggctgtctgaaggtcaagaggaggaaaatttagaaaatgaaatgaaaaaggcccaagaggatgctgagaaacttcggtccgttgtgatgccaatggaaaaaggaaattgcagctttgaaggataaactgacagaggctgaagacaaaattaaagagctggaggcctcaaaggttaaagaactgaatcattatctggaagctgagaaatcttgtaggactgatctagagatgtatgtagctgttttgaatactcagaaatctgttctacaggaagatgctgagaaactgcggaaagaattgcatgaagtttgccatctcttggagcaagagcgacaacaacacaaccagttaaaacatacgtggcagaaggccaatgaccagtttctggaatctcagcgtttactgatgagagacatgcagcgaatggagattgtgctaacttcagaacagctccgacaagttgaagaactgaagaagaaagatcaggaggatgatgaacaacaaagactcaataagagaaaggatcacaaaaaagcagatgttgaggaagaaataaaaataccagtagtgtgtgctttaactcaagaagaatcttcagcccagttatcaaatgaagaggagcatttagacagcacccgtggctcagttcattccttagatgcaggcttgctgttgccatctggagatcctttcagtaaatcggacaatgacatgtttaaagatggactcaggagagcacagtctacagacagcttgggaacctcgggctcattgcaatccaaagctttaggctataactacaaagcaaaatctgctggaaacctggacgagtcagattttggaccactggtaggagcagattcagtgtctgagaactttgatactgcatcccttgggtcactccagatgccaagtgggtttatgttaaccaaagatcaggaaagagcaatcaaggcgatgacaccagaacaagaagagacagcgtccctcctctccagcgttacccagggcatggagagtgcctatgtgtcccctagtggttatcgtttagttagtgaaacagaatggaatctcttgcagaaagaggtacataatgctggaaataaacttggtagacgttgtgatatgtgttccaattacgaaaaacagttacaaggaattcagattcaggaggctgaaacgagagaccaggtgaaaaaactacagctgatgctaaggcaagctaatgaccagttagagaagacaatgaaagataagcaggagctggaagacttcataaagcaaagcagcgaagattcgagtcaccagatctctgcactcgtcctaagagcccaggcctccgagatcttacttgaagagttacagcaggggctttcccaggcaaagagggatgttcaggaacagatggcggtgctgatgcagtcacgggaacaggtttcagaagagctggtgaggttacagaaagataatgacagtctccagggaaagcacagcctgcatgtgtcattacagcaagcagaagacttcatcctcccagacactacagaggcactgcgggagttggtattaaaataccgtgaggacatcattaatgtgcggacagcagcagaccacgtagaagaaaagctgaaggctgagatacttttcctaaaagagcagatccaagcagaacagtgtttaaaagaaaatcttgaagaaactctgcaactagaaatagaaaactgcaaggaggaaatagcttctatttctagcctaaaagctgaattagaaagaataaaagtggaaaaaggacaggctaccgttgaacaactaatgtttgaagagaagaataaagctcagagattacagacagaattagatgtcagtgagcaagtccagagggattttgtaaagctttcacagacccttcaggtgcagttagagcggatccggcaagctgactccttggagagaatccgggcaattctgaatgatactaaactgacagacattaaccagcttcctgagacatgacaccctcatggcaggattctagcctgcactttgggtttttaactcatctttagagcaacagtaattattatttaactcttaactgaagaaagagaagtcacaacaaaaggaagactggagaaatgcttacttctagagggagaagactgtgcggcacaggaaacagcaaacagtggggtgatctgcagcccagagaccttcaaatgcgaacactataaactccaggcttgattccaacaggcgtgggatcagatttggtgatggaaaaagcgctgtttccttgcctgctttctccaagacagattttcggaacacatttccctaccctaaagcgacatcccagtagtgtttggaattttctgttcatagatattggaagagagaatttgctttatctgttgtctagagctcatcagtaacagtattcagttagcagacagaagtgtagtatgctgtatgaatattttatattaaaatatgaaggtttgagagcaggcaaaaaaaatactgactgtattttgttttccttttaccattttatcttatcttgctttggaggaccttaaatgctactgaaacttacctgagaaccataggactgtggcaaacaaaaccaattcatgaagtgaattaatgatgaggatctgaaaacttggctggggctatatatactggaagttgaaggttaaaggaaaagcacaagaaactttggaagcactttttctgcatacttagatgatcttcatgggcccacagggtaccaggataaagccgaactggtaccatctactcttttgaagtgttttagtctagttattggat

SEQ ID NO: 294873 - DNA, 2193 bp, Homo sapiens
cgctgtcaggatgaggaggcggaggtcggcggtcgggtccgtctctgcccgcggctgtggcggcgccggcggatccagccttagcggtttctctctgggcggcggcggcggcggctcggttgacgcctcctccgccagctgagcccgcgggagcccaggacgccgcttccccgcccatccccgctccccgaggccggccgcctggtcatggcgcagccgggcccggcttcccagcctgacgtttctcttcagcaacgggtagcagaattggaaaaaattaatgcagaatttttacgtgcacaacagcagcttgaacaagaatttaatcaaaagagagcaaaatttaaggagttatatttggctaaagaggaggatctgaagaggcaaaatgcagtattacaagctgcacaagatgatttgggacaccttcgaacccagctgtgggaagctcaagcagagatggagaatattaaggcgattgccacagtctctgagaacaccaagcaagaagctatagatgaagtgaaaagacagtggagagaagaagttgcttcacttcaggctgttatgaaagaaacagttcgtgactatgagcaccagttccaccttaggctggagcaggagcgaacacagtgggcacagtatagagaatccgcagagagggaaatagctgatttaagaagaaggctgtctgaaggtcaagaggaggaaaatttagaaaatgaaatgaaaaaggcccaagaggatgctgagaaacttcggtccgttgtgatgccaatggaaaaaggaaattgcagctttgaaggataaactgacagaggctgaagacaaaattaaagagctggaggcctcaaaggttatgaaacattgtaatccatttgcttgaaacccaagtttctgccccaatgccatgaacaaaattagaatcagtaatagggaaaaaaacctgtaatttagactatgcatcttaagaatctttctttaaaatgcaaaaaactgccgggcgaggtggctcacgcctgtaatcccaaagtgctgagattacaggcgtgaactaccgcgcctggccccatgtattgtatttttttcaggttatattgaaatctactaccaggaatgtcggaatgggttttggtatgtataatggaaatagatagagtggttaagtctagaaacacatacattaattgtattgaaatgttatatcaatacatcatttatgatgtgtgtgtggtcccagacctcatggccaccagtttgtttaagcattgtgaatgctttttaatagcattcattagcattaatggaggaggacactgtgttttctcaattaatctcattgatttgtttggtataagtttgggtcagaaatgaaactgccaaaacatcgatcagtataaggaagggacacagggcttaaaatgtccacagtcttggcagtggacttggcagttctcccagtaagcagaagtacttgagcttaattctgaacttcaaagtaatattttatacttaattttaggagttttcatttacatattgaaaaatgccttgactgtattcacataaatggtgctaaaacattgtaccccttataagaactgcagcaatccacagtaatgttggttacttctgagtatttgataaaggaacaaagtcaaaatgaatgtatttaataagcttctttctcatttccattgtttttataaaaatattctggtattgttgcctgcattttagccacttctaactttttgtattatgaatttggagaggataacaagccaactttagaccctctgccagtggcgatggtgtttttcttccatgggtaagccattgtgaatggaggctggtggagcagcacactgtgtgaacctggcagcgctcatcttggcttgtttagcagtgcctctgtttacaccataagatgttccgcatgtgtccaaaatttcgcctgctctgaaaaacatgcccccgaggctctgtgcagtttggggccttggttcccacctgcagatgcggtcagttgcctggctcctggggccagagtttcctctgttacttgttgagtctcttgtcttcactgtcagaagctgaactgacttgggggctttgctgttgatccactttagcaaaccctgctgcagaggactgtaaaaacaaataactaaaaataaacttagaaaatac

SEQ ID NO: 294874 - DNA, 1401 bp, Homo sapiens
tttttttttggagacggagtcatgctctgttgcccaggctagagtgcagtggtgtgatcttggctcactgcagctccagcctgggtgacggagcaatactccatctggaggaaaagaaaaagcaagcaagccaggtgtgatggcaggcacctgtaatctcagctactcgggaggctgagacaggagaatcacttgaacccgggaggtggagactacagtgagccgagatcacaccattgcactctggcctgggctggcctggatgatgagcaaaactctcccccccaaaaaaaaatcccagtccgttacacggtagctttggggaattatttttaaaatttttaattgttcttgctgtctccctttgaagtgactagtactctggtgagttaatctgctacatctcagctaaaccagtcaaagttcagaaaatctaggcaggagccacctgtagttatctcaccattgtttctccaggtgcagttagagcggatccggcaagctgactccttggagagaatccgggcaattctgaatgatactaaactgacagacattaaccagcttcctgagacatgacaccctcatggcaggattctagcctgcactttgggtttttaactcatctttagagcaacagtaattattatttaactcttaactgaagaaagagaagtcacaacaaaaggaagactggagaaatgcttacttctagagggagaagactgtgcggcacaggaaacagcaaacagtggggtgatctgcagcccagagaccttcaaatgcgaacactataaactccaggcttgattccaacaggcgtgggatcagatttggtgatggaaaaagcgctgtttccttgcctgctttctccaagacagattttcggaacacatttccctaccctaaagcgacatcccagtagtgtttggaattttctgttcatagatattggaagagagaatttgctttatctgttgtctagagctcatcagtaacagtattcagttagcagacagaagtgtagtatgctgtatgaatattttatattaaaatatgaaggtttgagagcaggcaaaaaaaatactgactgtattttgttttccttttaccattttatcttatcttgctttggaggaccttaaatgctactgaaacttacctgagaaccataggactgtggcaaacaaaaccaattcatgaagtgaattaatgatgaggatctgaaaacttggctggggctatatatactggaagttgaaggttaaaggaaaagcacaagaaactttggaagcactttttctgcatacttagatgatcttcatgggcccacagggtaccaggataaagccgaactggtaccatctactcttttgaagtgttttagtctagttattggat

SEQ ID NO: 294875 - DNA, 2254 bp, Homo sapiens
aatcagctcgtcctgattgctgtctcatataaacacgatgtatttctttgtagcagtatgtggagtcagaatgggttttccaatctgatttaatccctgagcagctacgttaaaagttaactttttaaaaaagcccaataaaaaactaaatactgtattaaaactctaccacaatgttacggggataaacttatttctgtacagaaacattaaagctacttaaagctgtttacatcctttgcctctcagaaaaaaaatatacatttccggaaactgttcaggtacttaagctggacataaattaccccaagttttttctttttctttctttctttctttttttttattttctttttgagtaacacggagtttctttaataagctaccagtctccagggaaagcacagcctgcatgtgtcattacagcaagcagaagacttcatcctcccagacactacagaggcactgcgggagttggtattaaaataccgtgaggacatcattaatgtgcggacagcagcagaccacgtagaagaaaagctgaaggctgagatacttttcctaaaagagcagatccaagcagaacagtgtttaaaagaaaatcttgaagaaactctgcaactagaaatagaaaactgcaaggaggaaatagcttctatttctagcctaaaagctgaattagaaagaataaaagtggaaaaaggacagttggagtccacattaagagagaagtctcaacagcttgagagtcttcaggaaataaagatcagtttggaagagcagttaaagaaagagactgctgctaaggctaccgttgaacaactaatgtttgaagagaagaataaagctcagagattacagacagaattagatgtcagtgagcaagtccagagggattttgtaaagctttcacagacccttcaggtgcagttaacgagcggatccggcaagtggatcttggggagaaaccggggaatctgagggtagctaacgggggaattaaccgggtctggaaaaggagacccctggggggttaccggcgccggggggaattccccccatgttcgaaagaaaaatttttttctcagataaaggacccacaagcaggaacaggccacaaaagaagggcggagacccacgggggcgctcacaataacgcgcatgctcggcgtagctatgtaatccgcgctatatatgtcatctctcttaagacgaccgacgttacaacactaacaacacacactacccgcgcagaacaacgagagacagaagagcgggccagagacagaaaatacaagaggaccggaccgagcgggaaggcagacgagaggagacacacggcgggcgaggcaggcacgacggaaacagcaggcgcaaacaggatgagagaggaggagagaccacatgagaccgggaacaggacgcagacgcggagcgcggaaacacacaacgccagccggcaaacgagcacagcgaaaggaaggcaagcgcaaaacgagagggaaaccatcgaacgaaaacagcaagaagaggggagaagggcacacaggaacgacacaacagagcgcgcgaacagcgcggaagcagacgcaggcagagggaagcaaaaggcgcgcccagggccaacgacagccgcacaaggcacgagaaccgaacgaagcagaaagggcgaagagagaggacggcagagaagcaacgaaagcacggcgcgcggcgagaggcgggagggaggagagcgaagcggggagcgacaccagcggagcacggcacgcccgcaaccaccacgcaccgcgcaaacaagagagggcagccaggcacaagaacggacgggccaggagcggagacgcgcacaggacgaggcacgaagagacacgagggccggcgggaaggagaagagccacacaccagcgacgcacgcaacgaagagcgaacaaggcacacacgaacgaggagagagaacgcacggaacggcagacacagtccagcagagcacaacccaagaccgcgggtacggcagacgaggagagaggggcaggagagagcgtacgcacaagagaacggagcgagcagcagaggagcagcaacgcagcaagagacgagcaaccgcacagcacgccgaccgcaacgcactggagcaaacggcacaacgagcagatccgagggcgaaggcgcagggacgactagcggcacgaataccgagccagcagcgagcgcagagtgcgagctacgagcccgagacgacagcacgagcagc

SEQ ID NO: 294876 - DNA, 781 bp, Homo sapiens
ttaatccatttcttcctttggcttttcatacccagttcatctcaggacttagagcaagtagtctagatggcctgcacgcttgccctatagataaagagattggtcgtgtataggagtgcgacggatatccacccacctttctgccctagtagtaggtaactacaagttactggatttcctaagtaattcggccctttggcattaatcttcattcaaaacttgtattttttaggctaccgttgaacaactaatgtttgaagagaagaataaagctcagagattacagacagaattagatgtcagtgagcaagtccagagggattttgtaaagctttcacagacccttcaggtgaggcatttggggaaccacatacagagcacgaaggcagttttgggggacagaaccttgccgatccctgacttgaccactggcagtagctagaggtttagagactggctgctcctacctccaccccaaatgtctgactcatcattcaagccagaaacctggtgtgttcttcacacttggcccatttttctttttctgtatgccttgccaattttgcctccttatgagtaaagtactgactccttagcataccatgtaagactcttcccaaccaggcccacccctgtattttgctcatctctctgccttgttttacatgtttaactgcttgtggttcctcgcccacagcgtggtgttctgtctggtaagcatcctcatctcatcccctcctgactcctttctttcaaggctcagcgtaggtctgtcccctct

SEQ ID NO: 294877 - DNA, 1192 bp, Homo sapiens
  misc_feature (23)..(23): n is a, c, g, or t
  misc_feature (32)..(32): n is a, c, g, or t
  misc_feature (63)..(63): n is a, c, g, or t
tccgtctggggccagaaatattnagtatttcngcgcgcctttcgagccatatagcagctgtanaaacttcggtccgttgtgatgccaatggaaaaaggaaattgcagctttgaaggataaactgacagaggctgaagacaaaattaaagagctggaggcctcaaaggttatgaaacattgtaatccatttgcttgaaacccaagtttctgccccaatgccatgaacaaaattagaatcagtaatagggaaaaaaacctgtaatttagactatgcatcttaagaatctttctttaaaatgcaaaaaactgccgggcgaggtggctcacgcctgtaatcccagcactttgggaggctgaggcgggcggatcacctgaggttgggagttggagaccagtctgaccaacatggagaaaccccatctctactaaaaatacaaattaaccaggcatggtggcgcatgcctgtaatcccggctgctcccagcctcgggaggctgaggcaggagaatcgcttgaagcccggtggcggaggttgcagtgagctgagattgtgcctttgcactccggcctgggcaacaggagcgaaattctgtctcaataataaaaaataaatttaaatgcaaaaaactgctttgagatggttttgctcttatggacatttaaaataatcacaataatgatgttttatcacaagtggctgctttgtcacaaagttaatgttcattttcttaagaaaatgagaccccgtctcattcattttcctattaaggaaaataaactgttcgaagttgaccttgttttctgatgccagctccagcattgatcttttagagataatgtagctatagtattgctgaatttgttggccataaagacacagcaaaagaattaaagtaggaacaggccaggtgttgtggctcacacctgtaatcccaatacttcaggaagctgaggcgggagaattgcttgtgcccaggaatttgagaccagcctgggcaacatagtgagacccctgtctctacaaaaattttttaaaaagccagacacggtggtgcatgcctgttgtcccacctacttgggagactgagatgggaggattacttcagcccgggagtttgagactacagtgaactggcactccagactgggtgacagagtgagaccctgtcccccacacccaaagaaaaaaagg

SEQ ID NO: 294878 - DNA, 621 bp, Homo sapiens
  misc_feature (23)..(23): n is a, c, g, or t
  misc_feature (32)..(32): n is a, c, g, or t
  misc_feature (63)..(63): n is a, c, g, or t
tccgtctggggccagaaatattnagtatttcngcgcgcctttcgagccatatagcagctgtanaaacttcggtccgttgtgatgccaatggaaaaaggaaattgcagctttgaaggataaactgacagaggctgaagacaaaattaaagagctggaggcctcaaaggttatgaaacattgtaatccatttgcttgaaacccaagtttctgccccaatgccatgaacaaaattagaatcagtaatagggaaaaaaacctgtaatttagactatgcatcttaagaatctttctttaaaatgcaaaaaactgccgggcgaggtggctcacgcctgtaatcccagcactttgggaggctgaggcgggcggatcacctgaggttgggagttggagaccagtctgaccaacatggagaaaccccatctctactaaaaatacaaattaaccaggcatggtggcgcatgcctgtaatcccggctgctcccagcctcgggaggctgaggcaggagaatcgcttgaagcccggtggcggaggttgcagtgagctgagattgtgcctttgcactccggcctgggcaacaggagcgaaattctgtctcaataataaaaaataaatttaaatgc

SEQ ID NO: 294879 - DNA, 602 bp, Homo sapiens
tagtttaaataaacttttacattattttatatgcatacacatttaaaatcacattgtataaaataattagtaattgatttttcttttcaattgaattgatcatgcctttttggttcctaattcttagttcattcttcaaatgcatgtatattcatgatttccacagtctttcaattttagaactgtttttgattatctgaaaaattgggaagatagtacagagttcctatatactccatgcctagtttctcctgttgttaatgttttacattagcatggtacatttgtcacagctaataagcctctatcaatttattcttattaactgaagtccatttttgtattcagattgcattagtttttacctaatgtccttttttttctgttctaggatcccatccaggataccatattgcatttagttgtgtctccttagatgcctcttggctgtgacagtttctcagatttttcttgtttttaatgacctttctgtcattttttaaagtgctttttaaaggttttgtttatgatgacattcagcacttggaattgtgaagtcatatttatattaataaataacttgatttgtgatcagaaaaaaa

SEQ ID NO: 294880 - DNA, 461 bp, Homo sapiens
cgattgtgaaataggtaggtgatgtttgtagaaacagttcgtgactatgagcaccagttccaccttaggctggagcaggagcgaacacagtgggcacagtatagagaatccgcagagagggaaatagctgatttaagaagaaggctgtctgaaggtcaagaggaggaaaatttagaaaatgaaatgaaaaaggtatgaaggaatgtgttcatttgtagaaatatttgaattcaaatgcaaaatgctttaatattgttgtgtaatagaaagtaatagaagtactttgatatttcctgtgagaataattatttggacacagacctaaacatagtactaaataatgttatatctatggctaactctctcaccttcttcacatttttgatcaaatatcactacttcatggggtttttcccgaccacccgccatttaacatgcaacctgccaacttccctctgcca

SEQ ID NO: 294881 - DNA, 817 bp, Homo sapiens
cgctgtcaggatgaggaggcggaggtcggcggtcgggtccgtctctgcccgcggctgtggcggcgccggcggatccagccttagcggtttctctctgggcggcggcggcggcggctcggttgacgcctcctccgccagctgagcccgcgggagcccaggacgccgcttccccgcccatccccgctccccgaggccggccgcctggtcatggcgcagccgggcccggcttcccagcctgacgaggatctgaagaggcaaaatgcagtattacaagctgcacaagatgatttgggacaccttcgaacccagctgtgggaagctcaagcagagatggagaatattaaggcgattgccacagtctctgagaacaccaagcaagaagctatagatgaagtgaaaagacagtggagagaagaagttgcttcacttcaggctgttatgaaagaaacagttcgtgactatgagcaccagttccaccttaggctggagcaggagcgaacacagtgggcacagtatagagaatccgcagagagggaaatagctgatttaagaagaaggctgtctgaaggtcaagaggaggaaaatttagaaaatgaaatgaaaaaggatcccatccaggataccatattgcatttagttgtgtctccttagatgcctcttggctgtgacagtttctcagatttttcttgtttttaatgacctttctgtcattttttaaagtgctttttaaaggttttgtttatgatgacattcagcacttggaattgtgaagtcatatttatattaataaataacttgatttgtgatcagaaaaaaa

SEQ ID NO: 294882 - DNA, 3440 bp, Homo sapiens
cgctgtcaggatgaggaggcggaggtcggcggtcgggtccgtctctgcccgcggctgtggcggcgccggcggatccagccttagcggtttctctctgggcggcggcggcggcggctcggttgacgcctcctccgccagctgagcccgcgggagcccaggacgccgcttccccgcccatccccgctccccgaggccggccgcctggtcatggcgcagccgggcccggcttcccagcctgacgtttctcttcagcaacgggtagcagaattggaaaaaattaatgcagaatttttacgtgcacaacagcagcttgaacaagaatttaatcaaaagagagcaaaatttaaggagttatatttggctaaagaggaggatctgaagaggcaaaatgcagtattacaagctgcacaagatgatttgggacaccttcgaacccagctgtgggaagctcaagcagagatggagaatattaaggcgattgccacagtctctgagaacaccaagcaagaagctatagatgaagtgaaaagacagtggagagaagaagttgcttcacttcaggctgttatgaaagaaacagttcgtgactatgagcaccagttccaccttaggctggagcaggagcgaacacagtgggcacagtatagagaatccgcagagagggaaatagctgatttaagaagaaggctgtctgaaggtcaagaggaggaaaatttagaaaatgaaatgaaaaaggcccaagaggatgctgagaaacttcggtccgttgtgatgccaatggaaaaaggaaattgcagctttgaaggataaactgacagaggctgaagacaaaattaaagagctggaggcctcaaaggttaaagaactgaatcattatctggaagctgagaaatcttgtaggactgatctagagatgtatgtagctgttttgaatactcagaaatctgttctacaggaagatgctgagaaactgcggaaagaattgcatgaaggaggatgatgaacaacaaagactcaataagagaaaggatcacaaaaaagcagatgttgaggaagaaataaaaataccagtagtgtgtgctttaactcaagaagaatcttcagcccagttatcaaatgaagaggagcatttagacagcacccgtggctcagttcattccttagatgcaggcttgctgttgccatctggagatcctttcagtaaatcggacaatgacatgtttaaagatggactcaggagagcacagtctacagacagcttgggaacctcgggctcattgcaatccaaagctttaggctataactacaaagcaaaatctgctggaaacctggacgagtcagattttggaccactggtaggagcagattcagtgtctgagaactttgatactgcatcccttgggtcactccagatgccaagtgggtttatgttaaccaaagatcaggaaagagcaatcaaggcgatgacaccagaacaagaagagacagcgtccctcctctccagcgttacccagggcatggagagtgcctatgtgtcccctagtggttatcgtttagttagtgaaacagaatggaatctcttgcagaaagaggtacataatgctggaaataaacttggtagacgttgtgatatgtgttccaattacgaaaaacagttacaaggaattcagattcaggaggctgaaacgagagaccaggtgaaaaaactacagctgatgctaaggcaagctaatgaccagttagagaagacaatgaaagataagcaggagctggaagacttcataaagcaaagcagcgaagattcgagtcaccagatctctgcactcgtcctaagagcccaggcctccgagatcttacttgaagagttacagcaggggctttcccaggcaaagagggatgttcaggaacagatggcggtgctgatgcagtcacgggaacaggtttcagaagagctggtgaggttacagaaagataatgacagtctccagggaaagcacagcctgcatgtgtcattacagcaagcagaagacttcatcctcccagacactacagaggcactgcgggagttggtattaaaataccgtgaggacatcattaatgtgcggacagcagcagaccacgtagaagaaaagctgaaggctgagatacttttcctaaaagagcagatccaagcagaacagtgtttaaaagaaaatcttgaagaaactctgcaactagaaatagaaaactgcaaggaggaaatagcttctatttctagcctaaaagctgaattagaaagaataaaagtggaaaaaggacagttggagtccacattaagagagaagtctcaacagcttgagagtcttcaggaaataaagatcagtttggaagagcagttaaagaaagagactgctgctaaggctaccgttgaacaactaatgtttgaagagaagaataaagctcagagattacagacagaattagatgtcagtgagcaagtccagagggattttgtaaagctttcacagacccttcaggtgcagttagagcggatccggcaagctgactccttggagagaatccgggcaattctgaatgatactaaactgacagacattaaccagcttcctgagacatgacaccctcatggcaggattctagcctgcactttgggtttttaactcatctttagagcaacagtaattattatttaactcttaactgaagaaagagaagtcacaacaaaaggaagactggagaaatgcttacttctagagggagaagactgtgcggcacaggaaacagcaaacagtggggtgatctgcagcccagagaccttcaaatgcgaacactataaactccaggcttgattccaacaggcgtgggatcagatttggtgatggaaaaagcgctgtttccttgcctgctttctccaagacagattttcggaacacatttccctaccctaaagcgacatcccagtagtgtttggaattttctgttcatagatattggaagagagaatttgctttatctgttgtctagagctcatcagtaacagtattcagttagcagacagaagtgtagtatgctgtatgaatattttatattaaaatatgaaggtttgagagcaggcaaaaaaaatactgactgtattttgttttccttttaccattttatcttatcttgctttggaggaccttaaatgctactgaaacttacctgagaaccataggactgtggcaaacaaaaccaattcatgaagtgaattaatgatgaggatctgaaaacttggctggggctatatatactggaagttgaaggttaaaggaaaagcacaagaaactttggaagcactttttctgcatacttagatgatcttcatgggcccacagggtaccaggataaagccgaactggtaccatctactcttttgaagtgttttagtctagttattggat

SEQ ID NO: 294883 - DNA, 2552 bp, Homo sapiens
taaggctaggaggaggcccggggtttaaatcggccgagggaatggagattgtgctaacttcagaacagctccgacaagttgaagaactgaagaagaaagatcaggaggatgatgaacaacaaagactcaataagagaaaggatcacaaaaaagcagatgttgaggaagaaataaaaataccagtagtgtgtgctttaactcaagaagaatcttcagcccagttatcaaatgaagaggagcatttagacagcacccgtggctcagttcattccttagatgcaggcttgctgttgccatctggagatcctttcagtaaatcggacaatgacatgtttaaagatggactcaggagagcacagtctacagacagcttgggaacctcgggctcattgcaatccaaagctttaggctataactacaaagcaaaatctgctggaaacctggacgagtcagattttggaccactggtaggagcagattcagtgtctgagaactttgatactgcatcccttgggtcactccagatgccaagtgggtttatgttaaccaaagatcaggaaagagcaatcaaggcgatgacaccagaacaagaagagacagcgtccctcctctccagcgttacccagggcatggagagtgcctatgtgtcccctagtggttatcgtttagttagtgaaacagaatggaatctcttgcagaaagaggtacataatgctggaaataaacttggtagacgttgtgatatgtgttccaattacgaaaaacagttacaaggaattcagattcaggaggctgaaacgagagaccaggtgaaaaaactacagctgatgctaaggcaagctaatgaccagttagagaagacaatgaaagataagcaggagctggaagacttcataaagcaaagcagcgaagattcgagtcaccagatctctgcactcgtcctaagagcccaggcctccgagatcttacttgaagagttacagcaggggctttcccaggcaaagagggatgttcaggaacagatggcggtgctgatgcagtcacgggaacaggtttcagaagagctggtgaggttacagaaagataatgacagtctccagggaaagcacagcctgcatgtgtcattacagcaagcagaagacttcatcctcccagacactacagaggcactgcgggagttggtattaaaataccgtgaggacatcattaatgtgcggacagcagcagaccacgtagaagaaaagctgaaggctgagatacttttcctaaaagagcagatccaagcagaacagtgtttaaaagaaaatcttgaagaaactctgcaactagaaatagaaaactgcaaggaggaaatagcttctatttctagcctaaaagctgaattagaaagaataaaagtggaaaaaggacagttggagtccacattaagagagaagtctcaacagcttgagagtcttcaggaaataaagatcagtttggaagagcagttaaagaaagagactgctgctaaggctaccgttgaacaactaatgtttgaagagaagaataaagctcagagattacagacagaattagatgtcagtgagcaagtccagagggattttgtaaagctttcacagacccttcaggtgcagttagagcggatccggcaagctgactccttggagagaatccgggcaattctgaatgatactaaactgacagacattaaccagcttcctgagacatgacaccctcatggcaggattctagcctgcactttgggtttttaactcatctttagagcaacagtaattattatttaactcttaactgaagaaagagaagtcacaacaaaaggaagactggagaaatgcttacttctagagggagaagactgtgcggcacaggaaacagcaaacagtggggtgatctgcagcccagagaccttcaaatgcgaacactataaactccaggcttgattccaacaggcgtgggatcagatttggtgatggaaaaagcgctgtttccttgcctgctttctccaagacagattttcggaacacatttccctaccctaaagcgacatcccagtagtgtttggaattttctgttcatagatattggaagagagaatttgctttatctgttgtctagagctcatcagtaacagtattcagttagcagacagaagtgtagtatgctgtatgaatattttatattaaaatatgaaggtttgagagcaggcaaaaaaaatactgactgtattttgttttccttttaccattttatcttatcttgctttggaggaccttaaatgctactgaaacttacctgagaaccataggactgtggcaaacaaaaccaattcatgaagtgaattaatgatgaggatctgaaaacttggctggggctatatatactggaagttgaaggttaaaggaaaagcacaagaaactttggaagcactttttctgcatacttagatgatcttcatgggcccacagggtaccaggataaagccgaactggtaccatctactcttttgaagtgttttagtctagttattggat

SEQ ID NO: 294884 - DNA, 2605 bp, Homo sapiens
cgcacaatctccattcgctgcatgtctctcatcagtaaacgctgagattccagaaactggtcattggccttctgccacgtatgttttaactggaatggagattgtgctaacttcagaacagctccgacaagttgaagaactgaagaagaaagatcaggaggatgatgaacaacaaagactcaataagagaaaggatcacaaaaaagcagatgttgaggaagaaataaaaataccagtagtgtgtgctttaactcaagaagaatcttcagcccagttatcaaatgaagaggagcatttagacagcacccgtggctcagttcattccttagatgcaggcttgctgttgccatctggagatcctttcagtaaatcggacaatgacatgtttaaagatggactcaggagagcacagtctacagacagcttgggaacctcgggctcattgcaatccaaagctttaggctataactacaaagcaaaatctgctggaaacctggacgagtcagattttggaccactggtaggagcagattcagtgtctgagaactttgatactgcatcccttgggtcactccagatgccaagtgggtttatgttaaccaaagatcaggaaagagcaatcaaggcgatgacaccagaacaagaagagacagcgtccctcctctccagcgttacccagggcatggagagtgcctatgtgtcccctagtggttatcgtttagttagtgaaacagaatggaatctcttgcagaaagaggtacataatgctggaaataaacttggtagacgttgtgatatgtgttccaattacgaaaaacagttacaaggaattcagattcaggaggctgaaacgagagaccaggtgaaaaaactacagctgatgctaaggcaagctaatgaccagttagagaagacaatgaaagataagcaggagctggaagacttcataaagcaaagcagcgaagattcgagtcaccagatctctgcactcgtcctaagagcccaggcctccgagatcttacttgaagagttacagcaggggctttcccaggcaaagagggatgttcaggaacagatggcggtgctgatgcagtcacgggaacaggtttcagaagagctggtgaggttacagaaagataatgacagtctccagggaaagcacagcctgcatgtgtcattacagcaagcagaagacttcatcctcccagacactacagaggcactgcgggagttggtattaaaataccgtgaggacatcattaatgtgcggacagcagcagaccacgtagaagaaaagctgaaggctgagatacttttcctaaaagagcagatccaagcagaacagtgtttaaaagaaaatcttgaagaaactctgcaactagaaatagaaaactgcaaggaggaaatagcttctatttctagcctaaaagctgaattagaaagaataaaagtggaaaaaggacagttggagtccacattaagagagaagtctcaacagcttgagagtcttcaggaaataaagatcagtttggaagagcagttaaagaaagagactgctgctaaggctaccgttgaacaactaatgtttgaagagaagaataaagctcagagattacagacagaattagatgtcagtgagcaagtccagagggattttgtaaagctttcacagacccttcaggtgcagttagagcggatccggcaagctgactccttggagagaatccgggcaattctgaatgatactaaactgacagacattaaccagcttcctgagacatgacaccctcatggcaggattctagcctgcactttgggtttttaactcatctttagagcaacagtaattattatttaactcttaactgaagaaagagaagtcacaacaaaaggaagactggagaaatgcttacttctagagggagaagactgtgcggcacaggaaacagcaaacagtggggtgatctgcagcccagagaccttcaaatgcgaacactataaactccaggcttgattccaacaggcgtgggatcagatttggtgatggaaaaagcgctgtttccttgcctgctttctccaagacagattttcggaacacatttccctaccctaaagcgacatcccagtagtgtttggaattttctgttcatagatattggaagagagaatttgctttatctgttgtctagagctcatcagtaacagtattcagttagcagacagaagtgtagtatgctgtatgaatattttatattaaaatatgaaggtttgagagcaggcaaaaaaaatactgactgtattttgttttccttttaccattttatcttatcttgctttggaggaccttaaatgctactgaaacttacctgagaaccataggactgtggcaaacaaaaccaattcatgaagtgaattaatgatgaggatctgaaaacttggctggggctatatatactggaagttgaaggttaaaggaaaagcacaagaaactttggaagcactttttctgcatacttagatgatcttcatgggcccacagggtaccaggataaagccgaactggtaccatctactcttttgaagtgttttagtctagttattggat

SEQ ID NO: 294885 - DNA, 2517 bp, Homo sapiens
cggcgactctagaggactcccgcctacgtggactgccgaccagttgaagaactgaagaagaaagatcaggaggatgatgaacaacaaagactcaataagagaaaggatcacaaaaaagcagatgttgaggaagaaataaaaataccagtagtgtgtgctttaactcaagaagaatcttcagcccagttatcaaatgaagaggagcatttagacagcacccgtggctcagttcattccttagatgcaggcttgctgttgccatctggagatcctttcagtaaatcggacaatgacatgtttaaagatggactcaggagagcacagtctacagacagcttgggaacctcgggctcattgcaatccaaagctttaggctataactacaaagcaaaatctgctggaaacctggacgagtcagattttggaccactggtaggagcagattcagtgtctgagaactttgatactgcatcccttgggtcactccagatgccaagtgggtttatgttaaccaaagatcaggaaagagcaatcaaggcgatgacaccagaacaagaagagacagcgtccctcctctccagcgttacccagggcatggagagtgcctatgtgtcccctagtggttatcgtttagttagtgaaacagaatggaatctcttgcagaaagaggtacataatgctggaaataaacttggtagacgttgtgatatgtgttccaattacgaaaaacagttacaaggaattcagattcaggaggctgaaacgagagaccaggtgaaaaaactacagctgatgctaaggcaagctaatgaccagttagagaagacaatgaaagataagcaggagctggaagacttcataaagcaaagcagcgaagattcgagtcaccagatctctgcactcgtcctaagagcccaggcctccgagatcttacttgaagagttacagcaggggctttcccaggcaaagagggatgttcaggaacagatggcggtgctgatgcagtcacgggaacaggtttcagaagagctggtgaggttacagaaagataatgacagtctccagggaaagcacagcctgcatgtgtcattacagcaagcagaagacttcatcctcccagacactacagaggcactgcgggagttggtattaaaataccgtgaggacatcattaatgtgcggacagcagcagaccacgtagaagaaaagctgaaggctgagatacttttcctaaaagagcagatccaagcagaacagtgtttaaaagaaaatcttgaagaaactctgcaactagaaatagaaaactgcaaggaggaaatagcttctatttctagcctaaaagctgaattagaaagaataaaagtggaaaaaggacagttggagtccacattaagagagaagtctcaacagcttgagagtcttcaggaaataaagatcagtttggaagagcagttaaagaaagagactgctgctaaggctaccgttgaacaactaatgtttgaagagaagaataaagctcagagattacagacagaattagatgtcagtgagcaagtccagagggattttgtaaagctttcacagacccttcaggtgcagttagagcggatccggcaagctgactccttggagagaatccgggcaattctgaatgatactaaactgacagacattaaccagcttcctgagacatgacaccctcatggcaggattctagcctgcactttgggtttttaactcatctttagagcaacagtaattattatttaactcttaactgaagaaagagaagtcacaacaaaaggaagactggagaaatgcttacttctagagggagaagactgtgcggcacaggaaacagcaaacagtggggtgatctgcagcccagagaccttcaaatgcgaacactataaactccaggcttgattccaacaggcgtgggatcagatttggtgatggaaaaagcgctgtttccttgcctgctttctccaagacagattttcggaacacatttccctaccctaaagcgacatcccagtagtgtttggaattttctgttcatagatattggaagagagaatttgctttatctgttgtctagagctcatcagtaacagtattcagttagcagacagaagtgtagtatgctgtatgaatattttatattaaaatatgaaggtttgagagcaggcaaaaaaaatactgactgtattttgttttccttttaccattttatcttatcttgctttggaggaccttaaatgctactgaaacttacctgagaaccataggactgtggcaaacaaaaccaattcatgaagtgaattaatgatgaggatctgaaaacttggctggggctatatatactggaagttgaaggttaaaggaaaagcacaagaaactttggaagcactttttctgcatacttagatgatcttcatgggcccacagggtaccaggataaagccgaactggtaccatctactcttttgaagtgttttagtctagttattggat

SEQ ID NO: 294886 - DNA, 1772 bp, Homo sapiens
ctaggtcgaggccggtgttaatcggccgagtgaaaaaactacagctgatgctaaggcaagctaatgaccagttagagaagacaatgaaagataagcaggagctggaagacttcataaagcaaagcagcgaagattcgagtcaccagatctctgcactcgtcctaagagcccaggcctccgagatcttacttgaagagttacagcaggggctttcccaggcaaagagggatgttcaggaacagatggcggtgctgatgcagtcacgggaacaggtttcagaagagctggtgaggttacagaaagataatgacagtctccagggaaagcacagcctgcatgtgtcattacagcaagcagaagacttcatcctcccagacactacagaggcactgcgggagttggtattaaaataccgtgaggacatcattaatgtgcggacagcagcagaccacgtagaagaaaagctgaaggctgagatacttttcctaaaagagcagatccaagcagaacagtgtttaaaagaaaatcttgaagaaactctgcaactagaaatagaaaactgcaaggaggaaatagcttctatttctagcctaaaagctgaattagaaagaataaaagtggaaaaaggacagttggagtccacattaagagagaagtctcaacagcttgagagtcttcaggaaataaagatcagtttggaagagcagttaaagaaagagactgctgctaaggctaccgttgaacaactaatgtttgaagagaagaataaagctcagagattacagacagaattagatgtcagtgagcaagtccagagggattttgtaaagctttcacagacccttcaggtgcagttagagcggatccggcaagctgactccttggagagaatccgggcaattctgaatgatactaaactgacagacattaaccagcttcctgagacatgacaccctcatggcaggattctagcctgcactttgggtttttaactcatctttagagcaacagtaattattatttaactcttaactgaagaaagagaagtcacaacaaaaggaagactggagaaatgcttacttctagagggagaagactgtgcggcacaggaaacagcaaacagtggggtgatctgcagcccagagaccttcaaatgcgaacactataaactccaggcttgattccaacaggcgtgggatcagatttggtgatggaaaaagcgctgtttccttgcctgctttctccaagacagattttcggaacacatttccctaccctaaagcgacatcccagtagtgtttggaattttctgttcatagatattggaagagagaatttgctttatctgttgtctagagctcatcagtaacagtattcagttagcagacagaagtgtagtatgctgtatgaatattttatattaaaatatgaaggtttgagagcaggcaaaaaaaatactgactgtattttgttttccttttaccattttatcttatcttgctttggaggaccttaaatgctactgaaacttacctgagaaccataggactgtggcaaacaaaaccaattcatgaagtgaattaatgatgaggatctgaaaacttggctggggctatatatactggaagttgaaggttaaaggaaaagcacaagaaactttggaagcactttttctgcatacttagatgatcttcatgggcccacagggtaccaggataaagccgaactggtaccatctactcttttgaagtgttttagtctagttattggat

SEQ ID NO: 294887 - DNA, 1551 bp, Homo sapiens
gattagtatctacttctattttaggcggtgctgatgcagtcacgggaacaggtttcagaagagctggtgaggttacagaaagataatgacagtctccagggaaagcacagcctgcatgtgtcattacagcaagcagaagacttcatcctcccagacactacagaggcactgcgggagttggtattaaaataccgtgaggacatcattaatgtgcggacagcagcagaccacgtagaagaaaagctgaaggctgagatacttttcctaaaagagcagatccaagcagaacagtgtttaaaagaaaatcttgaagaaactctgcaactagaaatagaaaactgcaaggaggaaatagcttctatttctagcctaaaagctgaattagaaagaataaaagtggaaaaaggacagttggagtccacattaagagagaagtctcaacagcttgagagtcttcaggaaataaagatcagtttggaagagcagttaaagaaagagactgctgctaaggctaccgttgaacaactaatgtttgaagagaagaataaagctcagagattacagacagaattagatgtcagtgagcaagtccagagggattttgtaaagctttcacagacccttcaggtgcagttagagcggatccggcaagctgactccttggagagaatccgggcaattctgaatgatactaaactgacagacattaaccagcttcctgagacatgacaccctcatggcaggattctagcctgcactttgggtttttaactcatctttagagcaacagtaattattatttaactcttaactgaagaaagagaagtcacaacaaaaggaagactggagaaatgcttacttctagagggagaagactgtgcggcacaggaaacagcaaacagtggggtgatctgcagcccagagaccttcaaatgcgaacactataaactccaggcttgattccaacaggcgtgggatcagatttggtgatggaaaaagcgctgtttccttgcctgctttctccaagacagattttcggaacacatttccctaccctaaagcgacatcccagtagtgtttggaattttctgttcatagatattggaagagagaatttgctttatctgttgtctagagctcatcagtaacagtattcagttagcagacagaagtgtagtatgctgtatgaatattttatattaaaatatgaaggtttgagagcaggcaaaaaaaatactgactgtattttgttttccttttaccattttatcttatcttgctttggaggaccttaaatgctactgaaacttacctgagaaccataggactgtggcaaacaaaaccaattcatgaagtgaattaatgatgaggatctgaaaacttggctggggctatatatactggaagttgaaggttaaaggaaaagcacaagaaactttggaagcactttttctgcatacttagatgatcttcatgggcccacagggtaccaggataaagccgaactggtaccatctactcttttgaagtgttttagtctagttattggat

SEQ ID NO: 294888 - DNA, 1848 bp, Homo sapiens
aatcagctcgtcctgattgctgtctcatataaacacgatgtatttctttgtagcagtatgtggagtcagaatgggttttccaatctgatttaatccctgagcagctacgttaaaagttaactttttaaaaaagcccaataaaaaactaaatactgtattaaaactctaccacaatgttacggggataaacttatttctgtacagaaacattaaagctacttaaagctgtttacatcctttgcctctcagaaaaaaaatatacatttccggaaactgttcaggtacttaagctggacataaattaccccaagttttttctttttctttctttctttctttttttttattttctttttgagtaacacggagtttctttaataagctaccagtctccagggaaagcacagcctgcatgtgtcattacagcaagcagaagacttcatcctcccagacactacagaggcactgcgggagttggtattaaaataccgtgaggacatcattaatgtgcggacagcagcagaccacgtagaagaaaagctgaaggctgagatacttttcctaaaagagcagatccaagcagaacagtgtttaaaagaaaatcttgaagaaactctgcaactagaaatagaaaactgcaaggaggaaatagcttctatttctagcctaaaagctgaattagaaagaataaaagtggaaaaaggacagttggagtccacattaagagagaagtctcaacagcttgagagtcttcaggaaataaagatcagtttggaagagcagttaaagaaagagactgctgctaaggctaccgttgaacaactaatgtttgaagagaagaataaagctcagagattacagacagaattagatgtcagtgagcaagtccagagggattttgtaaagctttcacagacccttcaggtgcagttagagcggatccggcaagctgactccttggagagaatccgggcaattctgaatgatactaaactgacagacattaaccagcttcctgagacatgacaccctcatggcaggattctagcctgcactttgggtttttaactcatctttagagcaacagtaattattatttaactcttaactgaagaaagagaagtcacaacaaaaggaagactggagaaatgcttacttctagagggagaagactgtgcggcacaggaaacagcaaacagtggggtgatctgcagcccagagaccttcaaatgcgaacactataaactccaggcttgattccaacaggcgtgggatcagatttggtgatggaaaaagcgctgtttccttgcctgctttctccaagacagattttcggaacacatttccctaccctaaagcgacatcccagtagtgtttggaattttctgttcatagatattggaagagagaatttgctttatctgttgtctagagctcatcagtaacagtattcagttagcagacagaagtgtagtatgctgtatgaatattttatattaaaatatgaaggtttgagagcaggcaaaaaaaatactgactgtattttgttttccttttaccattttatcttatcttgctttggaggaccttaaatgctactgaaacttacctgagaaccataggactgtggcaaacaaaaccaattcatgaagtgaattaatgatgaggatctgaaaacttggctggggctatatatactggaagttgaaggttaaaggaaaagcacaagaaactttggaagcactttttctgcatacttagatgatcttcatgggcccacagggtaccaggataaagccgaactggtaccatctactcttttgaagtgttttagtctagttattggat

SEQ ID NO: 294889 - DNA, 3127 bp, Homo sapiens
cgctgtcaggatgaggaggcggaggtcggcggtcgggtccgtctctgcccgcggctgtggcggcgccggcggatccagccttagcggtttctctctgggcggcggcggcggcggctcggttgacgcctcctccgccagctgagcccgcgggagcccaggacgccgcttccccgcccatccccgctccccgaggccggccgcctggtcatggcgcagccgggcccggcttcccagcctgacgtttctcttcagcaacgggtagcagaattggaaaaaattaatgcagaatttttacgtgcacaacagcagcttgaacaagaatttaatcaaaagagagcaaaatttaaggagttatatttggctaaagaggaggatctgaagaggcaaaatgcagtattacaagctgcacaagatgatttgggacaccttcgaacccagctgtgggaagctcaagcagagatggagaatattaaggcgattgccacagtctctgagaacaccaagcaagaagctatagatgaagtgaaaagacagtggagagaagaagttgcttcacttcaggctgttatgaaagaaacagttcgtgactatgagcaccagttccaccttaggctggagcaggagcgaacacagtgggcacagtatagagaatccgcagagagggaaatagctgatttaagaagaaggctgtctgaaggtcaagaggaggaaaatttagaaaatgaaatgaaaaaggcccaagaggatgctgagaaacttcggtccgttgtgatgccaatggaaaaaggaaattgcagctttgaaggataaactgacagaggctgaagacaaaattaaagagctggaggcctcaaaggttaaagaactgaatcattatctggaagctgagaaatcttgtaggactgatctagagatgtatgtagctgttttgaatactcagaaatctgttctacaggaagatgctgagaaactgcggaaagaattgcatgaagtttgccatctcttggagcaagagcgacaacaacacaaccagttaaaacatacgtggcagaaggccaatgaccagtttctggaatctcagcgtttactgatgagagacatgcagcgaatggagattgtgctaacttcagaacagctccgacaagttgaagaactgaagaagaaagatcaggaggatgatgaacaacaaagactcaataagagaaaggatcacaaaaaagcagatgttgaggaagaaataaaaataccagtagtgtgtgctttaactcaagaagaatcttcagcccagttatcaaatgaagaggagcatttagacagcacccgtggctcagttcattccttagatgcaggcttgctgttgccatctggagatcctttcagtaaatcggacaatgacatgtttaaagatggactcaggagagcacagtctacagacagcttgggaacctcgggctcattgcaatccaaagctttaggctataactacaaagcaaaatctgctggaaacctggacgagtcagattttggaccactggtaggagcagattcagtgtctgagaactttgatactgcatcccttgggtcactccagatgccaagtgggtttatgttaaccaaagatcaggaaagagcaatcaaggcgatgacaccagaacaagaagagacagcgtccctcctctccagcgttacccagggcatggagagtgcctatgtgtcccctagtggttatcgtttagttagtgaaacagaatggaatctcttgcagaaagaggtacataatgctggaaataaacttggtagacgttgtgatatgtgttccaattacgaaaaacagttacaaggaattcagattcaggaggctgaaacgagagaccaggtgaaaaaactacagctgatgctaaggcaagctaatgaccagttagagaagacaatgaaagataagcaggagctggaagacttcataaagcaaagcagcgaagattcgagtcaccagatctctgcactcgtcctaagagcccaggcctccgagatcttacttgaagagttacagcaggggctttcccaggcaaagagggatgttcaggaacagatggcggtgctgatgcagtcacgggaacaggtttcagaagagctggtgaggttacagaaagataatgacagtctccagggaaagcacagcctgcatgtgtcattacagcaagcagaagacttcatcctcccagacactacagaggcactgcgggagttggtattaaaataccgtgaggacatcattaatgtgcggacagcagcagaccacgtagaagaaaagctgaaggctgagatacttttcctaaaagagcagatccaagcagaacagtgtttaaaagaaaatcttgaagaaactctgcaactagaaatagaaaactgcaaggaggaaatagcttctatttctagcctaaaagctgaattagaaagaataaaagtggaaaaaggacagttggagtccacattaagagagaagtctcaacagcttgagagtcttcaggaaataaagatcagtttggaagagcagttaaagaaagagactgctgctaaggctaccgttgaacaactaatgtttgaagagaagaataaagctcagagattacagacagaattagatgtcagtgagcaagtccagagggattttgtaaagctttcacagacccttcaggtgaggcatttggggaaccacatacagagcacgaaggcagttttgggggacagaaccttgccgatccctgacttgaccactggcagtagctagaggtttagagactggctgctcctacctccaccccaaatgtctgactcatcattcaagccagaaacctggtgtgttcttcacacttggcccatttttctttttctgtatgccttgccaattttgcctccttatgagtaaagtactgactccttagcataccatgtaagactcttcccaaccaggcccacccctgtattttgctcatctctctgccttgttttacatgtttaactgcttgtggttcctcgcccacagcgtggtgttctgtctggtaagcatcctcatctcatcccctcctgactcctttctttcaaggctcagcgtaggtctgtcccctct

SEQ ID NO: 294890 - DNA, 4025 bp, Homo sapiens
cgctgtcaggatgaggaggcggaggtcggcggtcgggtccgtctctgcccgcggctgtggcggcgccggcggatccagccttagcggtttctctctgggcggcggcggcggcggctcggttgacgcctcctccgccagctgagcccgcgggagcccaggacgccgcttccccgcccatccccgctccccgaggccggccgcctggtcatggcgcagccgggcccggcttcccagcctgacgtttctcttcagcaacgggtagcagaattggaaaaaattaatgcagaatttttacgtgcacaacagcagcttgaacaagaatttaatcaaaagagagcaaaatttaaggagttatatttggctaaagaggaggatctgaagaggcaaaatgcagtattacaagctgcacaagatgatttgggacaccttcgaacccagctgtgggaagctcaagcagagatggagaatattaaggcgattgccacagtctctgagaacaccaagcaagaagctatagatgaagtgaaaagacagtggagagaagaagttgcttcacttcaggctgttatgaaagaaacagttcgtgactatgagcaccagttccaccttaggctggagcaggagcgaacacagtgggcacagtatagagaatccgcagagagggaaatagctgatttaagaagaaggctgtctgaaggtcaagaggaggaaaatttagaaaatgaaatgaaaaaggcccaagaggatgctgagaaacttcggtccgttgtgatgccaatggaaaaaggaaattgcagctttgaaggataaactgacagaggctgaagacaaaattaaagagctggaggcctcaaaggttaaagaactgaatcattatctggaagctgagaaatcttgtaggactgatctagagatgtatgtagctgttttgaatactcagaaatctgttctacaggaagatgctgagaaactgcggaaagaattgcatgaagtttgccatctcttggagcaagagcgacaacaacacaaccagttaaaacatacgtggcagaaggccaatgaccagtttctggaatctcagcgtttactgatgagagacatgcagcgaatggagattgtgctaacttcagaacagctccgacaagttgaagaactgaagaagaaagatcaggaggatgatgaacaacaaagactcaataagagaaaggatcacaaaaaagcagatgttgaggaagaaataaaaataccagtagtgtgtgctttaactcaagaagaatcttcagcccagttatcaaatgaagaggagcatttagacagcacccgtggctcagttcattccttagatgcaggcttgctgttgccatctggagatcctttcagtaaatcggacaatgacatgtttaaagatggactcaggagagcacagtctacagacagcttgggaacctcgggctcattgcaatccaaagctttaggctataactacaaagcaaaatctgctggaaacctggacgagtcagattttggaccactggtaggagcagattcagtgtctgagaactttgatactgcatcccttgggtcactccagatgccaagtgggtttatgttaaccaaagatcaggaaagagcaatcaaggcgatgacaccagaacaagaagagacagcgtccctcctctccagcgttacccagggcatggagagtgcctatgtgtcccctagtggttatcgtttagttagtgaaacagaatggaatctcttgcagaaagaggtacataatgctggaaataaacttggtagacgttgtgatatgtgttccaattacgaaaaacagttacaaggaattcagattcaggaggctgaaacgagagaccaggtgaaaaaactacagctgatgctaaggcaagctaatgaccagttagagaagacaatgaaagataagcaggagctggaagacttcataaagcaaagcagcgaagattcgagtcaccagatctctgcactcgtcctaagagcccaggcctccgagatcttacttgaagagttacagcaggggctttcccaggcaaagagggatgttcaggaacagatggcggtgctgatgcagtcacgggaacaggtttcagaagagctggtgaggttacagaaagataatgacagtctccagggaaagcacagcctgcatgtgtcattacagcaagcagaagacttcatcctcccagacactacagaggcactgcgggagttggtattaaaataccgtgaggacatcattaatgtgcggacagcagcagaccacgtagaagaaaagctgaaggctgagatacttttcctaaaagagcagatccaagcagaacagtgtttaaaagaaaatcttgaagaaactctgcaactagaaatagaaaactgcaaggaggaaatagcttctatttctagcctaaaagctgaattagaaagaataaaagtggaaaaaggacagttggagtccacattaagagagaagtctcaacagcttgagagtcttcaggaaataaagatcagtttggaagagcagttaaagaaagagactgctgctaaggctaccgttgaacaactaatgtttgaagagaagaataaagctcagagattacagacagaattagatgtcagtgagcaagtccagagggattttgtaaagctttcacagacccttcaggtgcagttaacgagcggatccggcaagtggatcttggggagaaaccggggaatctgagggtagctaacgggggaattaaccgggtctggaaaaggagacccctggggggttaccggcgccggggggaattccccccatgttcgaaagaaaaatttttttctcagataaaggacccacaagcaggaacaggccacaaaagaagggcggagacccacgggggcgctcacaataacgcgcatgctcggcgtagctatgtaatccgcgctatatatgtcatctctcttaagacgaccgacgttacaacactaacaacacacactacccgcgcagaacaacgagagacagaagagcgggccagagacagaaaatacaagaggaccggaccgagcgggaaggcagacgagaggagacacacggcgggcgaggcaggcacgacggaaacagcaggcgcaaacaggatgagagaggaggagagaccacatgagaccgggaacaggacgcagacgcggagcgcggaaacacacaacgccagccggcaaacgagcacagcgaaaggaaggcaagcgcaaaacgagagggaaaccatcgaacgaaaacagcaagaagaggggagaagggcacacaggaacgacacaacagagcgcgcgaacagcgcggaagcagacgcaggcagagggaagcaaaaggcgcgcccagggccaacgacagccgcacaaggcacgagaaccgaacgaagcagaaagggcgaagagagaggacggcagagaagcaacgaaagcacggcgcgcggcgagaggcgggagggaggagagcgaagcggggagcgacaccagcggagcacggcacgcccgcaaccaccacgcaccgcgcaaacaagagagggcagccaggcacaagaacggacgggccaggagcggagacgcgcacaggacgaggcacgaagagacacgagggccggcgggaaggagaagagccacacaccagcgacgcacgcaacgaagagcgaacaaggcacacacgaacgaggagagagaacgcacggaacggcagacacagtccagcagagcacaacccaagaccgcgggtacggcagacgaggagagaggggcaggagagagcgtacgcacaagagaacggagcgagcagcagaggagcagcaacgcagcaagagacgagcaaccgcacagcacgccgaccgcaacgcactggagcaaacggcacaacgagcagatccgagggcgaaggcgcagggacgactagcggcacgaataccgagccagcagcgagcgcagagtgcgagctacgagcccgagacgacagcacgagcagc

SEQ ID NO: 294891 - DNA, 1402 bp, Homo sapiens
tttttttttggagacggagtcatgctctgttgcccaggctagagtgcagtggtgtgatcttggctcactgcagcctgtgcctcctggattccagcgattctcctgcctcatcctcctgggtagctgggattacaagtacacaccaccaagcccagctaatttttgtatttttagtagagacagggagaatcacttgaacccgggaggtggagactacagtgagccgagatcacaccattgcactctggcctgggctggcctggatgatgagcaaaactctcccccccaaaaaaaaatcccagtccgttacacggtagctttggggaattatttttaaaatttttaattgttcttgctgtctccctttgaagtgactagtactctggtgagttaatctgctacatctcagctaaaccagtcaaagttcagaaaatctaggcaggagccacctgtagttatctcaccattgtttctccaggtgcagttagagcggatccggcaagctgactccttggagagaatccgggcaattctgaatgatactaaactgacagacattaaccagcttcctgagacatgacaccctcatggcaggattctagcctgcactttgggtttttaactcatctttagagcaacagtaattattatttaactcttaactgaagaaagagaagtcacaacaaaaggaagactggagaaatgcttacttctagagggagaagactgtgcggcacaggaaacagcaaacagtggggtgatctgcagcccagagaccttcaaatgcgaacactataaactccaggcttgattccaacaggcgtgggatcagatttggtgatggaaaaagcgctgtttccttgcctgctttctccaagacagattttcggaacacatttccctaccctaaagcgacatcccagtagtgtttggaattttctgttcatagatattggaagagagaatttgctttatctgttgtctagagctcatcagtaacagtattcagttagcagacagaagtgtagtatgctgtatgaatattttatattaaaatatgaaggtttgagagcaggcaaaaaaaatactgactgtattttgttttccttttaccattttatcttatcttgctttggaggaccttaaatgctactgaaacttacctgagaaccataggactgtggcaaacaaaaccaattcatgaagtgaattaatgatgaggatctgaaaacttggctggggctatatatactggaagttgaaggttaaaggaaaagcacaagaaactttggaagcactttttctgcatacttagatgatcttcatgggcccacagggtaccaggataaagccgaactggtaccatctactcttttgaagtgttttagtctagttattggat

SEQ ID NO: 294892 - DNA, 2282 bp, Homo sapiens
  misc_feature (2243)..(2243): n is a, c, g, or t
cgctgtcaggatgaggaggcggaggtcggcggtcgggtccgtctctgcccgcggctgtggcggcgccggcggatccagccttagcggtttctctctgggcggcggcggcggcggctcggttgacgcctcctccgccagctgagcccgcgggagcccaggacgccgcttccccgcccatccccgctccccgaggccggccgcctggtcatggcgcagccgggcccggcttcccagcctgacgtttctcttcagcaacgggtagcagaattggaaaaaattaatgcagaatttttacgtgcacaacagcagcttgaacaagaatttaatcaaaagagagcaaaatttaaggagttatatttggctaaagaggaggatctgaagaggcaaaatgcagtattacaagctgcacaagatgatttgggacaccttcgaacccagctgtgggaagctcaagcagagatggagaatattaaggcgattgccacagtctctgagaacaccaagcaagaagctatagatgaagtgaaaagacagtggagagaagaagttgcttcacttcaggctgttatgaaagaaacagttcgtgactatgagcaccagttccaccttaggctggagcaggagcgaacacagtgggcacagtatagagaatccgcagagagggaaatagctgatttaagaagaaggctgtctgaaggtcaagaggaggaaaatttagaaaatgaaatgaaaaaggcccaagaggatgctgagaaacttcggtccgttgtgatgccaatggaaaaaggaaattgcagctttgaaggataaactgacagaggctgaagacaaaattaaagagctggaggcctcaaaggttaaagaactgaatcattatctggaagctgagaaatcttgtaggactgatctagagatgtatgtagctgttttgaatactcagaaatctgttctacaggaagatgctgagaaactgcggaaagaattgcatgaagtttgccatctcttggagcaagagcgacaacaacacaaccagttaaaacatacgtggcagaaggccaatgaccagtttctggaatctcagcgtttactgatgagagacatgcagcgaatggagattgtgctaacttcagaacagctccgacaagttgaagaactgaagaagaaagatcaggaggatgatgaacaacaaagactcaataagagaaaggatcacaaaaaagcagatgttgaggaagaaataaaaataccagtagtgtgtgctttaactcaagaagaatcttcagcccagttatcaaatgaagaggagcatttagacagcacccgtggctcagttcattccttagatgcaggcttgctgttgccatctggagatcctttcagtaaatcggacaatgacatgtttaaagatggactcaggagagcacagtctacagacagcttgggaacctcgggctcattgcaatccaaagctttaggctataactacaaagcaaaatctgctggaaacctggacgagtcagattttggaccactggtaggagcagattcagtgtctgagaactttgatactgcatcccttgggtcactccagatgccaagtgggtttatgttaaccaaagatcaggaaagagcaatcaaggcgatgacaccagaacaagaagagacagcgtccctcctctccagcgttacccagggcatggagagtgcctatgtgtcccctagtggttatcgtttagttagtgaaacagaatggaatctcttgcagaaagaggtacataatgctggaaataaacttggtagacgttgtgatatgtgttccaattacgaaaaacagttacaaggaattcagattcaggaggctgaaacgagagaccaggtgaaaaaactacagctgatgctaaggcaagctaatgaccagttagagaagacaatgaaagataagcaggagctggaagacttcataaagcaaagcagcgaagattcgagtcaccagatctctgcactcgtcctaagagcccaggcctccgagatcttacttgaagagttacagcaggggctttcccaggcaaagagggatgttcaggaacagatggcggtgctgatgcagtcacgggaacaggtttcagaagagctggtgaggttacagaaagataatgacagtctccagggaaagcacagcctgcatgtgtcattacagcaagcagaagacttcatcctcccagacactacagaggcactgcggnagttggtatttaccgggagggccatcatttgtgccggcg

SEQ ID NO: 294893 - DNA, 1311 bp, Homo sapiens
cgctgtcaggatgaggaggcggaggtcggcggtcgggtccgtctctgcccgcggctgtggcggcgccggcggatccagccttagcggtttctctctgggcggcggcggcggcggctcggttgacgcctcctccgccagctgagcccgcgggagcccaggacgccgcttccccgcccatccccgctccccgaggccggccgcctggtcatggcgcagccgggcccggcttcccagcctgacgtttctcttcagcaacgggtagcagaattggaaaaaattaatgcagaatttttacgtgcacaacagcagcttgaacaagaatttaatcaaaagagagcaaaatttaaggagttatatttggctaaagaggaggatctgaagaggcaaaatgcagtattacaagctgcacaagatgatttgggacaccttcgaacccagctgtgggaagctcaagcagagatggagaatattaaggcgattgccacagtctctgagaacaccaagcaagaagctatagatgaagtgaaaagacagtggagagaagaagttgcttcacttcaggctgttatgaaagaaacagttcgtgactatgagcaccagttccaccttaggctggagcaggagcgaacacagtgggcacagtatagagaatccgcagagagggaaatagctgatttaagaagaaggctgtctgaaggtcaagaggaggaaaatttagaaaatgaaatgaaaaaggcccaagaggatgctgagaaacttcggtccgttgtgatgccaatggaaaaaggaaattgcagctttgaaggataaactgacagaggctgaagacaaaattaaagagctggaggcctcaaaggttatgaaacattgtaatccatttgcttgaaacccaagtttctgccccaatgccatgaacaaaattagaatcagtaatagggaaaaaaacctgtaatttagactatgcatcttaagaatctttctttaaaatgcaaaaaactgccgggcgaggtggctcacgcctgtaatcccagcactttgggaggctgaggcgggcggatcacctgaggttgggagttggagaccagtctgaccaacatggagaaaccccatctctactaaaaatacaaattaaccaggcatggtggcgcatgcctgtaatcccggctgctcccagcctcgggaggctgaggcaggagaatcgcttgaagcccggtggcggaggttgcagtgagctgagattgtgcctttgcactccggcctgggcaacaggagcgaaattctgtctcaataataaaaaataaatttaaatgc

SEQ ID NO: 294894 - DNA, 1882 bp, Homo sapiens
cgctgtcaggatgaggaggcggaggtcggcggtcgggtccgtctctgcccgcggctgtggcggcgccggcggatccagccttagcggtttctctctgggcggcggcggcggcggctcggttgacgcctcctccgccagctgagcccgcgggagcccaggacgccgcttccccgcccatccccgctccccgaggccggccgcctggtcatggcgcagccgggcccggcttcccagcctgacgtttctcttcagcaacgggtagcagaattggaaaaaattaatgcagaatttttacgtgcacaacagcagcttgaacaagaatttaatcaaaagagagcaaaatttaaggagttatatttggctaaagaggaggatctgaagaggcaaaatgcagtattacaagctgcacaagatgatttgggacaccttcgaacccagctgtgggaagctcaagcagagatggagaatattaaggcgattgccacagtctctgagaacaccaagcaagaagctatagatgaagtgaaaagacagtggagagaagaagttgcttcacttcaggctgttatgaaagaaacagttcgtgactatgagcaccagttccaccttaggctggagcaggagcgaacacagtgggcacagtatagagaatccgcagagagggaaatagctgatttaagaagaaggctgtctgaaggtcaagaggaggaaaatttagaaaatgaaatgaaaaaggcccaagaggatgctgagaaacttcggtccgttgtgatgccaatggaaaaaggaaattgcagctttgaaggataaactgacagaggctgaagacaaaattaaagagctggaggcctcaaaggttatgaaacattgtaatccatttgcttgaaacccaagtttctgccccaatgccatgaacaaaattagaatcagtaatagggaaaaaaacctgtaatttagactatgcatcttaagaatctttctttaaaatgcaaaaaactgccgggcgaggtggctcacgcctgtaatcccagcactttgggaggctgaggcgggcggatcacctgaggttgggagttggagaccagtctgaccaacatggagaaaccccatctctactaaaaatacaaattaaccaggcatggtggcgcatgcctgtaatcccggctgctcccagcctcgggaggctgaggcaggagaatcgcttgaagcccggtggcggaggttgcagtgagctgagattgtgcctttgcactccggcctgggcaacaggagcgaaattctgtctcaataataaaaaataaatttaaatgcaaaaaactgctttgagatggttttgctcttatggacatttaaaataatcacaataatgatgttttatcacaagtggctgctttgtcacaaagttaatgttcattttcttaagaaaatgagaccccgtctcattcattttcctattaaggaaaataaactgttcgaagttgaccttgttttctgatgccagctccagcattgatcttttagagataatgtagctatagtattgctgaatttgttggccataaagacacagcaaaagaattaaagtaggaacaggccaggtgttgtggctcacacctgtaatcccaatacttcaggaagctgaggcgggagaattgcttgtgcccaggaatttgagaccagcctgggcaacatagtgagacccctgtctctacaaaaattttttaaaaagccagacacggtggtgcatgcctgttgtcccacctacttgggagactgagatgggaggattacttcagcccgggagtttgagactacagtgaactggcactccagactgggtgacagagtgagaccctgtcccccacacccaaagaaaaaaagg

SEQ ID NO: 294895 - DNA, 946 bp, Homo sapiens
cgctgtcaggatgaggaggcggaggtcggcggtcgggtccgtctctgcccgcggctgtggcggcgccggcggatccagccttagcggtttctctctgggcggcggcggcggcggctcggttgacgcctcctccgccagctgagcccgcgggagcccaggacgccgcttccccgcccatccccgctccccgaggccggccgcctggtcatggcgcagccgggcccggcttcccagcctgacgtttctcttcagcaacgggtagcagaattggaaaaaattaatgcagaatttttacgtgcacaacagcagcttgaacaagaatttaatcaaaagagagcaaaatttaaggagttatatttggctaaagaggaggatctgaagaggcaaaatgcagtattacaagctgcacaagatgatttgggacaccttcgaacccagctgtgggaagctcaagcagagatggagaatattaaggcgattgccacagtctctgagaacaccaagcaagaagctatagatgaagtgaaaagacagtggagagaagaagttgcttcacttcaggctgttatgaaagaaacagttcgtgactatgagcaccagttccaccttaggctggagcaggagcgaacacagtgggcacagtatagagaatccgcagagagggaaatagctgatttaagaagaaggctgtctgaaggtcaagaggaggaaaatttagaaaatgaaatgaaaaaggatcccatccaggataccatattgcatttagttgtgtctccttagatgcctcttggctgtgacagtttctcagatttttcttgtttttaatgacctttctgtcattttttaaagtgctttttaaaggttttgtttatgatgacattcagcacttggaattgtgaagtcatatttatattaataaataacttgatttgtgatcagaaaaaaa

SEQ ID NO: 294896 - DNA, 317 bp, Homo sapiens
tacagaaaatctttagcttctttatttcctttcactctcacaaacccaataatcatttgtttcttgaatccaggcactgcgggagttggtattaaaataccgtgaggacatcattaatgtgcggacagcagcagaccacgtagaagaaaagctgaaggctgagatacttttcctaaaagagcagatccaagcagaacagtgtttaaaagaaaatcttgaagaaactctgcaactagaaatagaaaactgcaaggaggaaataggtgaagataaaagtgatgtagtttagaattagagtcactaaataaaactttagt

SEQ ID NO: 294897 - DNA, 824 bp, Homo sapiens
agcaataagaatatttagcttgataatagctttcaaatcacatgtactttttaaactaacttattcttcctcatttataacagaaactgtagattttgagcaatctgaattggtccccacctcagtgatttcttgccctgaaattatgagttgtgtttctcctgtttcattttgcaggtctttcctctttcaggtagccagagcatggagtgtgatttgaagctaattaactaaaaaggtgtaatttttcttcggtgttcatcatttcattaacctgttgatatctgagaagcggtttggttcctaagtaatacctgaggctactttgataatctctaataattttgtacattggagttgtcattataatttttttttctttttcccttagaacattcctgatgtagatgaagaaggctacagtattaaaccagaaacaaatcagaatgataccaaagagaaccatttctactcatctagtgattctgactccgaagatgaagaaccaaagaagtatcggatagaaattaagcctatgcatccaaataactcacatcacacaatggcttctttggatgaattaaaagtatctatagggaatataacactctccccagcaatatctagatacagtacaaacacgtttgtactctttatataaaagtctttatttttcttacctacctgtgtctggtcaaacattacttagcaattgttaagcatgttgactgaggaaatacttagtttataatttttatacagggaaataaacttgtgaatttggcttaattttgcttttgaaagtagaaagtgaaaatgtcaaa

SEQ ID NO: 294898 - DNA, 588 bp, Homo sapiens
ggtcatcatctctaagcttcgtctttctctagtattcatcctcatctgggaacttaacattcttctttttcttctttttattgccaagcataatgtcaaggtcatcctctggttcagtaggtgtgtcacggggtcccagccctgtcagccttggaaatcaggataccttacctgtggcagttgcccttacagaatctgttaatgcctactttaaaggagcagatcccaccaagtgtattgtgaagatcactggtgatatgacaatgtcatttccaagtggaattattaaagtcttcaccagcaatccaactccagctgtgttgtgcttcagggtgaaaaatatcagcagactagagcagattcttccaaatgcacagcttgtgttcagaaaaggaaccagtgatttacttgcttgggaccccctatttggaccatctcttgattcatcttcttcatcttcactaacttcatcatcatcagccaggcccacaactcctctttctgtaggcaccattgtcccacctccgaggcctgcttccagaccaaagcttacttcaggcaaactcagtgggattaatgaagggtacc

SEQ ID NO: 294899 - DNA, 5602 bp, Homo sapiens
  misc_feature (24)..(24): n is a, c, g, or t
  misc_feature (31)..(31): n is a, c, g, or t
  misc_feature (44)..(44): n is a, c, g, or t
  misc_feature (54)..(54): n is a, c, g, or t
  misc_feature (66)..(66): n is a, c, g, or t
  misc_feature (72)..(72): n is a, c, g, or t
  misc_feature (74)..(75): n is a, c, g, or t
  misc_feature (78)..(78): n is a, c, g, or t
  misc_feature (85)..(85): n is a, c, g, or t
  misc_feature (92)..(92): n is a, c, g, or t
  misc_feature (94)..(95): n is a, c, g, or t
  misc_feature (102)..(102): n is a, c, g, or t
  misc_feature (119)..(119): n is a, c, g, or t
  misc_feature (140)..(140): n is a, c, g, or t
  misc_feature (143)..(143): n is a, c, g, or t
  misc_feature (148)..(148): n is a, c, g, or t
  misc_feature (153)..(153): n is a, c, g, or t
  misc_feature (165)..(165): n is a, c, g, or t
  misc_feature (173)..(173): n is a, c, g, or t
  misc_feature (182)..(182): n is a, c, g, or t
  misc_feature (193)..(193): n is a, c, g, or t
  misc_feature (198)..(198): n is a, c, g, or t
  misc_feature (200)..(200): n is a, c, g, or t
  misc_feature (205)..(205): n is a, c, g, or t
ttttttttttttgagagagtctcnctctgtngcccaggctggantgcagtggcngatctcggctcnctgcangnnccncctcccnggttcangnnattctcntgcctcagcctcccgantagctgggactacaggcgccngcnaccangcccngctaattttttntatttttngtagagacngggtttcaccntgttngncaggntggagaatttttcttaattttagttaatgtctgagctctgagttaacctttcattacaaaaactgaattaatgttttctcccctgtggtattggtggtttttttttttttttaaatagacagggtcttgctctgttgcccagactggagtgcaatggtggaatcatagctcactgcagcctcaaactcctgggctcaaatgatgcttccacatctgcctcccaaagtgttgggattacaggcgtgagccaccacacgtatccggatccagtgcggttttaatgtagcataagagttgaacactgattaaaacctttttcatactcatcaataatcaacagcattcattagatttttttctggtacagtgtctctggtactgaatagagttggtgtacacactaaaggttttctcacattcatcacattttgactgtcttctccacaatggacttcctcatgaatagtaagttcagagagttggctacaacttctgctgcactgaacacactggtagggtttctcctcagcatgggttttctggtgttcaataagatcagtacatgtgctgaaggctttcccacatgcatcacacttatacggcttttcaccagtgtgtattttttgatggttaatgagatcagaacgccgactaaagcttttgccacactcatcacatggatttggtttcttcccagtgtggattctctggtgtagggctaagagtgagcactgactgaaagccttcctgcactcactgcatttatatggtttttccccagtgtggattctctggtgtttaatgaggtctgagatctgactgaaacttttgctgcactgtgtgcacagataatagtttttctccagtgtgaattctctgatgaagaataaggtcagaactctgactgaaggctttctcacaactattgcaatgataaggcttttcaccagagtgtactctctgatgtttagtgaggtctgagctttgactaaaacttttatcacactgattacatgcatatggtttctctccagtgtgtattctttgatgcttaacaagatctgaacggcgactaaagcttttagtacaatcactacatgcataaggtttctctccagtgtggattctctgatgaagaataaggttggagctctgactaaaggttttcccacattcatcacattcatagggtttctcacctgtatgaattctgtgatgtttaacaagatctcatcttcgactaaacattttattgcactgattacatgggtaaggcttctctccagtgtgaattcgttgatgattaataagatctgaaagcctactgaaggttttgctacattgatcacagggatagggtttctctccagtatgaatcctctgatgtaaaataaggactgagctctgattaaaagctttcccacactcattacatttatagggtttctctccagtgtggatccttcgatgtttaataaggtctgaattctgactgaaacttttgctacactgattacatggatatggtttctccccagtatggattctctgatgcagaataagatctgagctctgactgaaggctttcccacacacatcacatttatatggtttctccccagtgtggattctttgatgttttatcacatcagaactctgactaaaatgtttgttacactggttacaagtataaggcttctctccagtatggattctctgatgtttaaccagatctgagcgctggctaaaacttttactacaatgacggcattgatagggtttttctcctatatggattctctgatgtataataagatctgagctctgactgaaggctttcccacactcatcacatttataaggtttttcaccagtgtggactctttggtgtttaataaggtctgagctccaactgaaacttttaatacaccaattacaggaataaggtttctccccagtggcctttccacacttatcccattcataaggtttctcacagtgcgtttttcgatgcctaaaaaggcttgtactccaaacaaagctttgcccatattcgtcacagttatgaggtctccttttaaagacgttctgatctttttcatttaatttatccccaaattcacagaattctttgccttcagaatcctggagaacattctgagactgctagactcttctgtcaatggttcaatttttgctgtaattccctcctctgaagctggctttccaatcttggtcttgttctcaccatctgacagaaggtggtgttcctgagattcataattgaactggatctccatgggctgcaactggacacctcagtgtgcaagtggagaattaccatttcctctgtaagcttttcttgtccacataaaggtctgggacctggaggcaactgggcaccactgggcttggaagggaatcattgtgctgactacagatgtaatctctgagactagaccaccagaaaaatcctcgacttggtcaccggaccgctgtgaagcctcacacccggcgaacctgccatcgccctgtccgctctaggaatctggaaatgtagtgctagcaccacagatcttagagtggattataaatacaatccagaagctatggtggcacctagtgtgctttccaacatacaggtggtggtaccagtggatggaggagtaacgaacatgcagtcccttccccctgcaatatggaatgcagaacaaatgaaagccttttggaaattgtctagtatttcagaaaaatcagaaaatggaggttctgggtccctccgagcaaaatttgatctttcagaaggacctagtaaacccacgacacttgcagtacaattcctcagcgagggaagtaccctttcaggagtagatttcgaacttgtgggcactggctataggctttccttaataaagaagcggtttgctactggacgatacctggcggattgttgatggacctgggaaagtgatgtggcttcagggattacaaacctgccattctgcattatctgttctttccaaacactattttaacttgtatgatgtctttcaaacttagacatatttgagagctgactacaaacattaaatcgcacttttaaagtgagtcattgaaataaatagtactgaaatgattctctatgttgtaaatgatcaactacaatattcaggaagcacatttattcagattctcagtaaaaatgaagtttttgtaggattaatttttaaattatttccagtgtctatgttgaaaaaaagggttatagtgtaatatcaggcctaaagtttcagaagagcaagcacaaagtaatttagctttccatacatttttagagtcagagataactttgaaatttcataagtttgatattcagtggatacaaatagaacatgaattctaagttttgggtaatgttaactcagaacacttaatcaaattgagctatgtgccataaggtaatcagaccagagtccaagttgtatgcaaaaaatctataatttgattctcataaacatattaataaagtataagtgatgttttatatgatttttaaaaaaaattctcaagtgcaatgtgttttaaaataagcttgcaaatgacagcagagacatttacttctgcagttagttaactttataggagttgtgatttttttgatgaattaatgctgtagatttaatttatttttatatggaattgcataatgtgtgccttttaaaacaataacaaaaaccagagatgtgcctatacaatttgtgttcattaatgtgcctcactttttttctcagtctgaatcttctgttcagaatcttacagtgatcaagcatttttataagatatttgcaatttttgtaaatatttttggcctgcaactgggaaggggattcagagtcataaagcctaacttaagaatcctggctcacttctttggtgatacactgtagccactagaaagagaaataaacccaatggcatgtgtttacaggaagaaagattaccttcagatacttgacattaacctcatcaaaagtgtgtgaattttaaaacaaattctaaaaaaactatagtgctaaattggtaactggtattttgactctcaatttagcattttccttgatactttatcattgaaaatttatgcatttatttactgattgtgttgtgaacatgagttttatggtattttgtgagggatgcattttttaaaagattaattttggaaacagaaggagaagcactgccatttgtttttatttcaacaattggaaaaattaccaatttgtacattttaattattcaatttctactttgtaaaaatagggaaattatttgaagtgatatatttggttaaacatttctaaaaataaactaccaatactaaatagtaagaaacctaactttagtagcaaatcttgattaattgaagaaataaaatatttcggataaggtttcataatttacaaatgggaatttcatttataataataaatatgagtgtcctttatttgcctagtagaagtgataaattgtgttatatatgataatttatataaaaccactaattgttccgttaagcttcacagaaaataaaacctctattactagacatttatgtaacatcttgctgtactaaatacagcagaaaatctactctttagcaatatataacacagtatatgcttttttatatattcaatgttaggcccaagtctggaatttacatttgactaaagcagcacataagataatttgctaaaatgctaatctttactaaatagtgagctaaattagaatttctaactcttatattgtgctcttttaaatgccaattacagtcccttactggaattctaactgtaatttgctttgcaatcaaactgcttttagggcagccaatattttattattggaattcagacactgttcttaccgtgtttgtttttaatcaaatattacctaaaaatgtacaaattagtgaaatggttaaacttctgcactttcttagttaccacagtcttcataccaagtattgggtacaggttacaattttgaagccatatgagtttatattgattttttttttccatttaaaaatccactaatggtgtaaaagagaccagtagattttcaatgggaaatgtacctagcaagctggttcttgcttatatatagtgataaactttgtagctgcctctttaaccaagaatttgtaaacacaactctaataaatgtgagttttaaaggattgttatttactactttggattgtaattagaacaatgcacatctgtcttccaagattttgtaaatatttttgatttttttcattaaatgtaaattttacataaaagttgtgctcttaataaacatgtaatatataatttataaattggt

SEQ ID NO: 294900 - DNA, 5548 bp, Homo sapiens
  misc_feature (24)..(24): n is a, c, g, or t
  misc_feature (31)..(31): n is a, c, g, or t
  misc_feature (44)..(44): n is a, c, g, or t
  misc_feature (54)..(54): n is a, c, g, or t
  misc_feature (66)..(66): n is a, c, g, or t
  misc_feature (72)..(72): n is a, c, g, or t
  misc_feature (74)..(75): n is a, c, g, or t
  misc_feature (78)..(78): n is a, c, g, or t
  misc_feature (85)..(85): n is a, c, g, or t
  misc_feature (92)..(92): n is a, c, g, or t
  misc_feature (94)..(95): n is a, c, g, or t
  misc_feature (102)..(102): n is a, c, g, or t
  misc_feature (119)..(119): n is a, c, g, or t
  misc_feature (140)..(140): n is a, c, g, or t
  misc_feature (143)..(143): n is a, c, g, or t
  misc_feature (148)..(148): n is a, c, g, or t
  misc_feature (153)..(153): n is a, c, g, or t
  misc_feature (165)..(165): n is a, c, g, or t
  misc_feature (173)..(173): n is a, c, g, or t
  misc_feature (182)..(182): n is a, c, g, or t
  misc_feature (193)..(193): n is a, c, g, or t
  misc_feature (198)..(198): n is a, c, g, or t
  misc_feature (200)..(200): n is a, c, g, or t
  misc_feature (205)..(205): n is a, c, g, or t
ttttttttttttgagagagtctcnctctgtngcccaggctggantgcagtggcngatctcggctcnctgcangnnccncctcccnggttcangnnattctcntgcctcagcctcccgantagctgggactacaggcgccngcnaccangcccngctaattttttntatttttngtagagacngggtttcaccntgttngncaggntggagaatttttcttaattttagttaatgtctgagctctgagttaacctttcattacaaaaactgaattaatgttttctcccctgtggtattggtggtttttttttttttttaaatagacagggtcttgctctgttgcccagactggagtgcaatggtggaatcatagctcactgcagcctcaaactcctgggctcaaatgatgcttccacatctgcctcccaaagtgttgggattacaggcgtgagccaccacacgtatccggatccagtgcggttttaatgtagcataagagttgaacactgattaaaacctttttcatactcatcaataatcaacagcattcattagatttttttctggtacagtgtctctggtactgaatagagttggtgtacacactaaaggttttctcacattcatcacattttgactgtcttctccacaatggacttcctcatgaatagtaagttcagagagttggctacaacttctgctgcactgaacacactggtagggtttctcctcagcatgggttttctggtgttcaataagatcagtacatgtgctgaaggctttcccacatgcatcacacttatacggcttttcaccagtgtgtattttttgatggttaatgagatcagaacgccgactaaagcttttgccacactcatcacatggatttggtttcttcccagtgtggattctctggtgtagggctaagagtgagcactgactgaaagccttcctgcactcactgcatttatatggtttttccccagtgtggattctctggtgtttaatgaggtctgagatctgactgaaacttttgctgcactgtgtgcacagataatagtttttctccagtgtgaattctctgatgaagaataaggtcagaactctgactgaaggctttctcacaactattgcaatgataaggcttttcaccagagtgtactctctgatgtttagtgaggtctgagctttgactaaaacttttatcacactgattacatgcatatggtttctctccagtgtgtattctttgatgcttaacaagatctgaacggcgactaaagcttttagtacaatcactacatgcataaggtttctctccagtgtggattctctgatgaagaataaggttggagctctgactaaaggttttcccacattcatcacattcatagggtttctcacctgtatgaattctgtgatgtttaacaagatctcatcttcgactaaacattttattgcactgattacatgggtaaggcttctctccagtgtgaattcgttgatgattaataagatctgaaagcctactgaaggttttgctacattgatcacagggatagggtttctctccagtatgaatcctctgatgtaaaataaggactgagctctgattaaaagctttcccacactcattacatttatagggtttctctccagtgtggatccttcgatgtttaataaggtctgaattctgactgaaacttttgctacactgattacatggatatggtttctccccagtatggattctctgatgcagaataagatctgagctctgactgaaggctttcccacacacatcacatttatatggtttctccccagtgtggattctttgatgttttatcacatcagaactctgactaaaatgtttgttacactggttacaagtataaggcttctctccagtatggattctctgatgtttaaccagatctgagcgctggctaaaacttttactacaatgacggcattgatagggtttttctcctatatggattctctgatgtataataagatctgagctctgactgaaggctttcccacactcatcacatttataaggtttttcaccagtgtggactctttggtgtttaataaggtctgagctccaactgaaacttttaatacaccaattacaggaataaggtttctccccagtggcctttccacacttatcccattcataaggtttctcacagtgcgtttttcgatgcctaaaaaggcttgtactccaaacaaagctttgcccatattcgtcacagttatgaggtctccttttaaagacgttctgatctttttcatttaatttatccccaaattcacagaattctttgccttcagaatcctggagaacattctgagactgctagactcttctgtcaatggttcaatttttgctgtaattccctcctctgaagctggctttccaatcttggtcttgttctcaccatctgacagaaggtggtgttcctgagattcataattgaactggatctccatgggctgcaactggacacctcagtgtgcaagtggagaattaccatttcctctgtaagcttttcttgtccacataaaggtctgggacctggaggcaactgggcaccactgggcttggaagggaatcattgtgctgactacagatgtaatctctgagactagaccaccagaaaaatcctcgacttggtcaccggaccgctgtgaagcctcacacccggcgaacctgccatcgccctgtccgctctaggaatctggaaatgtagtgctagcaccacagatcttagagtggattataaatacaatccagaagctatggtggcacctagtgtgctttccaacatacaggtggtggtaccagtggatggaggagtaacgaacatgcagtcccttccccctgcaatatggaatgcagaacaaatgaaagccttttggaaattgtctagtatttcagaaaaatcagaaaatggaggttctgggtccctccgagcaaaatttgatctttcagaaggacctagtaaacccacgacacttgcagtacaattcctcagcgagggaagtaccctttcaggagtagatttcgaacttgtgggcactggctataggctttccttaataaagaagcggtttgctactggacgatacctggcggattgttgatggacctgggaaagtgatgtggcttcagggattacaaacctgccattctgcattatctgttctttccaaacactattttaacttgtatgatgtctttcaaacttagacatatttgagagctgactacaaacattaaatcgcacttttaaagtgagtcattgaaataaatagtactgaaatgattctctatgttgtaaatgatcaactacaatattcaggaagcacatttattcagattctcagtaaaaatgaagtttttgtaggattaatttttaaattatttccagtgtctatgttgaaaaaaagggttatagtgtaatatcaggcctaaagtttcagaagagcaagcacaaagtaatttagctttccatacatttttagagtcagagataactttgaaatttcataagtttgatattcagtggatacaaatagaacatgaattctaagttttgggtaatgttaactcagaacacttaatcaaattgagctatgtgccataaggtaatcagaccagagtccaagttgtatgcaaaaaatctataatttgattctcataaacatattaataaagtataagtgatgttttatatgatttttaaaaaaaattctcaagtgcaatgtgttttaaaataagcttgcaaatgacagcagagacatttacttctgcagttagttaactttataggagttgtgatttttttgatgaattaatgctgtagatttaatttatttttatatggaattgcataatgtgtgccttttaaaacatttttttctcagtctgaatcttctgttcagaatcttacagtgatcaagcatttttataagatatttgcaatttttgtaaatatttttggcctgcaactgggaaggggattcagagtcataaagcctaacttaagaatcctggctcacttctttggtgatacactgtagccactagaaagagaaataaacccaatggcatgtgtttacaggaagaaagattaccttcagatacttgacattaacctcatcaaaagtgtgtgaattttaaaacaaattctaaaaaaactatagtgctaaattggtaactggtattttgactctcaatttagcattttccttgatactttatcattgaaaatttatgcatttatttactgattgtgttgtgaacatgagttttatggtattttgtgagggatgcattttttaaaagattaattttggaaacagaaggagaagcactgccatttgtttttatttcaacaattggaaaaattaccaatttgtacattttaattattcaatttctactttgtaaaaatagggaaattatttgaagtgatatatttggttaaacatttctaaaaataaactaccaatactaaatagtaagaaacctaactttagtagcaaatcttgattaattgaagaaataaaatatttcggataaggtttcataatttacaaatgggaatttcatttataataataaatatgagtgtcctttatttgcctagtagaagtgataaattgtgttatatatgataatttatataaaaccactaattgttccgttaagcttcacagaaaataaaacctctattactagacatttatgtaacatcttgctgtactaaatacagcagaaaatctactctttagcaatatataacacagtatatgcttttttatatattcaatgttaggcccaagtctggaatttacatttgactaaagcagcacataagataatttgctaaaatgctaatctttactaaatagtgagctaaattagaatttctaactcttatattgtgctcttttaaatgccaattacagtcccttactggaattctaactgtaatttgctttgcaatcaaactgcttttagggcagccaatattttattattggaattcagacactgttcttaccgtgtttgtttttaatcaaatattacctaaaaatgtacaaattagtgaaatggttaaacttctgcactttcttagttaccacagtcttcataccaagtattgggtacaggttacaattttgaagccatatgagtttatattgattttttttttccatttaaaaatccactaatggtgtaaaagagaccagtagattttcaatgggaaatgtacctagcaagctggttcttgcttatatatagtgataaactttgtagctgcctctttaaccaagaatttgtaaacacaactctaataaatgtgagttttaaaggattgttatttactactttggattgtaattagaacaatgcacatctgtcttccaagattttgtaaatatttttgatttttttcattaaatgtaaattttacataaaagttgtgctcttaataaacatgtaatatataatttataaattggt

SEQ ID NO: 294901 - DNA, 4052 bp, Homo sapiens
atatatttattttaaaggtataaaaccaaggaaaagaaagacctttgctttgccaggaatcattaaaaaggaaaaagatgcagaatctgtggaatgtcctgatgcagattcattgaacattcctgatgtagatgaagaaggctacagtattaaaccagaaacaaatcagaatgataccaaagagaaccatttctactcatctagtgattctgactccgaagatgaagaaccaaagaagtatcggatagaaattaagcctatgcatccaaataactcacatcacacaatggcttctttggatgaattaaaagtatctatagggaatataacactctccccagcaatatctagatacagtacagtacagatgaatcggaatttgtctaatgaggagttaacaaaatcaaagccatctgctccacccaatgaaaaaggaaccagtgatttacttgcttgggaccccctatttggaccatctcttgattcatcttcttcatcttcactaacttcatcatcatcagccaggcccacaactcctctttctgtaggcaccattgtcccacctccgaggcctgcttccagaccaaagcttacttcaggcaaactcagtgggattaatgaaatacccaggccattcagcccacctgtaacttccaacaccagcccacctcctgctgcaccattagcccgggcagaaagttcttcttctatctcatcatctgcttcattgagtgctgccaatactccaacagtaggtgtgtcacggggtcccagccctgtcagccttggaaatcaggataccttacctgtggcagttgcccttacagaatctgttaatgcctactttaaaggagcagatcccaccaagtgtattgtgaagatcactggtgatatgacaatgtcatttccaagtggaattattaaagtcttcaccagcaatccaactccagctgtgttgtgcttcagggtgaaaaatatcagcagactagagcagattcttccaaatgcacagcttgtgttcagtgatccatcacaatgtgattccaacacaaaagatttttggatgaacatgcaagctgttacagtctacctcaagaagctgtcagagcaaaatccagctgcttcttattataatgtagatgtattaaagtatcaggtatcatcaaatggtattcagtccactcctctgaatcttgcaacatactggaaatgtagtgctagcaccacagatcttagagtggattataaatacaatccagaagctatggtggcacctagtgtgctttccaacatacaggtggtggtaccagtggatggaggagtaacgaacatgcagtcccttccccctgcaatatggaatgcagaacaaatgaaagccttttggaaattgtctagtatttcagaaaaatcagaaaatggaggttctgggtccctccgagcaaaatttgatctttcagaaggacctagtaaacccacgacacttgcagtacaattcctcagcgagggaagtaccctttcaggagtagatttcgaacttgtgggcactggctataggctttccttaataaagaagcggtttgctactggacgatacctggcggattgttgatggacctgggaaagtgatgtggcttcagggattacaaacctgccattctgcattatctgttctttccaaacactattttaacttgtatgatgtctttcaaacttagacatatttgagagctgactacaaacattaaatcgcacttttaaagtgagtcattgaaataaatagtactgaaatgattctctatgttgtaaatgatcaactacaatattcaggaagcacatttattcagattctcagtaaaaatgaagtttttgtaggattaatttttaaattatttccagtgtctatgttgaaaaaaagggttatagtgtaatatcaggcctaaagtttcagaagagcaagcacaaagtaatttagctttccatacatttttagagtcagagataactttgaaatttcataagtttgatattcagtggatacaaatagaacatgaattctaagttttgggtaatgttaactcagaacacttaatcaaattgagctatgtgccataaggtaatcagaccagagtccaagttgtatgcaaaaaatctataatttgattctcataaacatattaataaagtataagtgatgttttatatgatttttaaaaaaaattctcaagtgcaatgtgttttaaaataagcttgcaaatgacagcagagacatttacttctgcagttagttaactttataggagttgtgatttttttgatgaattaatgctgtagatttaatttatttttatatggaattgcataatgtgtgccttttaaaacaataacaaaaaccagagatgtgcctatacaatttgtgttcattaatgtgcctcactttttttctcagtctgaatcttctgttcagaatcttacagtgatcaagcatttttataagatatttgcaatttttgtaaatatttttggcctgcaactgggaaggggattcagagtcataaagcctaacttaagaatcctggctcacttctttggtgatacactgtagccactagaaagagaaataaacccaatggcatgtgtttacaggaagaaagattaccttcagatacttgacattaacctcatcaaaagtgtgtgaattttaaaacaaattctaaaaaaactatagtgctaaattggtaactggtattttgactctcaatttagcattttccttgatactttatcattgaaaatttatgcatttatttactgattgtgttgtgaacatgagttttatggtattttgtgagggatgcattttttaaaagattaattttggaaacagaaggagaagcactgccatttgtttttatttcaacaattggaaaaattaccaatttgtacattttaattattcaatttctactttgtaaaaatagggaaattatttgaagtgatatatttggttaaacatttctaaaaataaactaccaatactaaatagtaagaaacctaactttagtagcaaatcttgattaattgaagaaataaaatatttcggataaggtttcataatttacaaatgggaatttcatttataataataaatatgagtgtcctttatttgcctagtagaagtgataaattgtgttatatatgataatttatataaaaccactaattgttccgttaagcttcacagaaaataaaacctctattactagacatttatgtaacatcttgctgtactaaatacagcagaaaatctactctttagcaatatataacacagtatatgcttttttatatattcaatgttaggcccaagtctggaatttacatttgactaaagcagcacataagataatttgctaaaatgctaatctttactaaatagtgagctaaattagaatttctaactcttatattgtgctcttttaaatgccaattacagtcccttactggaattctaactgtaatttgctttgcaatcaaactgcttttagggcagccaatattttattattggaattcagacactgttcttaccgtgtttgtttttaatcaaatattacctaaaaatgtacaaattagtgaaatggttaaacttctgcactttcttagttaccacagtcttcataccaagtattgggtacaggttacaattttgaagccatatgagtttatattgattttttttttccatttaaaaatccactaatggtgtaaaagagaccagtagattttcaatgggaaatgtacctagcaagctggttcttgcttatatatagtgataaactttgtagctgcctctttaaccaagaatttgtaaacacaactctaataaatgtgagttttaaaggattgttatttactactttggattgtaattagaacaatgcacatctgtcttccaagattttgtaaatatttttgatttttttcattaaatgtaaattttacataaaagttgtgctcttaataaacatgtaatatataatttataaattggt

SEQ ID NO: 294902 - DNA, 4328 bp, Homo sapiens
agcaataagaatatttagcttgataatagctttcaaatcacatgtactttttaaactaacttattcttcctcatttataacagaaactgtagattttgagcaatctgaattggtccccacctcagtgatttcttgccctgaaattatgagttgtgtttctcctgtttcattttgcaggtctttcctctttcaggtagccagagcatggagtgtgatttgaagctaattaactaaaaaggtgtaatttttcttcggtgttcatcatttcattaacctgttgatatctgagaagcggtttggttcctaagtaatacctgaggctactttgataatctctaataattttgtacattggagttgtcattataatttttttttctttttcccttagaacattcctgatgtagatgaagaaggctacagtattaaaccagaaacaaatcagaatgataccaaagagaaccatttctactcatctagtgattctgactccgaagatgaagaaccaaagaagtatcggatagaaattaagcctatgcatccaaataactcacatcacacaatggcttctttggatgaattaaaagtatctatagggaatataacactctccccagcaatatctagatacagtacagtacagatgaatcggaatttgtctaatgaggagttaacaaaatcaaagccatctgctccacccaatgaaaaaggaaccagtgatttacttgcttgggaccccctatttggaccatctcttgattcatcttcttcatcttcactaacttcatcatcatcagccaggcccacaactcctctttctgtaggcaccattgtcccacctccgaggcctgcttccagaccaaagcttacttcaggcaaactcagtgggattaatgaaatacccaggccattcagcccacctgtaacttccaacaccagcccacctcctgctgcaccattagcccgggcagaaagttcttcttctatctcatcatctgcttcattgagtgctgccaatactccaacagtaggtgtgtcacggggtcccagccctgtcagccttggaaatcaggataccttacctgtggcagttgcccttacagaatctgttaatgcctactttaaaggagcagatcccaccaagtgtattgtgaagatcactggtgatatgacaatgtcatttccaagtggaattattaaagtcttcaccagcaatccaactccagctgtgttgtgcttcagggtgaaaaatatcagcagactagagcagattcttccaaatgcacagcttgtgttcagtgatccatcacaatgtgattccaacacaaaagatttttggatgaacatgcaagctgttacagtctacctcaagaagctgtcagagcaaaatccagctgcttcttattataatgtagatgtattaaagtatcaggtatcatcaaatggtattcagtccactcctctgaatcttgcaacatactggaaatgtagtgctagcaccacagatcttagagtggattataaatacaatccagaagctatggtggcacctagtgtgctttccaacatacaggtggtggtaccagtggatggaggagtaacgaacatgcagtcccttccccctgcaatatggaatgcagaacaaatgaaagccttttggaaattgtctagtatttcagaaaaatcagaaaatggaggttctgggtccctccgagcaaaatttgatctttcagaaggacctagtaaacccacgacacttgcagtacaattcctcagcgagggaagtaccctttcaggagtagatttcgaacttgtgggcactggctataggctttccttaataaagaagcggtttgctactggacgatacctggcggattgttgatggacctgggaaagtgatgtggcttcagggattacaaacctgccattctgcattatctgttctttccaaacactattttaacttgtatgatgtctttcaaacttagacatatttgagagctgactacaaacattaaatcgcacttttaaagtgagtcattgaaataaatagtactgaaatgattctctatgttgtaaatgatcaactacaatattcaggaagcacatttattcagattctcagtaaaaatgaagtttttgtaggattaatttttaaattatttccagtgtctatgttgaaaaaaagggttatagtgtaatatcaggcctaaagtttcagaagagcaagcacaaagtaatttagctttccatacatttttagagtcagagataactttgaaatttcataagtttgatattcagtggatacaaatagaacatgaattctaagttttgggtaatgttaactcagaacacttaatcaaattgagctatgtgccataaggtaatcagaccagagtccaagttgtatgcaaaaaatctataatttgattctcataaacatattaataaagtataagtgatgttttatatgatttttaaaaaaaattctcaagtgcaatgtgttttaaaataagcttgcaaatgacagcagagacatttacttctgcagttagttaactttataggagttgtgatttttttgatgaattaatgctgtagatttaatttatttttatatggaattgcataatgtgtgccttttaaaacaataacaaaaaccagagatgtgcctatacaatttgtgttcattaatgtgcctcactttttttctcagtctgaatcttctgttcagaatcttacagtgatcaagcatttttataagatatttgcaatttttgtaaatatttttggcctgcaactgggaaggggattcagagtcataaagcctaacttaagaatcctggctcacttctttggtgatacactgtagccactagaaagagaaataaacccaatggcatgtgtttacaggaagaaagattaccttcagatacttgacattaacctcatcaaaagtgtgtgaattttaaaacaaattctaaaaaaactatagtgctaaattggtaactggtattttgactctcaatttagcattttccttgatactttatcattgaaaatttatgcatttatttactgattgtgttgtgaacatgagttttatggtattttgtgagggatgcattttttaaaagattaattttggaaacagaaggagaagcactgccatttgtttttatttcaacaattggaaaaattaccaatttgtacattttaattattcaatttctactttgtaaaaatagggaaattatttgaagtgatatatttggttaaacatttctaaaaataaactaccaatactaaatagtaagaaacctaactttagtagcaaatcttgattaattgaagaaataaaatatttcggataaggtttcataatttacaaatgggaatttcatttataataataaatatgagtgtcctttatttgcctagtagaagtgataaattgtgttatatatgataatttatataaaaccactaattgttccgttaagcttcacagaaaataaaacctctattactagacatttatgtaacatcttgctgtactaaatacagcagaaaatctactctttagcaatatataacacagtatatgcttttttatatattcaatgttaggcccaagtctggaatttacatttgactaaagcagcacataagataatttgctaaaatgctaatctttactaaatagtgagctaaattagaatttctaactcttatattgtgctcttttaaatgccaattacagtcccttactggaattctaactgtaatttgctttgcaatcaaactgcttttagggcagccaatattttattattggaattcagacactgttcttaccgtgtttgtttttaatcaaatattacctaaaaatgtacaaattagtgaaatggttaaacttctgcactttcttagttaccacagtcttcataccaagtattgggtacaggttacaattttgaagccatatgagtttatattgattttttttttccatttaaaaatccactaatggtgtaaaagagaccagtagattttcaatgggaaatgtacctagcaagctggttcttgcttatatatagtgataaactttgtagctgcctctttaaccaagaatttgtaaacacaactctaataaatgtgagttttaaaggattgttatttactactttggattgtaattagaacaatgcacatctgtcttccaagattttgtaaatatttttgatttttttcattaaatgtaaattttacataaaagttgtgctcttaataaacatgtaatatataatttataaattggt

SEQ ID NO: 294903 - DNA, 3986 bp, Homo sapiens
atatatttattttaaaggtataaaaccaaggaaaagaaagacctttgctttgccaggaatcattaaaaaggaaaaagatgcagaatctgtggaatgtcctgatgcagattcattgaacattcctgatgtagatgaagaaggctacagtattaaaccagaaacaaatcagaatgataccaaagagaaccatttctactcatctagtgattctgactccgaagatgaagaaccaaagaagtatcggatagaaattaagcctatgcatccaaataactcacatcacacaatggcttctttggatgaattaaaagtatctatagggaatataacactctccccagcaatatctagatacagtacagtacagatgaatcggaatttgtctaatgaggagttaacaaaatcaaagccatctgctccacccaatgaaaaaggaaccagtgatttacttgcttgggaccccctatttggaccatctcttgattcatcttcttcatcttcactaacttcatcatcatcagccaggcccacaactcctctttctgtaggcaccattgtcccacctccgaggcctgcttccagaccaaagcttacttcaggcaaactcagtgggattaatgaaatacccaggccattcagcccacctgtaacttccaacaccagcccacctcctgctgcaccattagcccgggcagaaagttcttcttctatctcatcatctgcttcattgagtgctgccaatactccaacagtaggtgtgtcacggggtcccagccctgtcagccttggaaatcaggataccttacctgtggcagttgcccttacagaatctgttaatgcctactttaaaggagcagatcccaccaagtgtattgtgaagatcactggtgatatgacaatgtcatttccaagtggaattattaaagtcttcaccagcaatccaactccagctgtgttgtgcttcagggtgaaaaatatcagcagactagagcagattcttccaaatgcacagcttgtgttcagtgatccatcacaatgtgattccaacacaaaagatttttggatgaacatgcaagctgttacagtctacctcaagaagctgtcagagcaaaatccagctgcttcttattataatgtagatgtattaaagtatcaggtatcatcaaatggtattcagtccactcctctgaatcttgcaacatactggaaatgtagtgctagcaccacagatcttagagtggattataaatacaatccagaagctatggtggcacctagtgtgctttccaacatacaggtggtggtaccagtggatggaggagtaacgaacatgcagtcccttccccctgcaatatggaatgcagaacaaatgaaagccttttggaaattgtctagtatttcagaaaaatcagaaaatggagtacaattcctcagcgagggaagtaccctttcaggagtagatttcgaacttgtgggcactggctataggctttccttaataaagaagcggtttgctactggacgatacctggcggattgttgatggacctgggaaagtgatgtggcttcagggattacaaacctgccattctgcattatctgttctttccaaacactattttaacttgtatgatgtctttcaaacttagacatatttgagagctgactacaaacattaaatcgcacttttaaagtgagtcattgaaataaatagtactgaaatgattctctatgttgtaaatgatcaactacaatattcaggaagcacatttattcagattctcagtaaaaatgaagtttttgtaggattaatttttaaattatttccagtgtctatgttgaaaaaaagggttatagtgtaatatcaggcctaaagtttcagaagagcaagcacaaagtaatttagctttccatacatttttagagtcagagataactttgaaatttcataagtttgatattcagtggatacaaatagaacatgaattctaagttttgggtaatgttaactcagaacacttaatcaaattgagctatgtgccataaggtaatcagaccagagtccaagttgtatgcaaaaaatctataatttgattctcataaacatattaataaagtataagtgatgttttatatgatttttaaaaaaaattctcaagtgcaatgtgttttaaaataagcttgcaaatgacagcagagacatttacttctgcagttagttaactttataggagttgtgatttttttgatgaattaatgctgtagatttaatttatttttatatggaattgcataatgtgtgccttttaaaacaataacaaaaaccagagatgtgcctatacaatttgtgttcattaatgtgcctcactttttttctcagtctgaatcttctgttcagaatcttacagtgatcaagcatttttataagatatttgcaatttttgtaaatatttttggcctgcaactgggaaggggattcagagtcataaagcctaacttaagaatcctggctcacttctttggtgatacactgtagccactagaaagagaaataaacccaatggcatgtgtttacaggaagaaagattaccttcagatacttgacattaacctcatcaaaagtgtgtgaattttaaaacaaattctaaaaaaactatagtgctaaattggtaactggtattttgactctcaatttagcattttccttgatactttatcattgaaaatttatgcatttatttactgattgtgttgtgaacatgagttttatggtattttgtgagggatgcattttttaaaagattaattttggaaacagaaggagaagcactgccatttgtttttatttcaacaattggaaaaattaccaatttgtacattttaattattcaatttctactttgtaaaaatagggaaattatttgaagtgatatatttggttaaacatttctaaaaataaactaccaatactaaatagtaagaaacctaactttagtagcaaatcttgattaattgaagaaataaaatatttcggataaggtttcataatttacaaatgggaatttcatttataataataaatatgagtgtcctttatttgcctagtagaagtgataaattgtgttatatatgataatttatataaaaccactaattgttccgttaagcttcacagaaaataaaacctctattactagacatttatgtaacatcttgctgtactaaatacagcagaaaatctactctttagcaatatataacacagtatatgcttttttatatattcaatgttaggcccaagtctggaatttacatttgactaaagcagcacataagataatttgctaaaatgctaatctttactaaatagtgagctaaattagaatttctaactcttatattgtgctcttttaaatgccaattacagtcccttactggaattctaactgtaatttgctttgcaatcaaactgcttttagggcagccaatattttattattggaattcagacactgttcttaccgtgtttgtttttaatcaaatattacctaaaaatgtacaaattagtgaaatggttaaacttctgcactttcttagttaccacagtcttcataccaagtattgggtacaggttacaattttgaagccatatgagtttatattgattttttttttccatttaaaaatccactaatggtgtaaaagagaccagtagattttcaatgggaaatgtacctagcaagctggttcttgcttatatatagtgataaactttgtagctgcctctttaaccaagaatttgtaaacacaactctaataaatgtgagttttaaaggattgttatttactactttggattgtaattagaacaatgcacatctgtcttccaagattttgtaaatatttttgatttttttcattaaatgtaaattttacataaaagttgtgctcttaataaacatgtaatatataatttataaattggt

SEQ ID NO: 294904 - DNA, 1391 bp, Homo sapiens
atatatttattttaaaggtataaaaccaaggaaaagaaagacctttgctttgccaggaatcattaaaaaggaaaaagatgcagaatctgtggaatgtcctgatgcagattcattgaacattcctgatgtagatgaagaaggctacagtattaaaccagaaacaaatcagaatgataccaaagagaaccatttctactcatctagtgattctgactccgaagatgaagaaccaaagaagtatcggatagaaattaagcctatgcatccaaataactcacatcacacaatggcttctttggatgaattaaaagtatctatagggaatataacactctccccagcaatatctagatacagtacagtacagatgaatcggaatttgtctaatgaggagttaacaaaatcaaagccatctgctccacccaatgaaaaaggaaccagtgatttacttgcttgggaccccctatttggaccatctcttgattcatcttcttcatcttcactaacttcatcatcatcagccaggcccacaactcctctttctgtaggcaccattgtcccacctccgaggcctgcttccagaccaaagcttacttcaggcaaactcagtgggattaatgaaatacccaggccattcagcccacctgtaacttccaacaccagcccacctcctgctgcaccattagcccgggcagaaagttcttcttctatctcatcatctgcttcattgagtgctgccaatactccaacagtaggtgtgtcacggggtcccagccctgtcagccttggaaatcaggataccttacctgtggcagttgcccttacagaatctgttaatgcctactttaaaggagcagatcccaccaagtgtattgtgaagatcactggtgatatgacaatgtcatttccaagtggaattattaaagtcttcaccagcaatccaactccagctgtgttgtgcttcagggtgaaaaatatcagcagactagagcagattcttccaaatgcacagcttgtgttcagtgatccatcacaatgtgattccaacacaaaagatttttggatgaacatgcaagctgttacagtctacctcaagaagctgtcagagcaaaatccagctgcttcttattataatgtagatgtattaaagtatcaggtatcatcaaatggtattcagtccactcctctgaatcttgcaacatactggaaatgtagtgctagcaccacagatcttagagtggattataaatacaatccagaagctatggtggcacctagtgtgctttccaacatacaggtggtggtaccagtggatggaggagtaacgaacatgcagtcccttccccctgcaatatggtaaattaaacatacgtttctgaattcccactaaa

SEQ ID NO: 294905 - DNA, 814 bp, Homo sapiens
agcaataagaatatttagcttgataatagctttcaaatcacatgtactttttaaactaacttattcttcctcatttataacagaaactgtagattttgagcaatctgaattggtccccacctcagtgatttcttgccctgaaattatgagttgtgtttctcctgtttcattttgcaggtctttcctctttcaggtagccagagcatggagtgtgatttgaagctaattaactaaaaaggtgtaatttttcttcggtgttcatcatttcattaacctgttgatatctgagaagcggtttggttcctaagtaatacctgaggctactttgataatctctaataattttgtacattggagttgtcattataatttttttttctttttcccttagaacattcctgatgtagatgaagaaggctacagtattaaaccagaaacaaatcagaatgataccaaagagaaccatttctactcatctagtgattctgactccgaagatgaagaaccaaagaagtatcggatagaaattaagcctatgcatccaaataactcacatcacacaatggcttctttggatgaattaaaagtatctatagggaatataacactctccccagcaatatctagatacagtacagtacagatgaatcggaatttgtctaatgaggagttaacaaaatcaaagccatctgctccacccaatgaaaaaggaaccagtgatttacttgcttgggaccccctatttggaccatctcttgattcatcttcttcatcttcactaacttcatcatcatcaggtaaatatatatatgta

SEQ ID NO: 294906 - DNA, 162 bp, Homo sapiens
atagagattagagcattttatttaaacacttttcaaaatccctgttttaggtgtattgtgaagatcactggtgatatgacaatgtcatttccaagtggaattattaaagtcttcaccagcaatccaactccagctgtgttgtgcttcagggtgaaaaatatc

SEQ ID NO: 294907 - DNA, 254 bp, Homo sapiens
aaattggtaagaaatattatttctcacaataaatgttaagcacatagaaaatgcgctggtatttatttaaaggcataattcagcaacctcttcgcagggacttgggcaaatctgcatgaatctagctcactgtcagaacttcagagggacttaaatttggggaattggtaatattagggttacagcatagcaaattatggtttcgtaaaaggggatgggactacgttacgacattgggcaaataaacatatttc

SEQ ID NO: 294908 - DNA, 2116 bp, Homo sapiens
cggggaattcgaatgggagaggcgggcccaaggagggagtggaatggccgcgggcggctcgacgcagcagaggcgacgcgagatggcggcagcttcagcggcggcgatctcaggagctggtcgctgtcggctaagcaagattggagctactcgtcgtccacctccagctcgcgtaagggtggctgtgcgactgcggccatttgtggatggaacagcgggagcaagtgatcccccctgtgtgcggggcatggacagctgctctctagagattgctaactggaggaaccaccaggagactctcaaataccagtttgatgccttctatggggagaggagtactcagcaggacatctatgcaggttcagtgcagcccatcctaaggcacttgctggaagggcagaatgccagtgtgcttgcctatggacccacaggagctgggaagacgcacacaatgctgggcagcccagagcaacctggggtgatcccgcgggctctcatggacctcctgcagctcacaagggaggagggtgccgagggccggccatgggccctttctgtcaccatgtcttacctagagatctaccaggagaaggtattagacctcctggaccctgcttcgggagacctggtaatccgagaagactgccgggggaatatcctgattccgggtctctcccagaagcccatcagtagctttgctgattttgagcggcacttcctgccagccagtcgaaatcggactgtaggagccacccggctcaaccagcgctcctcccgcagtcatgctgtgctcctggtcaaggtggaccagcgggaacgtttggccccatttcgccagcgagagggaaaactctacctgattgacttggctgggtcagaggacaaccggcgcacaggcaacaagggccttcggctaaaagagagtggagccatcaacacctccctgtttgtcctgggcaaagtggtagatgcgctgaatcagggcctccctcgtgtaccttatcgggacagcaagctcactcgcctattgcaggactctctgggtggctcagcccacagtatccttattgccaacattgcccctgagagacgcttctacctagacacagtctccgcactcaactttgctgccaggtccaaggaggtgatcaatcggccttttaccaatgagagcctgcagcctcatgccttgggacctgttaagctgtctcagaaagaattgcttggtccaccagaggcaaagagagcccgaggccctgaggaagaggagattgggagccctgagcccatggcagctccagcctctgcctcccagaaactcagccccctacagaagctaagcagcatggacccggccatgctggagcgcctcctcagcttggaccgtctgcttgcctcccaggggagccagggggcccctctgttgagtaccccaaagcgagagcggatggtgctaatgaagacagtagaagagaaggacctagagattgagaggcttaagacgaagcaaaaagaactggaggccaagatgttggcccagaaggctgaggaaaaggagaaccattgtcccacaatgctccggcccctttcacatcgcacagtcacaggggcaaagcccctgaaaaaggctgtggtgatgcccctacagctaattcaggagcaggcagcatccccaaatgccgagatccacatcctgaagaataaaggccggaagagaaagctggagtccctggatgccctagagcctgaggagaaggctgaggactgctgggagctacagatcagcccggagctactggctcatgggcgccaaaaaatactggatctgctgaacgaaggctcagcccgagatctccgcagtcttcagcgcattggcccgaagaaggcccagctaatcgtgggctggcgggagctccacggccccttcagccaggtggaggacctggaacgcgtggagggcataacggggaaacagatggagtccttcctgaaggcaaacatcctgggtctcgccgccggccagcgctgtggcgcctcctgaccgtcgtctcctcactccgccttttcaaatttttgtataaccccgtgttgtgtaaatacagtttttgctccggtg

SEQ ID NO: 294909 - DNA, 2249 bp, Homo sapiens
cggggaattcgaatgggagaggcgggcccaaggagggagtggaatggccgcgggcggctcgacgcagcagaggcgacgcgagatggcggcagcttcagcggcggcgatctcaggagctggtcgctgtcggctaagcaagattggagctactcgtcgtccacctccagctcgcgtaagggtggctgtgcgactgcggccatttgtggatggaacagcgggagcaagtgatcccccctgtgtgcggggcatggacagctgctctctagagattgctaactggaggaaccaccaggagactctcaaataccagtttgatgccttctatggggagaggagtactcagcaggacatctatgcaggttcagtgcagcccatcctaaggcacttgctggaagggcagaatgccagtgtgcttgcctatggacccacaggagctgggaagacgcacacaatgctgggcagcccagagcaacctggggtgatcccgcgggctctcatggacctcctgcagctcacaagggaggagggtgccgagggccggccatgggccctttctgtcaccatgtcttacctagagatctaccaggagaaggtattagacctcctggaccctgcttcgggagacctggtaatccgagaagactgccgggggaatatcctgattccgggtctctcccagaagcccatcagtagctttgctgattttgagcggcacttcctgccagccagtcgaaatcggactgtaggagccacccggctcaaccagcgctcctcccgcagtcatgctgtgctcctggtcaaggtggaccagcgggaacgtttggccccatttcgccagcgagagggaaaactctacctgattgacttggctgggtcagaggacaaccggcgcacaggcaacaagggccttcggctaaaagagagtggagccatcaacacctccctgtttgtcctgggcaaagtggtagatgcgctgaatcagggcctccctcgtgtaccttatcgggacagcaagctcactcgcctattgcaggtcaggcccacctgtctcagggaagaaggggctgcagaaggaggttctcaggcctgctgtggggtggggaatagcagttgaggcataggaaggctgggcttctgacccacccactgcctggtctcaccctcaggactctctgggtggctcagcccacagtatccttattgccaacattgcccctgagagacgcttctacctagacacagtctccgcactcaactttgctgccaggtccaaggaggtgatcaatcggccttttaccaatgagagcctgcagcctcatgccttgggacctgttaagctgtctcagaaagaattgcttggtccaccagaggcaaagagagcccgaggccctgaggaagaggagattgggagccctgagcccatggcagctccagcctctgcctcccagaaactcagccccctacagaagctaagcagcatggacccggccatgctggagcgcctcctcagcttggaccgtctgcttgcctcccaggggagccagggggcccctctgttgagtaccccaaagcgagagcggatggtgctaatgaagacagtagaagagaaggacctagagattgagaggcttaagacgaagcaaaaagaactggaggccaagatgttggcccagaaggctgaggaaaaggagaaccattgtcccacaatgctccggcccctttcacatcgcacagtcacaggggcaaagcccctgaaaaaggctgtggtgatgcccctacagctaattcaggagcaggcagcatccccaaatgccgagatccacatcctgaagaataaaggccggaagagaaagctggagtccctggatgccctagagcctgaggagaaggctgaggactgctgggagctacagatcagcccggagctactggctcatgggcgccaaaaaatactggatctgctgaacgaaggctcagcccgagatctccgcagtcttcagcgcattggcccgaagaaggcccagctaatcgtgggctggcgggagctccacggccccttcagccaggtggaggacctggaacgcgtggagggcataacggggaaacagatggagtccttcctgaaggcaaacatcctgggtctcgccgccggccagcgctgtggcgcctcctgaccgtcgtctcctcactccgccttttcaaatttttgtataaccccgtgttgtgtaaatacagtttttgctccggtg

SEQ ID NO: 294910 - DNA, 2186 bp, Homo sapiens
  misc_feature (2129)..(2129): n is a, c, g, or t
cggggaattcgaatgggagaggcgggcccaaggagggagtggaatggccgcgggcggctcgacgcagcagaggcgacgcgagatggcggcagcttcagcggcggcgatctcaggagctggtcgctgtcggctaagcaagattggagctactcgtcgtccacctccagctcgcgtaagggtggctgtgcgactgcggccatttgtggatggaacagcgggagcaagtgatcccccctgtgtgcggggcatggacagctgctctctagagattgctaactggaggaaccaccaggagactctcaaataccagtttgatgccttctatggggagaggagtactcagcaggacatctatgcaggttcagtgcagcccatcctaaggcacttgctggaagggcagaatgccagtgtgcttgcctatggacccacaggagctgggaagacgcacacaatgctgggcagcccagagcaacctggggtgatcccgcgggctctcatggacctcctgcagctcacaagggaggagggtgccgagggccggccatgggccctttctgtcaccatgtcttacctagagatctaccaggagaaggtattagacctcctggaccctgcttcgggagacctggtaatccgagaagactgccgggggaatatcctgattccgggtctctcccagaagcccatcagtagctttgctgattttgagcggcacttcctgccagccagtcgaaatcggactgtaggagccacccggctcaaccagcgctcctcccgcagtcatgctgtgctcctggtcaaggtggaccagcgggaacgtttggccccatttcgccagcgagagggaaaactctacctgattgacttggctgggtcagaggacaaccggcgcacaggcaacaagggccttcggctaaaagagagtggagccatcaacacctccctgtttgtcctgggcaaagtggtagatgcgctgaatcagggcctccctcgtgtaccttatcgggacagcaagctcactcgcctattgcaggactctctgggtggctcagcccacagtatccttattgccaacattgcccctgagagacgcttctacctagacacagtctccgcactcaactttgctgccaggtccaaggaggtgatcaatcggccttttaccaatgagagcctgcagcctcatgccttgggacctgttaagctgtctcagaaagaattgcttggtccaccagaggcaaagagagcccgaggccctgaggaagaggagattgggagccctgagcccatggcagctccagcctctgcctcccagaaactcagccccctacagaagctaagcagcatggacccggccatgctggagcgcctcctcagcttggaccgtctgcttgcctcccaggggagccagggggcccctctgttgagtaccccaaagcgagagcggatggtgctaatgaagacagtagaagagaaggacctagagattgagaggcttaagacgaagcaaaaagaactggaggccaagatgttggcccagaaggctgaggaaaaggagaaccattgtcccacaatgctccggcccctttcacatcgcacagtcacaggggcaaagcccctgaaaaaggctgtggtgatgcccctacagctaattcaggagcaggcagcatccccaaatgccgagatccacatcctgaagaataaaggccggaagagaaagctggagtccctggatgccctagagcctgaggagaaggctgaggactgctgggagctacagatcagcccggagctactggctcatgggcgccaaaaaatactggatctgctgaacgaaggctcagcccgagatctccgcagtcttcagcgcattggcccgaagaaggcccagctaatcgtgggctggcgggagctccacggccccttcagccaggtggaggacctggaacgcgtggagggcataacggggaaacagatggagtccttcctgaaggcaaacatcctgggtctcgccgccggccagcgctgtggcgcctcctgaccgtcgtctcctcactccgccttttcaaatttttgtataaccccgtgttgtgtaaatacagtttttgctccggtgaaaaaaaaaaatnatacaatacattatcattttctcacccaatatatcaacatcatccctaccctctcac

SEQ ID NO: 294911 - DNA, 2166 bp, Homo sapiens
cggggaattcgaatgggagaggcgggcccaaggagggagtggaatggccgcgggcggctcgacgcagcagaggcgacgcgagatggcggcagcttcagcggcggcgatctcaggagctggtcgctgtcggctaagcaagattggagctactcgtcgtccacctccagctcgcgtaagggtggctgtgcgactgcggccatttgtggatggaacagcgggagcaagtgatcccccctgtgtgcggggcatggacagctgctctctagagattgctaactggaggaaccaccaggagactctcaaataccagtttgatgccttctatggggagaggagtactcagcaggacatctatgcaggttcagtgcagcccatcctaaggcacttgctggaagggcagaatgccagtgtgcttgcctatggacccacaggagctgggaagacgcacacaatgctgggcagcccagagcaacctggggtgatcccgcgggctctcatggacctcctgcagctcacaagggaggagggtgccgagggccggccatgggccctttctgtcaccatgtcttacctagagatctaccaggagaaggtattagacctcctggaccctgcttcgggagacctggtaatccgagaagactgccgggggaatatcctgattccgggtctctcccagaagcccatcagtagctttgctgattttgagcggcacttcctgccagccagtcgaaatcggactgtaggagccacccggctcaaccagcgctcctcccgcagtcatgctgtgctcctggtcaaggtggaccagcgggaacgtttggccccatttcgccagcgagagggaaaactctacctgattgacttggctgggtcagaggacaaccggcgcacaggcaacaagggccttcggctaaaagagagtggagccatcaacacctccctgtttgtcctgggcaaagtggtagatgcgctgaatcagggcctccctcgtgtaccttatcgggacagcaagctcactcgcctattgcaggactctctgggtggctcagcccacagtatccttattgccaacattgcccctgagagacgcttctacctagacacagtctccgcactcaactttgctgccaggtccaaggaggtgatcaatcggccttttaccaatgagagcctgcagcctcatgccttgggacctgttaagctgtctcagaaagaattgcttggtccaccagaggcaaagagagcccgaggccctgaggaagaggagattgggagccctgagcccatggcagctccagcctctgcctcccagaaactcagccccctacagaagctaagcagcatggacccggccatgctggagcgcctcctcagcttggaccgtctgcttgcctcccaggggagccagggggcccctctgttgagtaccccaaagcgagagcggatggtgctaatgaagacagtagaagagaaggacctagagattgaggctgccctggagttgggtctggatcacatctccctgatcctttccaacagaggcttaagacgaagcaaaaagaactggaggccaagatgttggcccagaaggctgaggaaaaggagaaccattgtcccacaatgctccggcccctttcacatcgcacagtcacaggggcaaagcccctgaaaaaggctgtggtgatgcccctacagctaattcaggagcaggcagcatccccaaatgccgagatccacatcctgaagaataaaggccggaagagaaagctggagtccctggatgccctagagcctgaggagaaggctgaggactgctgggagctacagatcagcccggagctactggctcatgggcgccaaaaaatactggatctgctgaacgaaggctcagcccgagatctccgcagtcttcagcgcattggcccgaagaaggcccagctaatcgtgggctggcgggagctccacggccccttcagccaggtggaggacctggaacgcgtggagggcataacggggaaacagatggagtccttcctgaaggcaaacatcctgggtctcgccgccggccagcgctgtggcgcctcctgaccgtcgtctcctcactccgccttttcaaatttttgtataaccccgtgttgtgtaaatacagtttttgctccggtg

SEQ ID NO: 294912 - DNA, 2147 bp, Homo sapiens
cggggaattcgaatgggagaggcgggcccaaggagggagtggaatggccgcgggcggctcgacgcagcagaggcgacgcgagatggcggcagcttcagcggcggcgatctcaggagctggtcgctgtcggctaagcaagattggagctactcgtcgtccacctccagctcgcgtaagggtggctgtgcgactgcggccatttgtggatggaacagcgggagcaagtgatcccccctgtgtgcggggcatggacagctgctctctagagattgctaactggaggaaccaccaggagactctcaaataccagtttgatgccttctatggggagaggagtactcagcaggacatctatgcaggttcagtgcagcccatcctaaggcacttgctggaagggcagaatgccagtgtgcttgcctatggacccacaggagctgggaagacgcacacaatgctgggcagcccagagcaacctggggtgatcccgcgggctctcatggacctcctgcagctcacaagggaggagggtgccgagggccggccatgggccctttctgtcaccatgtcttacctagagatctaccaggagaaggtattagacctcctggaccctgcttcgggagacctggtaatccgagaagactgccgggggaatatcctgattccgggtctctcccagaagcccatcagtagctttgctgattttgagcggcacttcctgccagccagtcgaaatcggactgtaggagccacccggctcaaccagcgctcctcccgcagtcatgctgtgctcctggtcaaggtggaccagcgggaacgtttggccccatttcgccagcgagagggaaaactctacctgattgacttggctgggtcagaggacaaccggcgcacaggcaacaagggccttcggctaaaagagagtggagccatcaacacctccctgtttgtcctgggcaaagtggtagatgcgctgaatcagggcctccctcgtgtaccttatcgggacagcaagctcactcgcctattgcaggactctctgggtggctcagcccacagtatccttattgccaacattgcccctgagagacgcttctacctagacacagtctccgcactcaactttgctgccaggtccaaggaggtgatcaatcggccttttaccaatgagagcctgcagcctcatgccttgggacctgttaagctgtctcagaaagaattgcttggtccaccagaggcaaagagagcccgaggccctgaggaagaggagattgggagccctgagcccatggcagctccagcctctgcctcccagaaactcagccccctacagaagctaagcagcatggacccggccatgctggagcgcctcctcagcttggaccgtctgcttgcctcccaggggagccagggggcccctctgttgagtaccccaaagcgagagcggatggtgctaatgaagacagtagaagagaaggacctagagattgagaggcttaagacgaagcaaaaagaactggaggccaagatgttggcccagaaggctgaggaaaaggagaaccattgtcccacaatgctccggcccctttcacatcgcacagtcacaggggcaaagcccctgaaaaaggctgtggtgatgcccctacagctaattcaggagcaggcagcatccccaaatgccgagatccacatcctgaagaataaaggccggaagagaaagctggagtccctggatgccctagagcctgaggagaaggctgaggactgctgggagctacagatcagcccggagctactggctcatgggcgccaaaaaatactggatctgctgaacgaaggctcagcccgagatctccgcagtcttcagcgcattggcccgaagaaggcccagctaatcgtgggctggcgggagctccacggccccttcagccaggtggaggacctggaacgcgtggagggcataacggggaaacagatggagtccttcctgaaggcaaacatcctgggtctcgccgccggccagcgctgtggcgcctcctgaccgtcgtctcctcactccgccttttcaaatttttgtataaccccgtgttgtgtaaatacagtttttgctccggtgatgcttccgcctgatttttggggctgcgggg

SEQ ID NO: 294913 - DNA, 2351 bp, Homo sapiens
cggggaattcgaatgggagaggcgggcccaaggagggagtggaatggccgcgggcggctcgacgcagcagaggcgacgcgagatggcggcagcttcagcggcggcgatctcaggagctggtcgctgtcggctaagcaagattggagctactcgtcgtccacctccagctcgcgtaagggtggctgtgcgactgcggccatttgtggatggaacagcgggagcaagtgatcccccctgtgtgcggggcatggacagctgctctctagagattgctaactggaggaaccaccaggagactctcaaataccagtttgatgccttctatggggagaggagtactcagcaggacatctatgcaggttcagtgcagcccatcctaaggcacttgctggaagggcagaatgccagtgtgcttgcctatggacccacaggagctgggaagacgcacacaatgctgggcagcccagagcaacctggggtgatcccgcgggctctcatggacctcctgcagctcacaagggaggagggtgccgagggccggccatgggccctttctgtcaccatgtcttacctagagatctaccaggagaaggtattagacctcctggaccctgcttcgggagacctggtaatccgagaagactgccgggggaatatcctgattccgggtctctcccagaagcccatcagtagctttgctgattttgagcggcacttcctgccagccagtcgaaatcggactgtaggagccacccggctcaaccagcgctcctcccgcagtcatgctgtgctcctggtcaaggtggaccagcgggaacgtttggccccatttcgccagcgagagggaaaactctacctgattgacttggctgggtcagaggacaaccggcgcacaggcaacaagggccttcggctaaaagagagtggagccatcaacacctccctgtttgtcctgggcaaagtggtagatgcgctgaatcagggcctccctcgtgtaccttatcgggacagcaagctcactcgcctattgcaggactctctgggtggctcagcccacagtatccttattgccaacattgcccctgagagacgcttctacctagacacagtctccgcactcaactttgctgccaggtccaaggaggtgatcaatcggccttttaccaatgagagcctgcagcctcatgccttgggacctgttaagctgtctcagaaagaattgcttggtccaccagaggcaaagagagcccgaggccctgaggaagaggagattgggagccctgagcccatggcagctccagcctctgcctcccagaaactcagccccctacagaagctaagcagcatggacccggccatgctggagcgcctcctcagcttggaccgtctgcttgcctcccaggggagccagggggcccctctgttgagtaccccaaagcgagagcggatggtgctaatgaagacagtagaagagaaggacctagagattgagaggcttaagacgaagcaaaaagaactggaggccaagatgttggcccagaaggctgaggaaaaggagaaccattgtcccacaatgctccggcccctttcacatcgcacagtcacaggggcaaagcccctgaaaaaggctgtggtgatgcccctacagctaattcaggagcaggcagcatccccaaatgccgagatccacatcctgaagaataaaggccggaagagaaagcaactccatgagaagggtgctaatattaccactgggtactgagtagtacctctctttcactagttgcataataagaattaacccagagagtgacctgagggcgggattttggacacacttgacaagagaggaagaggctggagcgcaggaggtagctggtgctgggctcctagtcttggcagaggagcccaaagcacttggctgccctgcgtgtcactcatctccctttgcctccctggagtccctggatgccctagagcctgaggagaaggctgaggactgctgggagctacagatcagcccggagctactggctcatgggcgccaaaaaatactggatctgctgaacgaaggctcagcccgagatctccgcagtcttcagcgcattggcccgaagaaggcccagctaatcgtgggctggcgggagctccacggccccttcagccaggtggaggacctggaacgcgtggagggcataacggggaaacagatggagtccttcctgaaggcaaacatcctgggtctcgccgccggccagcgctgtggcgcctcctgaccgtcgtctcctcactccgccttttcaaatttttgtataaccccgtgttgtgtaaatacagtttttgctccggtg

SEQ ID NO: 294914 - DNA, 2421 bp, Homo sapiens
  misc_feature (2364)..(2364): n is a, c, g, or t
cggggaattcgaatgggagaggcgggcccaaggagggagtggaatggccgcgggcggctcgacgcagcagaggcgacgcgagatggcggcagcttcagcggcggcgatctcaggagctggtcgctgtcggctaagcaagattggagctactcgtcgtccacctccagctcgcgtaagggtggctgtgcgactgcggccatttgtggatggaacagcgggagcaagtgatcccccctgtgtgcggggcatggacagctgctctctagagattgctaactggaggaaccaccaggagactctcaaataccagtttgatgccttctatggggagaggagtactcagcaggacatctatgcaggttcagtgcagcccatcctaaggcacttgctggaagggcagaatgccagtgtgcttgcctatggacccacaggagctgggaagacgcacacaatgctgggcagcccagagcaacctggggtgatcccgcgggctctcatggacctcctgcagctcacaagggaggagggtgccgagggccggccatgggccctttctgtcaccatgtcttacctagagatctaccaggagaaggtattagacctcctggaccctgcttcgggagacctggtaatccgagaagactgccgggggaatatcctgattccgggtctctcccagaagcccatcagtagctttgctgattttgagcggcacttcctgccagccagtcgaaatcggactgtaggagccacccggctcaaccagcgctcctcccgcagtcatgctgtgctcctggtcaaggtggaccagcgggaacgtttggccccatttcgccagcgagagggaaaactctacctgattgacttggctgggtcagaggacaaccggcgcacaggcaacaagggccttcggctaaaagagagtggagccatcaacacctccctgtttgtcctgggcaaagtggtagatgcgctgaatcagggcctccctcgtgtaccttatcgggacagcaagctcactcgcctattgcaggactctctgggtggctcagcccacagtatccttattgccaacattgcccctgagagacgcttctacctagacacagtctccgcactcaactttgctgccaggtccaaggaggtgatcaatcggccttttaccaatgagagcctgcagcctcatgccttgggacctgttaagctgtctcagaaagaattgcttggtccaccagaggcaaagagagcccgaggccctgaggaagaggagattgggagccctgagcccatggcagctccagcctctgcctcccagaaactcagccccctacagaagctaagcagcatggacccggccatgctggagcgcctcctcagcttggaccgtctgcttgcctcccaggggagccagggggcccctctgttgagtaccccaaagcgagagcggatggtgctaatgaagacagtagaagagaaggacctagagattgagaggcttaagacgaagcaaaaagaactggaggccaagatgttggcccagaaggctgaggaaaaggagaaccattgtcccacaatgctccggcccctttcacatcgcacagtcacaggggcaaagcccctgaaaaaggctgtggtgatgcccctacagctaattcaggagcaggcagcatccccaaatgccgagatccacatcctgaagaataaaggccggaagagaaagcaactccatgagaagggtgctaatattaccactgggtactgagtagtacctctctttcactagttgcataataagaattaacccagagagtgacctgagggcgggattttggacacacttgacaagagaggaagaggctggagcgcaggaggtagctggtgctgggctcctagtcttggcagaggagcccaaagcacttggctgccctgcgtgtcactcatctccctttgcctccctggagtccctggatgccctagagcctgaggagaaggctgaggactgctgggagctacagatcagcccggagctactggctcatgggcgccaaaaaatactggatctgctgaacgaaggctcagcccgagatctccgcagtcttcagcgcattggcccgaagaaggcccagctaatcgtgggctggcgggagctccacggccccttcagccaggtggaggacctggaacgcgtggagggcataacggggaaacagatggagtccttcctgaaggcaaacatcctgggtctcgccgccggccagcgctgtggcgcctcctgaccgtcgtctcctcactccgccttttcaaatttttgtataaccccgtgttgtgtaaatacagtttttgctccggtgaaaaaaaaaaatnatacaatacattatcattttctcacccaatatatcaacatcatccctaccctctcac

SEQ ID NO: 294915 - DNA, 2077 bp, Homo sapiens
cggggaattcgaatgggagaggcgggcccaaggagggagtggaatggccgcgggcggctcgacgcagcagaggcgacgcgagatggcggcagcttcagcggcggcgatctcaggagctggtcgctgtcggctaagcaagattggagctactcgtcgtccacctccagctcgcgtaagggtggctgtgcgactgcggccatttgtggatggaacagcgggagcaagtgatcccccctgtgtgcggggcatggacagctgctctctagagattgctaactggaggaaccaccaggagactctcaaataccagtttgatgccttctatggggagaggagtactcagcaggacatctatgcaggttcagtgcagcccatcctaaggcacttgctggaagggcagaatgccagtgtgcttgcctatggacccacaggagctgggaagacgcacacaatgctgggcagcccagagcaacctggggtgatcccgcgggctctcatggacctcctgcagctcacaagggaggagggtgccgagggccggccatgggccctttctgtcaccatgtcttacctagagatctaccaggagaaggtattagacctcctggaccctgcttcgggagacctggtaatccgagaagactgccgggggaatatcctgattccgggtctctcccagaagcccatcagtagctttgctgattttgagcggcacttcctgccagccagtcgaaatcggactgtaggagccacccggctcaaccagcgctcctcccgcagtcatgctgtgctcctggtcaaggtggaccagcgggaacgtttggccccatttcgccagcgagagggaaaactctacctgattgacttggctgggtcagaggacaaccggcgcacaggcaacaagggccttcggctaaaagagagtggagccatcaacacctccctgtttgtcctgggcaaagtggtagatgcgctgaatcagggcctccctcgtgtaccttatcgggacagcaagctcactcgcctattgcaggactctctgggtggctcagcccacagtatccttattgccaacattgcccctgagagacgcttctacctagacacagtctccgcactcaactttgctgccaggtccaaggaggtgatcaatcggccttttaccaatgagagcctgcagcctcatgccttgggacctgttaagctgtctcagaaagaattgcttggtccaccagaggcaaagagagcccgaggccctgaggaagaggagattgggagccctgagcccatggcagctccagcctctgcctcccagaaactcagccccctacagaagctaagcagcatggacccggccatgctggagcgcctcctcagcttggaccgtctgcttgcctcccaggggagccagggggcccctctgttgagtaccccaaagcgagagcggatggtgctaatgaagacagtagaagagaaggacctagagattgagaggcttaagacgaagcaaaaagaactggaggccaagatgttggcccagaaggctgaggaaaaggagaaccattgtcccacaatgctccggcccctttcacatcgcacagtcacaggggcaaagcccctgaaaaaggctgtggtgatgcccctacagctaattcaggagcaggcagcatccccaaatgccgagatccacatcctgaagaataaaggccggaagagaaagctggagtccctggatgccctagagcctgaggagaaggctgaggactgctgggagctacagatcagcccggagctactggctcatgggcgccaaaaaatactggatctgctgaacgaaggctcagcccgagatctccgcagtcttcagcgcattggcccgaagaaggcccagctaatcgtgggctggcgggagctccacggccccttcagccaggtggaggacctggaacgcgtggagggcataacggggaaacagatggagtccttcctgaaggcaaacatcctgggtctcgccgccggccagcgctgtggcgcctcctgaccgtttactccgtgccaggggacccggccctttttt

SEQ ID NO: 294916 - DNA, 2204 bp, Homo sapiens
cggggaattcgaatgggagaggcgggcccaaggagggagtggaatggccgcgggcggctcgacgcagcagaggcgacgcgagatggcggcagcttcagcggcggcgatctcaggagctggtcgctgtcggctaagcaagattggagctactcgtcgtccacctccagctcgcgtaagggtggctgtgcgactgcggccatttgtggatggaacagcgggagcaagtgatcccccctgtgtgcggggcatggacagctgctctctagagattgctaactggaggaaccaccaggagactctcaaataccagtttgatgccttctatggggagaggagtactcagcaggacatctatgcaggttcagtgcagcccatcctaaggcacttgctggaagggcagaatgccagtgtgcttgcctatggacccacaggagctgggaagacgcacacaatgctgggcagcccagagcaacctggggtgatcccgcgggctctcatggacctcctgcagctcacaagggaggagggtgccgagggccggccatgggccctttctgtcaccatgtcttacctagagatctaccaggagaaggtattagacctcctggaccctgcttcgggagacctggtaatccgagaagactgccgggggaatatcctgattccgggtctctcccagaagcccatcagtagctttgctgattttgagcggcacttcctgccagccagtcgaaatcggactgtaggagccacccggctcaaccagcgctcctcccgcagtcatgctgtgctcctggtcaaggtggaccagcgggaacgtttggccccatttcgccagcgagagggaaaactctacctgattgacttggctgggtcagaggacaaccggcgcacaggcaacaagggccttcggctaaaagagagtggagccatcaacacctccctgtttgtcctgggcaaagtggtagatgcgctgaatcagggcctccctcgtgtaccttatcgggacagcaagctcactcgcctattgcaggactctctgggtggctcagcccacagtatccttattgccaacattgcccctgagagacgcttctacctagacacagtctccgcactcaactttgctgccaggtccaaggaggtgatcaatcggccttttaccaatgagagcctgcagcctcatgccttgggacctgttaagctgtctcagaaagaattgcttggtccaccagaggcaaagagagcccgaggccctgaggaagaggagattgggagccctgagcccatggcagctccagcctctgcctcccagaaactcagccccctacagaagctaagcagcatggacccggccatgctggagcgcctcctcagcttggaccgtctgcttgcctcccaggggagccagggggcccctctgttgagtaccccaaagcgagagcggatggtgctaatgaagacagtagaagagaaggacctagagattgagaggcttaagacgaagcaaaaagaactggaggccaagatgttggcccagaaggctgaggaaaaggagaaccattgtcccacaatgctccggcccctttcacatcgcacagtcacaggggcaaagcccctgaaaaaggctgtggtgatgcccctacagctaattcaggagcaggcagcatccccaaatgccgagatccacatcctgaagaataaaggccggaagagaaagctggagtccctggatgccctagagcctgaggagaaggctgaggactgctgggagctacagatcagcccggagctactggctcatgggcgccaaaaaatactggatctgctgaacgaaggctcagcccgagatctccgcagtcttcagcgcattggcccgaagaaggcccagctaatcgtgggctggcgggagctccacggccccttcagccaggtggaggacctggaacgcgtggagggcataacggggaaacagatggagtccttcctgaaggtgaagtcacggccctgcccctcctctgcctgtcctgcgccccgcgcccctctctaacgtcgctgtctccctccctcctgtgttgcaggcaaacatcctgggtctcgccgccggccagcgctgtggcgcctcctgaccgtcgtctcctcactccgccttttcaaatttttgtataaccccgtgttgtgtaaatacagtttttgctccggtg

SEQ ID NO: 294917 - DNA, 2204 bp, Homo sapiens
cggggaattcgaatgggagaggcgggcccaaggagggagtggaatggccgcgggcggctcgacgcagcagaggcgacgcgagatggcggcagcttcagcggcggcgatctcaggagctggtcgctgtcggctaagcaagattggagctactcgtcgtccacctccagctcgcgtaagggtggctgtgcgactgcggccatttgtggatggaacagcgggagcaagtgatcccccctgtgtgcggggcatggacagctgctctctagagattgctaactggaggaaccaccaggagactctcaaataccagtttgatgccttctatggggagaggagtactcagcaggacatctatgcaggttcagtgcagcccatcctaaggcacttgctggaagggcagaatgccagtgtgcttgcctatggacccacaggagctgggaagacgcacacaatgctgggcagcccagagcaacctggggtgatcccgcgggctctcatggacctcctgcagctcacaagggaggagggtgccgagggccggccatgggccctttctgtcaccatgtcttacctagagatctaccaggagaaggtattagacctcctggaccctgcttcgggagacctggtaatccgagaagactgccgggggaatatcctgattccgggtctctcccagaagcccatcagtagctttgctgattttgagcggcacttcctgccagccagtcgaaatcggactgtaggagccacccggctcaaccagcgctcctcccgcagtcatgctgtgctcctggtcaaggtggaccagcgggaacgtttggccccatttcgccagcgagagggaaaactctacctgattgacttggctgggtcagaggacaaccggcgcacaggcaacaagggccttcggctaaaagagagtggagccatcaacacctccctgtttgtcctgggcaaagtggtagatgcgctgaatcagggcctccctcgtgtaccttatcgggacagcaagctcactcgcctattgcaggactctctgggtggctcagcccacagtatccttattgccaacattgcccctgagagacgcttctacctagacacagtctccgcactcaactttgctgccaggtccaaggaggtgatcaatcggccttttaccaatgagagcctgcagcctcatgccttgggacctgttaagctgtctcagaaagaattgcttggtccaccagaggcaaagagagcccgaggccctgaggaagaggagattgggagccctgagcccatggcagctccagcctctgcctcccagaaactcagccccctacagaagctaagcagcatggacccggccatgctggagcgcctcctcagcttggaccgtctgcttgcctcccaggggagccagggggcccctctgttgagtaccccaaagcgagagcggatggtgctaatgaagacagtagaagagaaggacctagagattgagaggcttaagacgaagcaaaaagaactggaggccaagatgttggcccagaaggctgaggaaaaggagaaccattgtcccacaatgctccggcccctttcacatcgcacagtcacaggggcaaagcccctgaaaaaggctgtggtgatgcccctacagctaattcaggagcaggcagcatccccaaatgccgagatccacatcctgaagaataaaggccggaagagaaagctggagtccctggatgccctagagcctgaggagaaggctgaggactgctgggagctacagatcagcccggagctactggctcatgggcgccaaaaaatactggatctgctgaacgaaggctcagcccgagatctccgcagtcttcagcgcattggcccgaagaaggcccagctaatcgtgggctggcgggagctccacggccccttcagccaggtagcagcccactggactgggggagggcgggggcgggggagaccgggtacccccgagaccctgtcccctatcgatcctgtcccgccaggtggaggacctggaacgcgtggagggcataacggggaaacagatggagtccttcctgaaggcaaacatcctgggtctcgccgccggccagcgctgtggcgcctcctgaccgtcgtctcctcactccgccttttcaaatttttgtataaccccgtgttgtgtaaatacagtttttgctccggtg

SEQ ID NO: 294918 - DNA, 2292 bp, Homo sapiens
cggggaattcgaatgggagaggcgggcccaaggagggagtggaatggccgcgggcggctcgacgcagcagaggcgacgcgagatggcggcagcttcagcggcggcgatctcaggagctggtcgctgtcggctaagcaagattggagctactcgtcgtccacctccagctcgcgtaagggtggctgtgcgactgcggccatttgtggatggaacagcgggagcaagtgatcccccctgtgtgcggggcatggacagctgctctctagagattgctaactggaggaaccaccaggagactctcaaataccagtttgatgccttctatggggagaggagtactcagcaggacatctatgcaggttcagtgcagcccatcctaaggcacttgctggaagggcagaatgccagtgtgcttgcctatggacccacaggagctgggaagacgcacacaatgctgggcagcccagagcaacctggggtgatcccgcgggctctcatggacctcctgcagctcacaagggaggagggtgccgagggccggccatgggccctttctgtcaccatgtcttacctagagatctaccaggagaaggtattagacctcctggaccctgcttcgggagacctggtaatccgagaagactgccgggggaatatcctgattccgggtctctcccagaagcccatcagtagctttgctgattttgagcggcacttcctgccagccagtcgaaatcggactgtaggagccacccggctcaaccagcgctcctcccgcagtcatgctgtgctcctggtcaaggtggaccagcgggaacgtttggccccatttcgccagcgagagggaaaactctacctgattgacttggctgggtcagaggacaaccggcgcacaggcaacaagggccttcggctaaaagagagtggagccatcaacacctccctgtttgtcctgggcaaagtggtagatgcgctgaatcagggcctccctcgtgtaccttatcgggacagcaagctcactcgcctattgcaggactctctgggtggctcagcccacagtatccttattgccaacattgcccctgagagacgcttctacctagacacagtctccgcactcaactttgctgccaggtccaaggaggtgatcaatcggccttttaccaatgagagcctgcagcctcatgccttgggacctgttaagctgtctcagaaagaattgcttggtccaccagaggcaaagagagcccgaggccctgaggaagaggagattgggagccctgagcccatggcagctccagcctctgcctcccagaaactcagccccctacagaagctaagcagcatggacccggccatgctggagcgcctcctcagcttggaccgtctgcttgcctcccaggggagccagggggcccctctgttgagtaccccaaagcgagagcggatggtgctaatgaagacagtagaagagaaggacctagagattgagaggcttaagacgaagcaaaaagaactggaggccaagatgttggcccagaaggctgaggaaaaggagaaccattgtcccacaatgctccggcccctttcacatcgcacagtcacaggggcaaagcccctgaaaaaggctgtggtgatgcccctacagctaattcaggagcaggcagcatccccaaatgccgagatccacatcctgaagaataaaggccggaagagaaagctggagtccctggatgccctagagcctgaggagaaggctgaggactgctgggagctacagatcagcccggagctactggctcatgggcgccaaaaaatactggatctgctgaacgaaggctcagcccgagatctccgcagtcttcagcgcattggcccgaagaaggcccagctaatcgtgggctggcgggagctccacggccccttcagccaggtagcagcccactggactgggggagggcgggggcgggggagaccgggtacccccgagaccctgtcccctatcgatcctgtcccgccaggtggaggacctggaacgcgtggagggcataacggggaaacagatggagtccttcctgaaggtgaagtcacggccctgcccctcctctgcctgtcctgcgccccgcgcccctctctaacgtcgctgtctccctccctcctgtgttgcaggcaaacatcctgggtctcgccgccggccagcgctgtggcgcctcctgaccgtcgtctcctcactccgccttttcaaatttttgtataaccccgtgttgtgtaaatacagtttttgctccggtg

SEQ ID NO: 294919 - DNA, 2439 bp, Homo sapiens
cggggaattcgaatgggagaggcgggcccaaggagggagtggaatggccgcgggcggctcgacgcagcagaggcgacgcgagatggcggcagcttcagcggcggcgatctcaggagctggtcgctgtcggctaagcaagattggagctactcgtcgtccacctccagctcgcgtaagggtggctgtgcgactgcggccatttgtggatggaacagcgggagcaagtgatcccccctgtgtgcggggcatggacagctgctctctagagattgctaactggaggaaccaccaggagactctcaaataccagtttgatgccttctatggggagaggagtactcagcaggacatctatgcaggttcagtgcagcccatcctaaggcacttgctggaagggcagaatgccagtgtgcttgcctatggacccacaggagctgggaagacgcacacaatgctgggcagcccagagcaacctggggtgatcccgcgggctctcatggacctcctgcagctcacaagggaggagggtgccgagggccggccatgggccctttctgtcaccatgtcttacctagagatctaccaggagaaggtattagacctcctggaccctgcttcgggagacctggtaatccgagaagactgccgggggaatatcctgattccgggtctctcccagaagcccatcagtagctttgctgattttgagcggcacttcctgccagccagtcgaaatcggactgtaggagccacccggctcaaccagcgctcctcccgcagtcatgctgtgctcctggtcaaggtggaccagcgggaacgtttggccccatttcgccagcgagagggaaaactctacctgattgacttggctgggtcagaggacaaccggcgcacaggcaacaagggccttcggctaaaagagagtggagccatcaacacctccctgtttgtcctgggcaaagtggtagatgcgctgaatcagggcctccctcgtgtaccttatcgggacagcaagctcactcgcctattgcaggactctctgggtggctcagcccacagtatccttattgccaacattgcccctgagagacgcttctacctagacacagtctccgcactcaactttgctgccaggtccaaggaggtgatcaatcggccttttaccaatgagagcctgcagcctcatgccttgggacctgttaagctgtctcagaaagaattgcttggtccaccagaggcaaagagagcccgaggccctgaggaagaggagattgggagccctgagcccatggcagctccagcctctgcctcccagaaactcagccccctacagaagctaagcagcatggacccggccatgctggagcgcctcctcagcttggaccgtctgcttgcctcccaggggagccagggggcccctctgttgagtaccccaaagcgagagcggatggtgctaatgaagacagtagaagagaaggacctagagattgagaggcttaagacgaagcaaaaagaactggaggccaagatgttggcccagaaggctgaggaaaaggagaaccattgtcccacaatgctccggcccctttcacatcgcacagtcacaggggcaaagcccctgaaaaaggctgtggtgatgcccctacagctaattcaggagcaggcagcatccccaaatgccgagatccacatcctgaagaataaaggccggaagagaaagcaactccatgagaagggtgctaatattaccactgggtactgagtagtacctctctttcactagttgcataataagaattaacccagagagtgacctgagggcgggattttggacacacttgacaagagaggaagaggctggagcgcaggaggtagctggtgctgggctcctagtcttggcagaggagcccaaagcacttggctgccctgcgtgtcactcatctccctttgcctccctggagtccctggatgccctagagcctgaggagaaggctgaggactgctgggagctacagatcagcccggagctactggctcatgggcgccaaaaaatactggatctgctgaacgaaggctcagcccgagatctccgcagtcttcagcgcattggcccgaagaaggcccagctaatcgtgggctggcgggagctccacggccccttcagccaggtagcagcccactggactgggggagggcgggggcgggggagaccgggtacccccgagaccctgtcccctatcgatcctgtcccgccaggtggaggacctggaacgcgtggagggcataacggggaaacagatggagtccttcctgaaggcaaacatcctgggtctcgccgccggccagcgctgtggcgcctcctgaccgtcgtctcctcactccgccttttcaaatttttgtataaccccgtgttgtgtaaatacagtttttgctccggtg

SEQ ID NO: 294920 - DNA, 1997 bp, Homo sapiens
cggggaattcgaatgggagaggcgggcccaaggagggagtggaatggccgcgggcggctcgacgcagcagaggcgacgcgagatggcggcagcttcagcggcggcgatctcaggagctggtcgctgtcggctaagcaagattggagctactcgtcgtccacctccagctcgcgtaagggtggctgtgcgactgcggccatttgtggatggaacagcgggagcaagtgatcccccctgtgtgcggggcatggacagctgctctctagagattgctaactggaggaaccaccaggagactctcaaataccagtttgatgccttctatggggagaggagtactcagcaggacatctatgcaggttcagtgcagcccatcctaaggcacttgctggaagggcagaatgccagtgtgcttgcctatggacccacaggagctgggaagacgcacacaatgctgggcagcccagagcaacctggggtgatcccgcgggctctcatggacctcctgcagctcacaagggaggagggtgccgagggccggccatgggccctttctgtcaccatgtcttacctagagatctaccaggagaaggtattagacctcctggaccctgcttcgggagacctggtaatccgagaagactgccgggggaatatcctgattccgggtctctcccagaagcccatcagtagctttgctgattttgagcggcacttcctgccagccagtcgaaatcggactgtaggagccacccggctcaaccagcgctcctcccgcagtcatgctgtgctcctggtcaaggtggaccagcgggaacgtttggccccatttcgccagcgagagggaaaactctacctgattgacttggctgggtcagaggacaaccggcgcacaggcaacaagggccttcggctaaaagagagtggagccatcaacacctccctgtttgtcctgggcaaagtggtagatgcgctgaatcagggcctccctcgtgtaccttatcgggacagcaagctcactcgcctattgcaggactctctgggtggctcagcccacagtatccttattgccaacattgcccctgagagacgcttctacctagacacagtctccgcactcaactttgctgccaggtccaaggaggtgatcaatcggccttttaccaatgagagcctgcagcctcatgccttgggacctgttaagctgtctcagaaagaattgcttggtccaccagaggcaaagagagcccgaggccctgaggaagaggagattgggagccctgagcccatggcagctccagcctctgcctcccagaaactcagccccctacagaagctaagcagcatggacccggccatgctggagcgcctcctcagcttggaccgtctgcttgcctcccaggggagccagggggcccctctgttgagtaccccaaagcgagagcggatggtgctaatgaagacagtagaagagaaggacctagagattgagaggcttaagacgaagcaaaaagaactggaggccaagatgttggcccagaaggctgaggaaaaggagaaccattgtcccacaatgctccggcccctttcacatcgcacagtcacaggggcaaagcccctgaaaaaggctgtggtgatgcccctacagctaattcaggagcaggcagcatccccaaatgccgagatccacatcctgaagaataaaggccggaagagaaagctggagtccctggatgccctagagcctgaggagaaggctgaggactgctgggagctacagatcagcccggagctactggctcatgggcgccaaaaaatactggatctgctgaacgaagggcataacggggaaacagatggagtccttcctgaaggcaaacatcctgggtctcgccgccggccagcgctgtggcgcctcctgaccgtcgtctcctcactccgccttttcaaatttttgtataaccccgtgttgtgtaaatacagtttttgctccggtg

SEQ ID NO: 294921 - DNA, 2297 bp, Homo sapiens
cggggaattcgaatgggagaggcgggcccaaggagggagtggaatggccgcgggcggctcgacgcagcagaggcgacgcgagatggcggcagcttcagcggcggcgatctcaggagctggtcgctgtcggctaagcaagattggagctactcgtcgtccacctccagctcgcgtaagggtggctgtgcgactgcggccatttgtggatggaacagcgggagcaagtgatcccccctgtgtgcggggcatggacagctgctctctagagattgctaactggaggaaccaccaggagactctcaaataccagtttgatgccttctatggggagaggagtactcagcaggacatctatgcaggttcagtgcagcccatcctaaggcacttgctggaagggcagaatgccagtgtgcttgcctatggacccacaggagctgggaagacgcacacaatgctgggcagcccagagcaacctggggtgatcccgcgggctctcatggacctcctgcagctcacaagggaggagggtgccgagggccggccatgggccctttctgtcaccatgtcttacctagagatctaccaggagaaggtattagacctcctggaccctgcttcgggagacctggtaatccgagaagactgccgggggaatatcctgattccgggtctctcccagaagcccatcagtagctttgctgattttgagcggcacttcctgccagccagtcgaaatcggactgtaggagccacccggctcaaccagcgctcctcccgcagtcatgctgtgctcctggtcaaggtggaccagcgggaacgtttggccccatttcgccagcgagagggaaaactctacctgattgacttggctgggtcagaggacaaccggcgcacaggcaacaagggccttcggctaaaagagagtggagccatcaacacctccctgtttgtcctgggcaaagtggtagatgcgctgaatcagggcctccctcgtgtaccttatcgggacagcaagctcactcgcctattgcaggactctctgggtggctcagcccacagtatccttattgccaacattgcccctgagagacgcttctacctagacacagtctccgcactcaactttgctgccaggtccaaggaggtgatcaatcggccttttaccaatgagagcctgcagcctcatgccttgggacctgttaagctgtctcagaaagaattgcttggtccaccagaggcaaagagagcccgaggccctgaggaagaggagattgggagccctgagcccatggcagctccagcctctgcctcccagaaactcagccccctacagaagctaagcagcatggacccggccatgctggagcgcctcctcagcttggaccgtctgcttgcctcccaggggagccagggggcccctctgttgagtaccccaaagcgagagcggatggtgctaatgaagacagtagaagagaaggacctagagattgagaggcttaagacgaagcaaaaagaactggaggccaagatgttggcccagaaggctgaggaaaaggagaaccattgtcccacaatgctccggcccctttcacatcgcacagtcacaggggcaaagcccctgaaaaaggctgtggtgatgcccctacagctaattcaggagcaggcagcatccccaaatgccgagatccacatcctgaagaataaaggccggaagagaaagcaactccatgagaagggtgctaatattaccactgggtactgagtagtacctctctttcactagttgcataataagaattaacccagagagtgacctgagggcgggattttggacacacttgacaagagaggaagaggctggagcgcaggaggtagctggtgctgggctcctagtcttggcagaggagcccaaagcacttggctgccctgcgtgtcactcatctccctttgcctccctggagtccctggatgccctagagcctgaggagaaggctgaggactgctgggagctacagatcagcccggagctactggctcatgggcgccaacgcattggcccgaagaaggcccagctaatcgtgggctggcgggagctccacggccccttcagccaggtggaggacctggaacgcgtggagggcataacggggaaacagatggagtccttcctgaaggcaaacatcctgggtctcgccgccggccagcgctgtggcgcctcctgaccgtcgtctcctcactccgccttttcaaatttttgtataaccccgtgttgtgtaaatacagtttttgctccggtg

SEQ ID NO: 294922 - DNA, 1772 bp, Homo sapiens
cggggaattcgaatgggagaggcgggcccaaggagggagtggaatggccgcgggcggctcgacgcagcagaggcgacgcgagatggcggcagcttcagcggcggcgatctcaggagctggtcgctgtcggctaagcaagattggagctactcgtcgtccacctccagctcgcgtaagggtggctgtgcgactgcggccatttgtggatggaacagcgggagcaagtgatcccccctgtgtgcggggcatggacagctgctctctagagattgctaactggaggaaccaccaggagactctcaaataccagtttgatgccttctatggggagaggagtactcagcaggacatctatgcaggttcagtgcagcccatcctaaggcacttgctggaagggcagaatgccagtgtgcttgcctatggacccacaggagctgggaagacgcacacaatgctgggcagcccagagcaacctggggtgatcccgcgggctctcatggacctcctgcagctcacaagggaggagggtgccgagggccggccatgggccctttctgtcaccatgtcttacctagagatctaccaggagaaggtattagacctcctggaccctgcttcgggagacctggtaatccgagaagactgccgggggaatatcctgattccgggtctctcccagaagcccatcagtagctttgctgattttgagcggcacttcctgccagccagtcgaaatcggactgtaggagccacccggctcaaccagcgctcctcccgcagtcatgctgtgctcctggtcaaggtggaccagcgggaacgtttggccccatttcgccagcgagagggaaaactctacctgattgacttggctgggtcagaggacaaccggcgcacaggcaacaagggccttcggctaaaagagagtggagccatcaacacctccctgtttgtcctgggcaaagtggtagatgcgctgaatcagggcctccctcgtgtaccttatcgggacagcaagctcactcgcctattgcaggactctctgggtggctcagcccacagtatccttattgccaacattgcccctgagagacgcttctacctagacacagtctccgcactcaactttgctgccaggtccaaggaggtgatcaatcggccttttaccaatgagagcctgcagcctcatgccttgggacctgttaagctgtctcagaaagaattgcttggtccaccagaggcaaagagagcccgaggccctgaggaagaggagattgggagccctgagcccatggcagctccagcctctgcctcccagaaactcagccccctacagaagctaagcagcatggacccggccatgctggagcgcctcctcagcttggaccgtctgcttgcctcccaggggagccagggggcccctctgttgagtaccccaaagcgagagcggatggtgctaatgaagacagtagaagagaaggacctagagattgagaggcttaagacgaagcaaaaagaactggaggccaagatgttggcccagaaggctgaggaaaaggagaaccattgtcccacaatgctccggcccctttcacatcgcacagtcacaggggcaaagcccctgaaaaaggctgtggtgatgcccctacagctaattcaggagcaggcagcatccccaaatgccgagatccacatcctgaagaataaaggccggaagagaaaggtgaaagtagctgggggcttaggctacacctggagcccagaagtaaggggga

SEQ ID NO: 294923 - DNA, 2165 bp, Homo sapiens
cggggaattcgaatgggagaggcgggcccaaggagggagtggaatggccgcgggcggctcgacgcagcagaggcgacgcgagatggcggcagcttcagcggcggcgatctcagcaaatacttcttgagggcctactctgcgccaggtgttggggttagaaaggagctggtcgctgtcggctaagcaagattggagctactcgtcgtccacctccagctcgcgtaagggtggctgtgcgactgcggccatttgtggatggaacagcgggagcaagtgatcccccctgtgtgcggggcatggacagctgctctctagagattgctaactggaggaaccaccaggagactctcaaataccagtttgatgccttctatggggagaggagtactcagcaggacatctatgcaggttcagtgcagcccatcctaaggcacttgctggaagggcagaatgccagtgtgcttgcctatggacccacaggagctgggaagacgcacacaatgctgggcagcccagagcaacctggggtgatcccgcgggctctcatggacctcctgcagctcacaagggaggagggtgccgagggccggccatgggccctttctgtcaccatgtcttacctagagatctaccaggagaaggtattagacctcctggaccctgcttcgggagacctggtaatccgagaagactgccgggggaatatcctgattccgggtctctcccagaagcccatcagtagctttgctgattttgagcggcacttcctgccagccagtcgaaatcggactgtaggagccacccggctcaaccagcgctcctcccgcagtcatgctgtgctcctggtcaaggtggaccagcgggaacgtttggccccatttcgccagcgagagggaaaactctacctgattgacttggctgggtcagaggacaaccggcgcacaggcaacaagggccttcggctaaaagagagtggagccatcaacacctccctgtttgtcctgggcaaagtggtagatgcgctgaatcagggcctccctcgtgtaccttatcgggacagcaagctcactcgcctattgcaggactctctgggtggctcagcccacagtatccttattgccaacattgcccctgagagacgcttctacctagacacagtctccgcactcaactttgctgccaggtccaaggaggtgatcaatcggccttttaccaatgagagcctgcagcctcatgccttgggacctgttaagctgtctcagaaagaattgcttggtccaccagaggcaaagagagcccgaggccctgaggaagaggagattgggagccctgagcccatggcagctccagcctctgcctcccagaaactcagccccctacagaagctaagcagcatggacccggccatgctggagcgcctcctcagcttggaccgtctgcttgcctcccaggggagccagggggcccctctgttgagtaccccaaagcgagagcggatggtgctaatgaagacagtagaagagaaggacctagagattgagaggcttaagacgaagcaaaaagaactggaggccaagatgttggcccagaaggctgaggaaaaggagaaccattgtcccacaatgctccggcccctttcacatcgcacagtcacaggggcaaagcccctgaaaaaggctgtggtgatgcccctacagctaattcaggagcaggcagcatccccaaatgccgagatccacatcctgaagaataaaggccggaagagaaagctggagtccctggatgccctagagcctgaggagaaggctgaggactgctgggagctacagatcagcccggagctactggctcatgggcgccaaaaaatactggatctgctgaacgaaggctcagcccgagatctccgcagtcttcagcgcattggcccgaagaaggcccagctaatcgtgggctggcgggagctccacggccccttcagccaggtggaggacctggaacgcgtggagggcataacggggaaacagatggagtccttcctgaaggcaaacatcctgggtctcgccgccggccagcgctgtggcgcctcctgaccgtcgtctcctcactccgccttttcaaatttttgtataaccccgtgttgtgtaaatacagtttttgctccggtg

SEQ ID NO: 294924 - DNA, 2230 bp, Homo sapiens
ccgcctggctcctgccttctccctgtttcctgctctccccttgggtcagtagactcgggtctccggtccaggctcttggcttgaaccccgcgcacttttcctttgtgagcttcggtttcttcgtctgtgaaacgggggtcatggcctcatccctggagatcacctgaataagcaagagaagagtggcggacgctctagccacgaggacgagaagaagggagccggaggagctggtcgctgtcggctaagcaagattggagctactcgtcgtccacctccagctcgcgtaagggtggctgtgcgactgcggccatttgtggatggaacagcgggagcaagtgatcccccctgtgtgcggggcatggacagctgctctctagagattgctaactggaggaaccaccaggagactctcaaataccagtttgatgccttctatggggagaggagtactcagcaggacatctatgcaggttcagtgcagcccatcctaaggcacttgctggaagggcagaatgccagtgtgcttgcctatggacccacaggagctgggaagacgcacacaatgctgggcagcccagagcaacctggggtgatcccgcgggctctcatggacctcctgcagctcacaagggaggagggtgccgagggccggccatgggccctttctgtcaccatgtcttacctagagatctaccaggagaaggtattagacctcctggaccctgcttcgggagacctggtaatccgagaagactgccgggggaatatcctgattccgggtctctcccagaagcccatcagtagctttgctgattttgagcggcacttcctgccagccagtcgaaatcggactgtaggagccacccggctcaaccagcgctcctcccgcagtcatgctgtgctcctggtcaaggtggaccagcgggaacgtttggccccatttcgccagcgagagggaaaactctacctgattgacttggctgggtcagaggacaaccggcgcacaggcaacaagggccttcggctaaaagagagtggagccatcaacacctccctgtttgtcctgggcaaagtggtagatgcgctgaatcagggcctccctcgtgtaccttatcgggacagcaagctcactcgcctattgcaggactctctgggtggctcagcccacagtatccttattgccaacattgcccctgagagacgcttctacctagacacagtctccgcactcaactttgctgccaggtccaaggaggtgatcaatcggccttttaccaatgagagcctgcagcctcatgccttgggacctgttaagctgtctcagaaagaattgcttggtccaccagaggcaaagagagcccgaggccctgaggaagaggagattgggagccctgagcccatggcagctccagcctctgcctcccagaaactcagccccctacagaagctaagcagcatggacccggccatgctggagcgcctcctcagcttggaccgtctgcttgcctcccaggggagccagggggcccctctgttgagtaccccaaagcgagagcggatggtgctaatgaagacagtagaagagaaggacctagagattgagaggcttaagacgaagcaaaaagaactggaggccaagatgttggcccagaaggctgaggaaaaggagaaccattgtcccacaatgctccggcccctttcacatcgcacagtcacaggggcaaagcccctgaaaaaggctgtggtgatgcccctacagctaattcaggagcaggcagcatccccaaatgccgagatccacatcctgaagaataaaggccggaagagaaagctggagtccctggatgccctagagcctgaggagaaggctgaggactgctgggagctacagatcagcccggagctactggctcatgggcgccaaaaaatactggatctgctgaacgaaggctcagcccgagatctccgcagtcttcagcgcattggcccgaagaaggcccagctaatcgtgggctggcgggagctccacggccccttcagccaggtggaggacctggaacgcgtggagggcataacggggaaacagatggagtccttcctgaaggcaaacatcctgggtctcgccgccggccagcgctgtggcgcctcctgaccgtcgtctcctcactccgccttttcaaatttttgtataaccccgtgttgtgtaaatacagtttttgctccggtg

SEQ ID NO: 294925 - DNA, 2115 bp, Homo sapiens
cggggaattcgaatgggagaggcgggcccaaggagggagtggaatggccgcgggcggctcgacgcagcagaggcgacgcgagatggcggcagcttcagcggcggcgatctcaggagctggtcgctgtcggctaagcaagattggagctactcgtcgtccacctccagctcgcgtaagggtggctgtgcgactgcggccatttgtggatggaacagcgggagcaagtgatcccccctgtgtgcggggcatggacagctgctctctagagattgctaactggaggaaccaccaggagactctcaaataccagtttgatgccttctatggggagaggagtactcagcaggacatctatgcaggttcagtgcagcccatcctaaggcacttgctggaagggcagaatgccagtgtgcttgcctatggacccacaggagctgggaagacgcacacaatgctgggcagcccagagcaacctggggtgatcccgcgggctctcatggacctcctgcagctcacaagggaggagggtgccgagggccggccatgggccctttctgtcaccatgtcttacctagagatctaccaggagaaggtattagacctcctggaccctgcttcgggagacctggtaatccgagaagactgccgggggaatatcctgattccgggtctctcccagaagcccatcagtagctttgctgattttgagcggcacttcctgccagccagtcgaaatcggactgtaggagccacccggctcaacgagggggggggggggggggggggggggggggggggggggtggaccagcgggaacgtttggccccatttcgccagcgagagggaaaactctacctgattgacttggctgggtcagaggacaaccggcgcacaggcaacaagggccttcggctaaaagagagtggagccatcaacacctccctgtttgtcctgggcaaagtggtagatgcgctgaatcagggcctccctcgtgtaccttatcgggacagcaagctcactcgcctattgcaggactctctgggtggctcagcccacagtatccttattgccaacattgcccctgagagacgcttctacctagacacagtctccgcactcaactttgctgccaggtccaaggaggtgatcaatcggccttttaccaatgagagcctgcagcctcatgccttgggacctgttaagctgtctcagaaagaattgcttggtccaccagaggcaaagagagcccgaggccctgaggaagaggagattgggagccctgagcccatggcagctccagcctctgcctcccagaaactcagccccctacagaagctaagcagcatggacccggccatgctggagcgcctcctcagcttggaccgtctgcttgcctcccaggggagccagggggcccctctgttgagtaccccaaagcgagagcggatggtgctaatgaagacagtagaagagaaggacctagagattgagaggcttaagacgaagcaaaaagaactggaggccaagatgttggcccagaaggctgaggaaaaggagaaccattgtcccacaatgctccggcccctttcacatcgcacagtcacaggggcaaagcccctgaaaaaggctgtggtgatgcccctacagctaattcaggagcaggcagcatccccaaatgccgagatccacatcctgaagaataaaggccggaagagaaagctggagtccctggatgccctagagcctgaggagaaggctgaggactgctgggagctacagatcagcccggagctactggctcatgggcgccaaaaaatactggatctgctgaacgaaggctcagcccgagatctccgcagtcttcagcgcattggcccgaagaaggcccagctaatcgtgggctggcgggagctccacggccccttcagccaggtggaggacctggaacgcgtggagggcataacggggaaacagatggagtccttcctgaaggcaaacatcctgggtctcgccgccggccagcgctgtggcgcctcctgaccgtcgtctcctcactccgccttttcaaatttttgtataaccccgtgttgtgtaaatacagtttttgctccggtg

SEQ ID NO: 294926 - DNA, 2035 bp, Homo sapiens
cggggaattcgaatgggagaggcgggcccaaggagggagtggaatggccgcgggcggctcgacgcagcagaggcgacgcgagatggcggcagcttcagcggcggcgatctcaggagctggtcgctgtcggctaagcaagattggagctactcgtcgtccacctccagctcgcgtaagggtggctgtgcgactgcggccatttgtggatggaacagcgggagcaagtgatcccccctgtgtgcggggcatggacagctgctctctagagattgctaactggaggaaccaccaggagactctcaaataccagtttgatgccttctatggggagaggagtactcagcaggacatctatgcaggttcagtgcagcccatcctaaggcacttgctggaagggcagaatgccagtgtgcttgcctatggacccacaggagctgggaagacgcacacaatgctgggcagcccagagcaacctggggtgatcccgcgggctctcatggacctcctgcagctcacaagggaggagggtgccgagggccggccatgggccctttctgtcaccatgtcttacctagagatctaccaggagaagtcccagaagcccatcagtagctttgctgattttgagcggcacttcctgccagccagtcgaaatcggactgtaggagccacccggctcaaccagcgctcctcccgcagtcatgctgtgctcctggtcaaggtggaccagcgggaacgtttggccccatttcgccagcgagagggaaaactctacctgattgacttggctgggtcagaggacaaccggcgcacaggcaacaagggccttcggctaaaagagagtggagccatcaacacctccctgtttgtcctgggcaaagtggtagatgcgctgaatcagggcctccctcgtgtaccttatcgggacagcaagctcactcgcctattgcaggactctctgggtggctcagcccacagtatccttattgccaacattgcccctgagagacgcttctacctagacacagtctccgcactcaactttgctgccaggtccaaggaggtgatcaatcggccttttaccaatgagagcctgcagcctcatgccttgggacctgttaagctgtctcagaaagaattgcttggtccaccagaggcaaagagagcccgaggccctgaggaagaggagattgggagccctgagcccatggcagctccagcctctgcctcccagaaactcagccccctacagaagctaagcagcatggacccggccatgctggagcgcctcctcagcttggaccgtctgcttgcctcccaggggagccagggggcccctctgttgagtaccccaaagcgagagcggatggtgctaatgaagacagtagaagagaaggacctagagattgagaggcttaagacgaagcaaaaagaactggaggccaagatgttggcccagaaggctgaggaaaaggagaaccattgtcccacaatgctccggcccctttcacatcgcacagtcacaggggcaaagcccctgaaaaaggctgtggtgatgcccctacagctaattcaggagcaggcagcatccccaaatgccgagatccacatcctgaagaataaaggccggaagagaaagctggagtccctggatgccctagagcctgaggagaaggctgaggactgctgggagctacagatcagcccggagctactggctcatgggcgccaaaaaatactggatctgctgaacgaaggctcagcccgagatctccgcagtcttcagcgcattggcccgaagaaggcccagctaatcgtgggctggcgggagctccacggccccttcagccaggtggaggacctggaacgcgtggagggcataacggggaaacagatggagtccttcctgaaggcaaacatcctgggtctcgccgccggccagcgctgtggcgcctcctgaccgtcgtctcctcactccgccttttcaaatttttgtataaccccgtgttgtgtaaatacagtttttgctccggtg

SEQ ID NO: 294927 - DNA, 1394 bp, Homo sapiens
acgagtgactctagcaggatccttatctaaatggctgtcaccagcgctcctcccgcagtcatgctgtgctcctggtcaaggtggaccagcgggaacgtttggccccatttcgccagcgagagggaaaactctacctgattgacttggctgggtcagaggacaaccggcgcacaggcaacaagggccttcggctaaaagagagtggagccatcaacacctccctgtttgtcctgggcaaagtggtagatgcgctgaatcagggcctccctcgtgtaccttatcgggacagcaagctcactcgcctattgcaggactctctgggtggctcagcccacagtatccttattgccaacattgcccctgagagacgcttctacctagacacagtctccgcactcaactttgctgccaggtccaaggaggtgatcaatcggccttttaccaatgagagcctgcagcctcatgccttgggacctgttaagctgtctcagaaagaattgcttggtccaccagaggcaaagagagcccgaggccctgaggaagaggagattgggagccctgagcccatggcagctccagcctctgcctcccagaaactcagccccctacagaagctaagcagcatggacccggccatgctggagcgcctcctcagcttggaccgtctgcttgcctcccaggggagccagggggcccctctgttgagtaccccaaagcgagagcggatggtgctaatgaagacagtagaagagaaggacctagagattgagaggcttaagacgaagcaaaaagaactggaggccaagatgttggcccagaaggctgaggaaaaggagaaccattgtcccacaatgctccggcccctttcacatcgcacagtcacaggggcaaagcccctgaaaaaggctgtggtgatgcccctacagctaattcaggagcaggcagcatccccaaatgccgagatccacatcctgaagaataaaggccggaagagaaagctggagtccctggatgccctagagcctgaggagaaggctgaggactgctgggagctacagatcagcccggagctactggctcatgggcgccaaaaaatactggatctgctgaacgaaggctcagcccgagatctccgcagtcttcagcgcattggcccgaagaaggcccagctaatcgtgggctggcgggagctccacggccccttcagccaggtggaggacctggaacgcgtggagggcataacggggaaacagatggagtccttcctgaaggcaaacatcctgggtctcgccgccggccagcgctgtggcgcctcctgaccgtcgtctcctcactccgccttttcaaatttttgtataaccccgtgttgtgtaaatacagtttttgctccggtg

SEQ ID NO: 294928 - DNA, 1406 bp, Homo sapiens
gggttgagccgggtggctcctacagcatgactgcgggaggagcgctggttgagccgggtggctcctacagtcatgctgtgctcctggtcaaggtggaccagcgggaacgtttggccccatttcgccagcgagagggaaaactctacctgattgacttggctgggtcagaggacaaccggcgcacaggcaacaagggccttcggctaaaagagagtggagccatcaacacctccctgtttgtcctgggcaaagtggtagatgcgctgaatcagggcctccctcgtgtaccttatcgggacagcaagctcactcgcctattgcaggactctctgggtggctcagcccacagtatccttattgccaacattgcccctgagagacgcttctacctagacacagtctccgcactcaactttgctgccaggtccaaggaggtgatcaatcggccttttaccaatgagagcctgcagcctcatgccttgggacctgttaagctgtctcagaaagaattgcttggtccaccagaggcaaagagagcccgaggccctgaggaagaggagattgggagccctgagcccatggcagctccagcctctgcctcccagaaactcagccccctacagaagctaagcagcatggacccggccatgctggagcgcctcctcagcttggaccgtctgcttgcctcccaggggagccagggggcccctctgttgagtaccccaaagcgagagcggatggtgctaatgaagacagtagaagagaaggacctagagattgagaggcttaagacgaagcaaaaagaactggaggccaagatgttggcccagaaggctgaggaaaaggagaaccattgtcccacaatgctccggcccctttcacatcgcacagtcacaggggcaaagcccctgaaaaaggctgtggtgatgcccctacagctaattcaggagcaggcagcatccccaaatgccgagatccacatcctgaagaataaaggccggaagagaaagctggagtccctggatgccctagagcctgaggagaaggctgaggactgctgggagctacagatcagcccggagctactggctcatgggcgccaaaaaatactggatctgctgaacgaaggctcagcccgagatctccgcagtcttcagcgcattggcccgaagaaggcccagctaatcgtgggctggcgggagctccacggccccttcagccaggtggaggacctggaacgcgtggagggcataacggggaaacagatggagtccttcctgaaggcaaacatcctgggtctcgccgccggccagcgctgtggcgcctcctgaccgtcgtctcctcactccgccttttcaaatttttgtataaccccgtgttgtgtaaatacagtttttgctccggtg

SEQ ID NO: 294929 - DNA, 1373 bp, Homo sapiens
cggggaattcgaatgggagaggcgggcccaaggagggagtggaatggccgcgggcggctcgacgcagcagaggcgacgcgagatggcggcagcttcagcggcggcgatctcaggagctggtcgctgtcggctaagcaagattggagctactcgtcgtccacctccagctcgcgtaagggtggctgtgcgactgcggccatttgtggatggaacagcgggagcaagtgatcccccctgtgtgcggggcatggacagctgctctctagagattgctaactggaggaaccaccaggagactctcaaataccagtttgatgccttctatggggagaggagtactcagcaggacatctatgcaggttcagtgcagcccatcctaaggcacttgctggaagggcagaatgccagtgtgcttgcctatggacccacaggagctgggaagacgcacacaatgctgggcagcccagagcaacctggggtgatcccgcgggctctcatggacctcctgcagctcacaagggaggaggattgggagccctgagcccatggcagctccagcctctgcctcccagaaactcagccccctacagaagctaagcagcatggacccggccatgctggagcgcctcctcagcttggaccgtctgcttgcctcccaggggagccagggggcccctctgttgagtaccccaaagcgagagcggatggtgctaatgaagacagtagaagagaaggacctagagattgagaggcttaagacgaagcaaaaagaactggaggccaagatgttggcccagaaggctgaggaaaaggagaaccattgtcccacaatgctccggcccctttcacatcgcacagtcacaggggcaaagcccctgaaaaaggctgtggtgatgcccctacagctaattcaggagcaggcagcatccccaaatgccgagatccacatcctgaagaataaaggccggaagagaaagctggagtccctggatgccctagagcctgaggagaaggctgaggactgctgggagctacagatcagcccggagctactggctcatgggcgccaaaaaatactggatctgctgaacgaaggctcagcccgagatctccgcagtcttcagcgcattggcccgaagaaggcccagctaatcgtgggctggcgggagctccacggccccttcagccaggtggaggacctggaacgcgtggagggcataacggggaaacagatggagtccttcctgaaggcaaacatcctgggtctcgccgccggccagcgctgtggcgcctcctgaccgtcgtctcctcactccgccttttcaaatttttgtataaccccgtgttgtgtaaatacagtttttgctccggtg

SEQ ID NO: 294930 - DNA, 1246 bp, Homo sapiens
cggggaattcgaatgggagaggcgggcccaaggagggagtggaatggccgcgggcggctcgacgcagcagaggcgacgcgagatggcggcagcttcagcggcggcgatctcaggagctggtcgctgtcggctaagcaagattggagctactcgtcgtccacctccagctcgcgtaagggtggctgtgcgactgcggccatttgtggatggaacagcgggagcaagtgatcccccctgtgtgcggggcatggacagctgctctctagagattgctaactggaggaaccaccaggagactctcaaataccagtttgatgccttctatggggagaggagtactcagcaggacatctatgcaggttcagtgcagcccatcctaaggcacttgctggaagggcagaatccccctacagaagctaagcagcatggacccggccatgctggagcgcctcctcagcttggaccgtctgcttgcctcccaggggagccagggggcccctctgttgagtaccccaaagcgagagcggatggtgctaatgaagacagtagaagagaaggacctagagattgaggctgccctggagttgggtctggatcacatctccctgatcctttccaacagaggcttaagacgaagcaaaaagaactggaggccaagatgttggcccagaaggctgaggaaaaggagaaccattgtcccacaatgctccggcccctttcacatcgcacagtcacaggggcaaagcccctgaaaaaggctgtggtgatgcccctacagctaattcaggagcaggcagcatccccaaatgccgagatccacatcctgaagaataaaggccggaagagaaagctggagtccctggatgccctagagcctgaggagaaggctgaggactgctgggagctacagatcagcccggagctactggctcatgggcgccaaaaaatactggatctgctgaacgaaggctcagcccgagatctccgcagtcttcagcgcattggcccgaagaaggcccagctaatcgtgggctggcgggagctccacggccccttcagccaggtggaggacctggaacgcgtggagggcataacggggaaacagatggagtccttcctgaaggcaaacatcctgggtctcgccgccggccagcgctgtggcgcctcctgaccgtcgtctcctcactccgccttttcaaatttttgtataaccccgtgttgtgtaaatacagtttttgctccggtg

SEQ ID NO: 294931 - DNA, 1075 bp, Homo sapiens
gaggagcgttggccttggggttaaacgaactggatgatggccgccagctactaacagacctcaacttgcttacccctggaatgtggtgatggatggttccttgcagggcatttagggtggaaggcagtgatgtggatgtacctcgcagagcggatgttccactgtgtagcctggcttctaccctctacaagcttaagagggaaaacttagggaactatgacctaagcagtcaagcaagaaaccacacatatgcacatacccagaatcgaacaccactagaactacccaaaaactgagatggttgggggaggtatcatttattcatattactttctcccatgtactttttgaaagacagcttattctttcccttttagagatgagggaccagatttaagagcttattttgtgctttacattcattaactcacttgatctccacagcaactccatgagaagggtgctaatattaccactgggtactgagtagtacctctctttcactagttgcataataagaattaacccagagagtgacctgagggcgggattttggacacacttgacaagagaggaagaggctggagcgcaggaggtagctggtgctgggctcctagtcttggcagaggagcccaaagcacttggctgccctgcgtgtcactcatctccctttgcctccctggagtccctggatgccctagagcctgaggagaaggctgaggactgctgggagctacagatcagcccggagctactggctcatgggcgccaaaaaatactggatctgctgaacgaaggctcagcccgagatctccgcagtcttcagcgcattggcccgaagaaggcccagctaatcgtgggctggcgggagctccacggccccttcagccaggtggaggacctggaacgcgtggagggcataacggggaaacagatggagtccttcctgaaggcaaacatcctgggtctcgccgccggccagcgctgtggcgcctcctgaccgtcgtctcctcactccgccttttcaaatttttgtataaccccgtgttgtgtaaatacagtttttgctccggtg

SEQ ID NO: 294932 - DNA, 1251 bp, Homo sapiens
gaggagcgttggccttggggttaaacgaactggatgatggccgccagctactaacagacctcaacttgcttacccctggaatgtggtgatggatggttccttgcagggcatttagggtggaaggcagtgatgtggatgtacctcgcagagcggatgttccactgtgtagcctggcttctaccctctacaagcttaagagggaaaacttagggaactatgacctaagcagtcaagcaagaaaccacacatatgcacatacccagaatcgaacaccactagaactacccaaaaactgagatggttgggggaggtatcatttattcatattactttctcccatgtactttttgaaagacagcttattctttcccttttagagatgagggaccagatttaagagcttattttgtgctttacattcattaactcacttgatctccacagcaactccatgagaagggtgctaatattaccactgggtactgagtagtacctctctttcactagttgcataataagaattaacccagagagtgacctgagggcgggattttggacacacttgacaagagaggaagaggctggagcgcaggaggtagctggtgctgggctcctagtcttggcagaggagcccaaagcacttggctgccctgcgtgtcactcatctccctttgcctccctggagtccctggatgccctagagcctgaggagaaggctgaggactgctgggagctacagatcagcccggagctactggctcatgggcgccaaaaaatactggatctgctgaacgaaggctcagcccgagatctccgcagtcttcagcgcattggcccgaagaaggcccagctaatcgtgggctggcgggagctccacggccccttcagccaggtagcagcccactggactgggggagggcgggggcgggggagaccgggtacccccgagaccctgtcccctatcgatcctgtcccgccaggtggaggacctggaacgcgtggagggcataacggggaaacagatggagtccttcctgaaggtgaagtcacggccctgcccctcctctgcctgtcctgcgccccgcgcccctctctaacgtcgctgtctccctccctcctgtgttgcaggcaaacatcctgggtctcgccgccggccagcgctgtggcgcctcctgaccgtcgtctcctcactccgccttttcaaatttttgtataaccccgtgttgtgtaaatacagtttttgctccggtg

SEQ ID NO: 294933 - DNA, 300 bp, Homo sapiens
cgcacacaatgctgggcagcccagagcaacctggggtgatcccgcgggctctcatggacctcctgcagctcacaagggaggagggtgccgagggccggccatgggccctttctgtcaccatgtcttacctagagatctaccaggagaaggaggccccgtgctggttgggagaggagcaacaaagggtcaaagtaagacctggttctagaacatgaagctctgctgtagcagggaggtaaggtgagacctagaaagacagagactggggtagcagatggtacaactccgagaatagaacag

SEQ ID NO: 294934 - DNA, 863 bp, Homo sapiens
ttacactaagaactctttgttacatcaggtattgcactctcagtctcgccatgttgaagtcagaatggcctgtattcactatcttcgagagaacagagagaaatttgaagcgtttatagaaggatcatttgaagaatatttaaagcgtttggaaaatccacaggaatgggtaggacaagtggaaataagtgccctttctcttatgtacaggaaagattttataatttatcgggaaccaaatgtttctccttcacaagtaacagaaaataattttcctgaaaaggtgttactgtgtttttcaaatggaaatcattatgatattgtgtatcccataaagtataaagaaagctctgctatgtgtcagtctctcctttatgaattgctgtatgagaaggtatttaaaactgatgttagtaaaattgtgatggaactagacacgttggaagtagctgatgaagataacagtgaaatatcagattcagaggatgacagttgcaagtaagaatgaaatcctaaaatacctttcttagtgccatacaaggaaagttaagtaaatgtctttacatttcagtaaatgtctttctataacatatattgaggtattaatggtattcataaaatacagcagtctgctgaagtttctttatccctgtcactaattttacctaatttctattatgggactgtttgttttgaaagttggtgtttttggttgatgagaatttacgtctgcaatctagatgcatatttgtagaataaatttggtcctacctatatgtgtgtgtattgtaaaattttaaagttaacttgtcaattgttcacatacccagtaatgaaataaaatggccgtttggatttccttc

SEQ ID NO: 294935 - DNA, 1083 bp, Homo sapiens
cggccgcgtgcggacagccatgcattaggcagggcttccctatgcgcccggagagcgcggaccgctgcctcgggccgccgccgcctgccgccgctcgcggagcccgagccccagcccgagccgccgcctgccccaggccggggcgtcgagcagccggcggcctggccatgtggggctagccctcgccgcgcctggcctgcagcaggaccagcaacatggaggctgccgtcggcgtccccgacggcggggaccagggcggcgcggggccccgcgaggacgcgacgcccatggacgcctatctgcggaaactgggcttgtatcggaaactggtcgccaaggacgggtcgtgcctgttccgggccgtggcggagcaggtattgcactctcagtctcgccatgttgaagtcagaatggcctgtattcactatcttcgagagaacagagagaaatttgaagcgtttatagaaggatcatttgaagaatatttaaagcgtttggaaaatccacaggaatgggtaggacaagtggaaataagtgccctttctcttatgtacaggaaagattttataatttatcgggaaccaaatgtttctccttcacaagtaacagaaaataattttcctgaaaaggtgttactgtgtttttcaaatggaaatcattatgatattgtgtatcccataaagtataaagaaagctctgctatgtgtcagtctctcctttatgaattgctgtatgagaaggtatttaaaactgatgttagtaaaattgtgatggaactagacacgttggaagtagctgatgaagataacagtgaaatatcagattcagaggatgacagttgcaagagtaagactgctgctgctgctgctgatgtgaatggatttaaacctttgtcaggcaatgagcagctgaagaacaatgggaactctactagcctgcctttgtctagaaaggttcttaagtcactcaatcctgcagtctatagaatatgaaatttggctgaagtctaaacaagctcagcaaaaacgtgattattccattgctgctggcttacaatatgaagttggagacaaatgtcaagta

SEQ ID NO: 294936 - DNA, 511 bp, Homo sapiens
tgacctccggaagaggccagagaaaaaatgaagccagtgttagcatgtagtaatgatgttagtaaaattgtgatggaactagacacgttggaagtagctgatgaagataacagtgaaatatcagattcagaggatgacagttgcaagtaagaatgaaatcctaaaatacctttcttagtgccatacaaggaaagttaagtaaatgtctttacatttcagtaaatgtctttctataacatatattgaggtattaatggtattcataaaatacagcagtctgctgaagtttctttatccctgtcactaattttacctaatttctattatgggactgtttgttttgaaagttggtgtttttggttgatgagaatttacgtctgcaatctagatgcatatttgtagaataaatttggtcctacctatatgtgtgtgtattgtaaaattttaaagttaacttgtcaattgttcacatacccagtaatgaaataaaatggccgtttggatttccttc

SEQ ID NO: 294937 - DNA, 1378 bp, Homo sapiens
ccaaagtgctgagattacaggcgtgagccaccatgcccagccttaagttttaaacatcaagttttatcattatagcagcatttatatagttggttattaatatattttacttttaactattttcaaattcatactgttatttcatagtccaattcatcatgattcttgacatccatcccccaactgacgtcttaaatattaaagagttagaaattttttatattaggctaagcaaaatatagaaaagaaaatccactcttccttccctgcaatatgaataaatacttccgaagtcaaagtcaaataggaacctttttttttttttttaagacaggctctcactctatctcccaggctggaatgtagtggtgcagcctcaacctccagaattcaggtgatccttccacctcccacctcaggtctcaggttccagagtagctaggactacaggtgtgtactatcacacccagctttttttgtttgtttgtttgcagagatgggatctcactttgttgccctggctggtcttgaactcctggtctcaagtgatcctcctgctttggcctcctaaagtgctgcgtttacaggtgtgagccactgcaccaaggctaggaatatctttttaaaatttttattccgtaagaatccactttttcaaaaagatagaaaaatattaatttaatttctaaaatatgattcttaagaaacaatggtatgaatttttgatatttacagctctagaataaaatctactcagactgttattcaattttaaattttatcagtgtttgagaaaattaatcttcctgagttctcttctgtcctaacaaaaatgaccttgaaaatcacatatcactgcttgattaaacatcagactgttttcaaagaactgctcctggcaatgtgaacaattcttgagattttaatgaaaacagcagaaggagctttggctttaaaaaaataataatttttttttactttggaaacaagccaagtatgtttcacatccctaaaatcctctgcctgttttaaaaaaacaaaccaaaaaaaagtttaaaactaatcagtgattaaaataaaatgaataacaaagcacacacagtaatcccaaactaccccttaaaactaaataaaaatataaatttgccttatcagatatgtttacttattaacaaatgggagggtcacacagtttttaaaaaatagtttatgtaaatttatttaaatatttatgtattagaagtaccataatatcaataaaaataagaattgatgcttttggaactttgttttttaagggaaaagcacagattctcccaaaccaaatgaataatcatatcaatttttccctttttatctgtgaaacacaatcccatct

SEQ ID NO: 294938 - DNA, 1241 bp, Homo sapiens
ccaaagtgctgagattacaggcgtgagccaccatgcccagccttaagttttaaacatcaagttttatcattatagcagcatttatatagttggttattaatatattttacttttaactattttcaaattcatactgttatttcatagtccaattcatcatgattcttgacatccatcccccaactgacgtcttaaatattaaagagttagaaattttttatattaggctaagcaaaatatagaaaagaaaatccactcttccttccctgcaatatgaataaatacttccgaagtcaaagtcaaataggaacctttttttttttttttaagacaggctctcactctatctcccaggctggaatgtagtggtgcagcctcaacctccagaattcaggtgatccttccacctcccacctcaggtctcaggttccagagtagctaggactacaggtgtgagccactgcaccaaggctaggaatatctttttaaaatttttattccgtaagaatccactttttcaaaaagatagaaaaatattaatttaatttctaaaatatgattcttaagaaacaatggtatgaatttttgatatttacagctctagaataaaatctactcagactgttattcaattttaaattttatcagtgtttgagaaaattaatcttcctgagttctcttctgtcctaacaaaaatgaccttgaaaatcacatatcactgcttgattaaacatcagactgttttcaaagaactgctcctggcaatgtgaacaattcttgagattttaatgaaaacagcagaaggagctttggctttaaaaaaataataatttttttttactttggaaacaagccaagtatgtttcacatccctaaaatcctctgcctgttttaaaaaaacaaaccaaaaaaaagtttaaaactaatcagtgattaaaataaaatgaataacaaagcacacacagtaatcccaaactaccccttaaaactaaataaaaatataaatttgccttatcagatatgtttacttattaacaaatgggagggtcacacagtttttaaaaaatagtttatgtaaatttatttaaatatttatgtattagaagtaccataatatcaataaaaataagaattgatgcttttggaactttgttttttaagggaaaagcacagattctcccaaaccaaatgaataatcatatcaatttttccctttttatctgtgaaacacaatcccatct

SEQ ID NO: 294939 - DNA, 10495 bp, Homo sapiens
  misc_feature (69)..(69): n is a, c, g, or t
  misc_feature (1160)..(1160): n is a, c, g, or t
agagcacaggctttgaccgatagtaacctctgcgctcggtgcagccgaatctataaaaggaactagtcncggcaaaaaccccgtaattgcgagcgagagtgagtggggccgggacccgcagagccgagccgacccttctctcccgggctgcggcagggcagggcggggagctccgcgcaccaacagagccggttctcagggcgctttgctccttgttttttccccggttctgttttctccccttctccggaaggcttgtcaaggggtaggagaaagagacgcaaacacaaaagtggaaaacagttaatgaccagccacggcgtccctgctgtgagctctggccgctgccttccagggctcccgagccacacgctgggggtgctggctgagggaacatggcttgttggcctcagctgaggttgctgctgtggaagaacctcactttcagaagaagacaaacatgtcagctgctgctggaagtggcctggcctctatttatcttcctgatcctgatctctgttcggctgagctacccaccctatgaacaacatgaatgccattttccaaataaagccatgccctctgcaggaacacttccttgggttcaggggattatctgtaatgccaacaacccctgtttccgttacccgactcctggggaggctcccggagttgttggaaactttaacaaatccattgtggctcgcctgttctcagatgctcggaggcttcttttatacagccagaaagacaccagcatgaaggacatgcgcaaagttctgagaacattacagcagatcaagaaatccagctcaaacttgaagcttcaagatttcctggtggacaatgaaaccttctctgggttcctgtatcacaacctctctctcccaaagtctactgtggacaagatgctgagggctgatgtcattctccacaaggtatttttgcaaggctaccagttacatttgacaagtctgtgcaatggatcaaaatcagaagagatgattcaacttggtgaccaagaagtttctgagctttgtggcctaccaagggagaaactggctgcagcagagcgagtacttcgttccaacatggacatcctgaagccaatcctgagaacactaaactctacatctcccttcccgagcaaggagctggcngaagccacaaaaacattgctgcatagtcttgggactctggcccaggagctgttcagcatgagaagctggagtgacatgcgacaggaggtgatgtttctgaccaatgtgaacagctccagctcctccacccaaatctaccaggctgtgtctcgtattgtctgcgggcatcccgagggaggggggctgaagatcaagtctctcaactggtatgaggacaacaactacaaagccctctttggaggcaatggcactgaggaagatgctgaaaccttctatgacaactctacaactccttactgcaatgatttgatgaagaatttggagtctagtcctctttcccgcattatctggaaagctctgaagccgctgctcgttgggaagatcctgtatacacctgacactccagccacaaggcaggtcatggctgaggtgaacaagaccttccaggaactggctgtgttccatgatctggaaggcatgtgggaggaactcagccccaagatctggaccttcatggagaacagccaagaaatggaccttgtccggatgctgttggacagcagggacaatgaccacttttgggaacagcagttggatggcttagattggacagcccaagacatcgtggcgtttttggccaagcacccagaggatgtccagtccagtaatggttctgtgtacacctggagagaagctttcaacgagactaaccaggcaatccggaccatatctcgcttcatggagtgtgtcaacctgaacaagctagaacccatagcaacagaagtctggctcatcaacaagtccatggagctgctggatgagaggaagttctgggctggtattgtgttcactggaattactccaggcagcattgagctgccccatcatgtcaagtacaagatccgaatggacattgacaatgtggagaggacaaataaaatcaaggatgggtactgggaccctggtcctcgagctgacccctttgaggacatgcggtacgtctgggggggcttcgcctacttgcaggatgtggtggagcaggcaatcatcagggtgctgacgggcaccgagaagaaaactggtgtctatatgcaacagatgccctatccctgttacgttgatgacatctttctgcgggtgatgagccggtcaatgcccctcttcatgacgctggcctggatttactcagtggctgtgatcatcaagggcatcgtgtatgagaaggaggcacggctgaaagagaccatgcggatcatgggcctggacaacagcatcctctggtttagctggttcattagtagcctcattcctcttcttgtgagcgctggcctgctagtggtcatcctgaagttaggaaacctgctgccctacagtgatcccagcgtggtgtttgtcttcctgtccgtgtttgctgtggtgacaatcctgcagtgcttcctgattagcacactcttctccagagccaacctggcagcagcctgtgggggcatcatctacttcacgctgtacctgccctacgtcctgtgtgtggcatggcaggactacgtgggcttcacactcaagatcttcgctagcctgctgtctcctgtggcttttgggtttggctgtgagtactttgccctttttgaggagcagggcattggagtgcagtgggacaacctgtttgagagtcctgtggaggaagatggcttcaatctcaccacttcggtctccatgatgctgtttgacaccttcctctatggggtgatgacctggtacattgaggctgtctttccaggccagtacggaattcccaggccctggtattttccttgcaccaagtcctactggtttggcgaggaaagtgatgagaagagccaccctggttccaaccagaagagaatatcagaaatctgcatggaggaggaacccacccacttgaagctgggcgtgtccattcagaacctggtaaaagtctaccgagatgggatgaaggtggctgtcgatggcctggcactgaatttttatgagggccagatcacctccttcctgggccacaatggagcggggaagacgaccaccatgtcaatcctgaccgggttgttccccccgacctcgggcaccgcctacatcctgggaaaagacattcgctctgagatgagcaccatccggcagaacctgggggtctgtccccagcataacgtgctgtttgacatgctgactgtcgaagaacacatctggttctatgcccgcttgaaagggctctctgagaagcacgtgaaggcggagatggagcagatggccctggatgttggtttgccatcaagcaagctgaaaagcaaaacaagccagctgtcaggtggaatgcagagaaagctatctgtggccttggcctttgtcgggggatctaaggttgtcattctggatgaacccacagctggtgtggacccttactcccgcaggggaatatgggagctgctgctgaaataccgacaaggccgcaccattattctctctacacaccacatggatgaagcggacgtcctgggggacaggattgccatcatctcccatgggaagctgtgctgtgtgggctcctccctgtttctgaagaaccagctgggaacaggctactacctgaccttggtcaagaaagatgtggaatcctccctcagttcctgcagaaacagtagtagcactgtgtcatacctgaaaaaggaggacagtgtttctcagagcagttctgatgctggcctgggcagcgaccatgagagtgacacgctgaccatcgatgtctctgctatctccaacctcatcaggaagcatgtgtctgaagcccggctggtggaagacatagggcatgagctgacctatgtgctgccatatgaagctgctaaggagggagcctttgtggaactctttcatgagattgatgaccggctctcagacctgggcatttctagttatggcatctcagagacgaccctggaagaaatattcctcaaggtggccgaagagagtggggtggatgctgagacctcagatggtaccttgccagcaagacgaaacaggcgggccttcggggacaagcagagctgtcttcgcccgttcactgaagatgatgctgctgatccaaatgattctgacatagacccagaatccagagagacagacttgctcagtgggatggatggcaaagggtcctaccaggtgaaaggctggaaacttacacagcaacagtttgtggcccttttgtggaagagactgctaattgccagacggagtcggaaaggattttttgctcagattgtcttgccagctgtgtttgtctgcattgcccttgtgttcagcctgatcgtgccaccctttggcaagtaccccagcctggaacttcagccctggatgtacaacgaacagtacacatttgtcagcaatgatgctcctgaggacacgggaaccctggaactcttaaacgccctcaccaaagaccctggcttcgggacccgctgtatggaaggaaacccaatcccagacacgccctgccaggcaggggaggaagagtggaccactgccccagttccccagaccatcatggacctcttccagaatgggaactggacaatgcagaacccttcacctgcatgccagtgtagcagcgacaaaatcaagaagatgctgcctgtgtgtcccccaggggcaggggggctgcctcctccacaaagaaaacaaaacactgcagatatccttcaggacctgacaggaagaaacatttcggattatctggtgaagacgtatgtgcagatcatagccaaaagcttaaagaacaagatctgggtgaatgagtttaggtatggcggcttttccctgggtgtcagtaatactcaagcacttcctccgagtcaagaagttaatgatgccatcaaacaaatgaagaaacacctaaagctggccaaggacagttctgcagatcgatttctcaacagcttgggaagatttatgacaggactggacaccagaaataatgtcaaggtgtggttcaataacaagggctggcatgcaatcagctctttcctgaatgtcatcaacaatgccattctccgggccaacctgcaaaagggagagaaccctagccattatggaattactgctttcaatcatcccctgaatctcaccaagcagcagctctcagaggtggctctgatgaccacatcagtggatgtccttgtgtccatctgtgtcatctttgcaatgtccttcgtcccagccagctttgtcgtattcctgatccaggagcgggtcagcaaagcaaaacacctgcagttcatcagtggagtgaagcctgtcatctactggctctctaattttgtctgggatatgtgcaattacgttgtccctgccacactggtcattatcatcttcatctgcttccagcagaagtcctatgtgtcctccaccaatctgcctgtgctagcccttctacttttgctgtatgggtggtcaatcacacctctcatgtacccagcctcctttgtgttcaagatccccagcacagcctatgtggtgctcaccagcgtgaacctcttcattggcattaatggcagcgtggccacctttgtgctggagctgttcaccgacaataagctgaataatatcaatgatatcctgaagtccgtgttcttgatcttcccacatttttgcctgggacgagggctcatcgacatggtgaaaaaccaggcaatggctgatgccctggaaaggtttggggagaatcgctttgtgtcaccattatcttgggacttggtgggacgaaacctcttcgccatggccgtggaaggggtggtgttcttcctcattactgttctgatccagtacagattcttcatcaggcccagacctgtaaatgcaaagctatctcctctgaatgatgaagatgaagatgtgaggcgggaaagacagagaattcttgatggtggaggccagaatgacatcttagaaatcaaggagttgacgaagatatatagaaggaagcggaagcctgctgttgacaggatttgcgtgggcattcctcctggtgagtgctttgggctcctgggagttaatggggctggaaaatcatcaactttcaagatgttaacaggagataccactgttaccagaggagatgctttccttaacaaaaatagtatcttatcaaacatccatgaagtacatcagaacatgggctactgccctcagtttgatgccatcacagagctgttgactgggagagaacacgtggagttctttgcccttttgagaggagtcccagagaaagaagttggcaaggttggtgagtgggcgattcggaaactgggcctcgtgaagtatggagaaaaatatgctggtaactatagtggaggcaacaaacgcaagctctctacagccatggctttgatcggcgggcctcctgtggtgtttctggatgaacccaccacaggcatggatcccaaagcccggcggttcttgtggaattgtgccctaagtgttgtcaaggaggggagatcagtagtgcttacatctcatagtatggaagaatgtgaagctctttgcactaggatggcaatcatggtcaatggaaggttcaggtgccttggcagtgtccagcatctaaaaaataggtttggagatggttatacaatagttgtacgaatagcagggtccaacccggacctgaagcctgtccaggatttctttggacttgcatttcctggaagtgttctaaaagagaaacaccggaacatgctacaataccagcttccatcttcattatcttctctggccaggatattcagcatcctctcccagagcaaaaagcgactccacatagaagactactctgtttctcagacaacacttgaccaagtatttgtgaactttgccaaggaccaaagtgatgatgaccacttaaaagacctctcattacacaaaaaccagacagtagtggacgttgcagttctcacatcttttctacaggatgagaaagtgaaagaaagctatgtatgaagaatcctgttcatacggggtggctgaaagtaaagaggaactagactttcctttgcaccatgtgaagtgttgtggagaaaagagccagaagttgatgtgggaagaagtaaactggatactgtactgatactattcaatgcaatgcaattcaatgcaatgaaaacaaaattccattacaggggcagtgcctttgtagcctatgtcttgtatggctctcaagtgaaagacttgaatttagttttttacctatacctatgtgaaactctattatggaacccaatggacatatgggtttgaactcacactttttttttttttttgttcctgtgtattctcattggggttgcaacaataattcatcaagtaatcatggccagcgattattgatcaaaatcaaaaggtaatgcacatcctcattcactaagccatgccatgcccaggagactggtttcccggtgacacatccattgctggcaatgagtgtgccagagttattagtgccaagtttttcagaaagtttgaagcaccatggtgtgtcatgctcacttttgtgaaagctgctctgctcagagtctatcaacattgaatatcagttgacagaatggtgccatgcgtggctaacatcctgctttgattccctctgataagctgttctggtggcagtaacatgcaacaaaaatgtgggtgtctctaggcacgggaaacttggttccattgttatattgtcctatgcttcgagccatgggtctacagggtcatccttatgagactcttaaatatacttagatcctggtaagaggcaaagaatcaacagccaaactgctggggctgcaagctgctgaagccagggcatgggattaaagagattgtgcgttcaaacctagggaagcctgtgcccatttgtcctgactgtctgctaacatggtacactgcatctcaagatgtttatctgacacaagtgtattatttctggctttttgaattaatctagaaaatgaaaagatggagttgtattttgacaaaaatgtttgtactttttaatgttatttggaattttaagttctatcagtgacttctgaatccttagaatggcctctttgtagaaccctgtggtatagaggagtatggccactgccccactatttttattttcttatgtaagtttgcatatcagtcatgactagtgcctagaaagcaatgtgatggtcaggatctcatgacattatatttgagtttctttcagatcatttaggatactcttaatctcacttcatcaatcaaatattttttgagtgtatgctgtagctgaaagagtatgtacgtacgtataagactagagagatattaagtctcagtacacttcctgtgccatgttattcagctcactggtttacaaatataggttgtcttgtggttgtaggagcccactgtaacaatactgggcagcctttttttttttttttaaattgcaacaatgcaaaagccaagaaagtataagggtcacaagtctaaacaatgaattcttcaacagggaaaacagctagcttgaaaacttgctgaaaaacacaacttgtgtttatggcatttagtaccttcaaataattggctttgcagatattggataccccattaaatctgacagtctcaaatttttcatctcttcaatcactagtcaagaaaaatataaaaacaacaaatacttccatatggagcatttttcagagttttctaacccagtcttatttttctagtcagtaaacatttgtaaaaatactgtttcactaatacttactgttaactgtcttgagagaaaagaaaaatatgagagaactattgtttggggaagttcaagtgatctttcaatatcattactaacttcttccactttttccaaaatttgaatattaacgctaaaggtgtaagacttcagatttcaaattaatctttctatattttttaaatttacagaatattatataacccactgctgaaaaagaaaaaaatgattgttttagaagttaaagtcaatattgattttaaatataagtaatgaaggcatatttccaataactagtgatatggcatcgttgcattttacagtatcttcaaaaatacagaatttatagaataatttctcctcatttaatatttttcaaaatcaaagttatggtttcctcattttactaaaatcgtattctaattcttcattatagtaaatctatgagcaactccttacttcggttcctctgatttcaaggccatattttaaaaaatcaaaaggcactgtgaactattttgaagaaaacacaacattttaatacagattgaaaggacctcttctgaagctagaaacaatctatagttatacatcttcattaatactgtgttaccttttaaaatagtaattttttacattttcctgtgtaaacctaattgtggtagaaatttttaccaactctatactcaatcaagcaaaatttctgtatattccctgtggaatgtacctatgtgagtttcagaaattctcaaaatacgtgttcaaaaatttctgcttttgcatctttgggacacctcagaaaacttattaacaactgtgaatatgagaaatacagaagaaaataataagccctctatacataaatgcccagcacaattcattgttaaaaaacaaccaaacctcacactactgtatttcattatctgtactgaaagcaaatgctttgtgactattaaatgttgcacatcattcattcactgtatagtaatcattgactaaagccatttgtctgtgttttcttcttgtggttgtatatatcaggtaaaatattttccaaagagccatgtgtcatgtaatactgaaccactttgatattgagacattaatttgtacccttgttattatctactagtaataatgtaatactgtagaaatattgctctaattcttttcaaaattgttgcatcccccttagaatgtttctatttccataaggatttaggtatgctattatcccttcttataccctaagatgaagctgtttttgtgctctttgttcatcattggccctcattccaagcactttacgctgtctgtaatgggatctatttttgcactggaatatctgagaattgcaaaactagacaaaagtttcacaacagatttctaagttaaatcattttcattaaaaggaaaaaagaaaaaaaattttgtatgtcaataactttatatgaagtattaaaatgcatatttctatgttgtaatataatgagtcacaaaataaagctgtgacagttctgttggtctacaaaaaaaa

SEQ ID NO: 294940 - DNA, 1638 bp, Homo sapiens
  misc_feature (69)..(69): n is a, c, g, or t
agagcacaggctttgaccgatagtaacctctgcgctcggtgcagccgaatctataaaaggaactagtcncggcaaaaaccccgtaattgcgagcgagagtgagtggggccgggacccgcagagccgagccgacccttctctcccgggctgcggcagggcagggcggggagctccgcgcaccaacagagccggttctcagggcgctttgctccttgttttttccccggttctgttttctccccttctccggaaggcttgtcaaggggtaggagaaagagacgcaaacacaaaagtggaaaacagttaatgaccagccacggcgtccctgctgtgagctctggccgctgccttccagggctcccgagccacacgctgggggtgctggctgagggaacatggcttgttggcctcagctgaggttgctgctgtggaagaacctcactttcagaagaagacaaacatgtcagctgctgctggaagtggcctggcctctatttatcttcctgatcctgatctctgttcggctgagctacccaccctatgaacaacatgaatgccattttccaaataaagccatgccctctgcaggaacacttccttgggttcaggggattatctgtaatgccaacaacccctgtttccgttacccgactcctggggaggctcccggagttgttggaaactttaacaaatccattgtggctcgcctgttctcagatgctcggaggcttcttttatacagccagaaagacaccagcatgaaggacatgcgcaaagttctgagaacattacagcagatcaagaaatccagctcaaacttgaagcttcaagatttcctggtggacaatgaaaccttctctgggttcctgtatcacaacctctctctcccaaagtctactgtggacaagatgctgagggctgatgtcattctccacaaggtatttttgcaaggctaccagttacatttgacaagtctgtgcaatggatcaaaatcagaagagatgattcaacttggtgaccaagaagtttctgagctttgtggcctaccaagggagaaactggctgcagcagagcgagtacttcgttccaacatggacatcctgaagccaatcctgatggatgtggcatgtgatgacattgcacatgggcagttaactgtgccaagaagtgcagcagtagcagcaaccggagatgcaaagcccaacatgatggggagagaaactcttctttcaatatgtgcttctgtaccaaaagtggaatttcacgagagacatattttggaacatttttccttttgtgtgtgcgtgagtgtttccctgtttccagccaagggtattgtgagtttctcctgggcctccttcagaatctgggtgctctggaaagcagtgttttggcaacatggggaaagtatggcagtgtgggagggtcagctgggtctgggtttgaatattgcatttgaatattttaccagcattgatgtcggataaattatttagtccctgtaagcctcagttttctcttcttctacatacacataatatatttgactctttgttgtgattattggttacacatatgaagagcctggtgtggggcctggcacacaataggtgctcaataaataaaagttgataattt

SEQ ID NO: 294941 - DNA, 1834 bp, Homo sapiens
  misc_feature (69)..(69): n is a, c, g, or t
  misc_feature (1017)..(1017): n is a, c, g, or t
  misc_feature (1167)..(1167): n is a, c, g, or t
  misc_feature (1183)..(1183): n is a, c, g, or t
  misc_feature (1269)..(1269): n is a, c, g, or t
agagcacaggctttgaccgatagtaacctctgcgctcggtgcagccgaatctataaaaggaactagtcncggcaaaaaccccgtaattgcgagcgagagtgagtggggccgggacccgcagagccgagccgacccttctctcccgggctgcggcagggcagggcggggagctccgcgcaccaacagagccggttctcagggcgctttgctccttgttttttccccggttctgttttctccccttctccggaaggcttgtcaaggggtaggagaaagagacgcaaacacaaaagtggaaaacaggtaagaggctctccagtgacttacttgggcgttattgttttgtttcgaggccaaggaggcttcgggaagtgctcggtttcggggactttgatccggagccccacatccccaccacttgcaactcagatgggaccggaggcggtgttaaatggggagacgatgtcctagtacgagctctggtgaccccaggactctgcgctgctgcgcttggggcttgcccgacggtggagaccggggagcatctctgggcgtggagacccgggcgcagtaccccgggctcagaggggtcgggggttcccgggcgtgctgagggcgctgctgccgggtggggagagctgcaggtccggcaccgagcgctgctttgttcggagggccctgagctggctagaaacccttctggttgcaggtcggccagtacctacggagacaaatgccagcactgagtcttcactcggttcttaagaagctggtctgttctgacctgggaattggctatatgctccccgggactggagcggcacagtcccggactgtgaatccgggaactcgagttggaggtgtcccaaacggtccgtggtgctattgctcactagaggccttgggtctttgtttgacctgaggggtagggaggtcctgcctacagtctccgtgcgctcagctgagctggtgtccctggcgcagagcgcggacgagttttgtttccttttctttttnttttttttctttcctttaagtctcggtctgtcgcccaggctggagtgcaatggaacgatctccgctcactgcaacctccgcctcccgggttcaagcgattctcctgcctcagcctcctgagtagctgggattacaggcgcgtcaccacanccagctaatttttgtntttttagtagagacggggtttcaacttgttggccaggctggtctcgaaccctcgacctcaggtgatccaccggcctcggcctcccnaagtgctgggattataggcgtgagccaccgcgcgcggccgagttttgtttcttttaaaaacaagacttaggagagcctgcggagacccggaggtggggtgcccaatcctccctctcccacgttccctgcagccccatcttccagaccgttgctgctggtctctcggggcagcttctgcctgggcgcagatggggaagctgggccgagttggtgcagtggaatgaccgggagtaaccccggcgggcggcgcagaactcggagctccgccgcggggctgggctgggctctgccgtgagggtgggggtgctgggcgcgcgggctgcggtggccccccggagactggcccgcagcgcctcctagccggaggacctaggaatcggccggctctactaggtgtctttgctcgcggttccgactgtgaatccggtgaagaccggtggttgcagacggggaggaactatgaggctgaggcaggagaatcccttgaacctgggaggccgaggttgcagtgagccgggatcgcactaccgtactccagactgggcgacagagcgagactcctctc

SEQ ID NO: 294942 - DNA, 785 bp, Homo sapiens
gggaagtgaggcttgtagggaattggtagctgattcaaggtcacccagcaggtaaataacagtggtgggaccagacccaattaccaggtatgttttcctctgtaccgcagtacatgcctgagatttatttgtgtgttgaagccagtggtacctaatgtatttacatcccaacctgaaactcctatccacttatttaccttttaatgagcctcttaactcaagtgcagtctgaggaccagcagcatcaggatcacttgggaacttgttagaaattcagcaacctgggcacagctcagacctaccgaatcagaatctgtgcattttaacaagattcttgagtggttgaacacacattaaagcatgagaagcattgaactagacatgtagccaggtaaaggccttgcctgagatggttggcaaaggcctcattgcagcattcattggcaggccacagttcttttggcagctctgcttcctgacctctcaccctcaggaagcgaggctgttcacacggcacacacatgccagacagggtcctctgaagccacggctgccagtgcatgtgtcccagggaaagctttttcctttagttctcacacaacagagcttcttggaagccctccccggcgaaggtgctggtggctctgccttgctccgtccctgacccgttctcacctccttctttgccaccaggaggacagtgtttctcagagcagttctgatgctggtggcgctgactcaaggtttgctgctgggctggggctgggtggatggggtgtgggagc

SEQ ID NO: 294943 - DNA, 1035 bp, Homo sapiens
  misc_feature (69)..(69): n is a, c, g, or t
agagcacaggctttgaccgatagtaacctctgcgctcggtgcagccgaatctataaaaggaactagtcncggcaaaaaccccgtaattgcgagcgagagtgagtggggccgggacccgcagagccgagccgacccttctctcccgggctgcggcagggcagggcggggagctccgcgcaccaacagagccggttctcagggcgctttgctccttgttttttccccggttctgttttctccccttctccggaaggcttgtcaaggggtaggagaaagagacgcaaacacaaaagtggaaaacagtgtcagctgctgctggaagtggcctggcctctatttatcttcctgatcctgatctctgttcggctgagctacccaccctatgaacaacatgaatgccattttccaaataaagccatgccctctgcaggaacacttccttgggttcaggggattatctgtaatgccaacaacccctgtttccgttacccgactcctggggaggctcccggagttgttggaaactttaacaaatccattgtggctcgcctgttctcagatgctcggaggcttcttttatacagccagaaagacaccagcatgaaggacatgcgcaaagttctgagaacattacagcagatcaagaaatccagctcaaacttgaagcttcaagatttcctggtggacaatgaaaccttctctgggttcctgtatcacaacctctctctcccaaagtctactgtggacaagatgctgagggctgatgtcattctccacaaggtaagctgatgcctccagcttcctcagtagggctgatggcaattacgttgtgcagctactggaaagaaatgaataaacccttgtccttgtaatggtggtgaaggggagggaggtagtttgaatacaacttcacttaattttacttccctattcaggcaggaattgccaaaccatccaggagtggaatatgcaacctggcgtcatgggccagctggttaaaataaaattgatttctggcttatcacttggcatttg

SEQ ID NO: 294944 - DNA, 576 bp, Homo sapiens
  misc_feature (17)..(17): n is a, c, g, or t
  misc_feature (39)..(39): n is a, c, g, or t
ggtgcagccgggggganaattttttcaaaaaggaaatcnggaaccaatcctggatggatgtggcatgtgatgacattgcacatgggcagttaactgtgccaagaagtgcagcagtagcagcaaccggagatgcaaagcccaacatgatggggagagaaactcttctttcaatatgtgcttctgtaccaaaagtggaatttcacgagagacatattttggaacatttttccttttgtgtgtgcgtgagtgtttccctgtttccagccaagggtattgtgagtttctcctgggcctccttcagaatctgggtgctctggaaagcagtgttttggcaacatggggaaagtatggcagtgtgggagggtcagctgggtctgggtttgaatattgcatttgaatattttaccagcattgatgtcggataaattatttagtccctgtaagcctcagttttctcttcttctacatacacataatatatttgactctttgttgtgattattggttacacatatgaagagcctggtgtggggcctggcacacaataggtgctcaataaataaaagttgataattt

SEQ ID NO: 294945 - DNA, 9934 bp, Homo sapiens
  misc_feature (69)..(69): n is a, c, g, or t
  misc_feature (1160)..(1160): n is a, c, g, or t
agagcacaggctttgaccgatagtaacctctgcgctcggtgcagccgaatctataaaaggaactagtcncggcaaaaaccccgtaattgcgagcgagagtgagtggggccgggacccgcagagccgagccgacccttctctcccgggctgcggcagggcagggcggggagctccgcgcaccaacagagccggttctcagggcgctttgctccttgttttttccccggttctgttttctccccttctccggaaggcttgtcaaggggtaggagaaagagacgcaaacacaaaagtggaaaacagttaatgaccagccacggcgtccctgctgtgagctctggccgctgccttccagggctcccgagccacacgctgggggtgctggctgagggaacatggcttgttggcctcagctgaggttgctgctgtggaagaacctcactttcagaagaagacaaacatgtcagctgctgctggaagtggcctggcctctatttatcttcctgatcctgatctctgttcggctgagctacccaccctatgaacaacatgaatgccattttccaaataaagccatgccctctgcaggaacacttccttgggttcaggggattatctgtaatgccaacaacccctgtttccgttacccgactcctggggaggctcccggagttgttggaaactttaacaaatccattgtggctcgcctgttctcagatgctcggaggcttcttttatacagccagaaagacaccagcatgaaggacatgcgcaaagttctgagaacattacagcagatcaagaaatccagctcaaacttgaagcttcaagatttcctggtggacaatgaaaccttctctgggttcctgtatcacaacctctctctcccaaagtctactgtggacaagatgctgagggctgatgtcattctccacaaggtatttttgcaaggctaccagttacatttgacaagtctgtgcaatggatcaaaatcagaagagatgattcaacttggtgaccaagaagtttctgagctttgtggcctaccaagggagaaactggctgcagcagagcgagtacttcgttccaacatggacatcctgaagccaatcctgagaacactaaactctacatctcccttcccgagcaaggagctggcngaagccacaaaaacattgctgcatagtcttgggactctggcccaggagctgttcagcatgagaagctggagtgacatgcgacaggaggtgatgtttctgaccaatgtgaacagctccagctcctccacccaaatctaccaggctgtgtctcgtattgtctgcgggcatcccgagggaggggggctgaagatcaagtctctcaactggtatgaggacaacaactacaaagccctctttggaggcaatggcactgaggaagatgctgaaaccttctatgacaactctacaactccttactgcaatgatttgatgaagaatttggagtctagtcctctttcccgcattatctggaaagctctgaagccgctgctcgttgggaagatcctgtatacacctgacactccagccacaaggcaggtcatggctgaggtgaacaagaccttccaggaactggctgtgttccatgatctggaaggcatgtgggaggaactcagccccaagatctggaccttcatggagaacagccaagaaatggaccttgtccggatgctgttggacagcagggacaatgaccacttttgggaacagcagttggatggcttagattggacagcccaagacatcgtggcgtttttggccaagcacccagaggatgtccagtccagtaatggttctgtgtacacctggagagaagctttcaacgagactaaccaggcaatccggaccatatctcgcttcatggagtgtgtcaacctgaacaagctagaacccatagcaacagaagtctggctcatcaacaagtccatggagctgctggatgagaggaagttctgggctggtattgtgttcactggaattactccaggcagcattgagctgccccatcatgtcaagtacaagatccgaatggacattgacaatgtggagaggacaaataaaatcaaggatgggtactgggaccctggtcctcgagctgacccctttgaggacatgcggtacgtctgggggggcttcgcctacttgcaggatgtggtggagcaggcaatcatcagggtgctgacgggcaccgagaagaaaactggtgtctatatgcaacagatgccctatccctgttacgttgatgacatctttctgcgggtgatgagccggtcaatgcccctcttcatgacgctggcctggatttactcagtggctgtgatcatcaagggcatcgtgtatgagaaggaggcacggctgaaagagaccatgcggatcatgggcctggacaacagcatcctctggtttagctggttcattagtagcctcattcctcttcttgtgagcgctggcctgctagtggtcatcctgaagttaggaaacctgctgccctacagtgatcccagcgtggtgtttgtcttcctgtccgtgtttgctgtggtgacaatcctgcagtgcttcctgattagcacactcttctccagagccaacctggcagcagcctgtgggggcatcatctacttcacgctgtacctgccctacgtcctgtgtgtggcatggcaggactacgtgggcttcacactcaagatcttcgctagcctgctgtctcctgtggcttttgggtttggctgtgagtactttgccctttttgaggagcagggcattggagtgcagtgggacaacctgtttgagagtcctgtggaggaagatggcttcaatctcaccacttcggtctccatgatgctgtttgacaccttcctctatggggtgatgacctggtacattgaggctgtctttccaggccagtacggaattcccaggccctggtattttccttgcaccaagtcctactggtttggcgaggaaagtgatgagaagagccaccctggttccaaccagaagagaatatcagaaatctgcatggaggaggaacccacccacttgaagctgggcgtgtccattcagaacctggtaaaagtctaccgagatgggatgaaggtggctgtcgatggcctggcactgaatttttatgagggccagatcacctccttcctgggccacaatggagcggggaagacgaccaccatgtcaatcctgaccgggttgttccccccgacctcgggcaccgcctacatcctgggaaaagacattcgctctgagatgagcaccatccggcagaacctgggggtctgtccccagcataacgtgctgtttgacatgctgactgtcgaagaacacatctggttctatgcccgcttgaaagggctctctgagaagcacgtgaaggcggagatggagcagatggccctggatgttggtttgccatcaagcaagctgaaaagcaaaacaagccagctgtcaggtggaatgcagagaaagctatctgtggccttggcctttgtcgggggatctaaggttgtcattctggatgaacccacagctggtgtggacccttactcccgcaggggaatatgggagctgctgctgaaataccgacaaggccgcaccattattctctctacacaccacatggatgaagcggacgtcctgggggacaggattgccatcatctcccatgggaagctgtgctgtgtgggctcctccctgtttctgaagaaccagctgggaacaggctactacctgaccttggtcaagaaagatgtggaatcctccctcagttcctgcagaaacagtagtagcactgtgtcatacctgaaaaaggaggacagtgtttctcagagcagttctgatgctggcctgggcagcgaccatgagagtgacacgctgaccatcgatgtctctgctatctccaacctcatcaggaagcatgtgtctgaagcccggctggtggaagacatagggcatgagctgacctatgtgctgccatatgaagctgctaaggagggagcctttgtggaactctttcatgagattgatgaccggctctcagacctgggcatttctagttatggcatctcagagacgaccctggaagaaatattcctcaaggtggccgaagagagtggggtggatgctgagacctcagatggtaccttgccagcaagacgaaacaggcgggccttcggggacaagcagagctgtcttcgcccgttcactgaagatgatgctgctgatccaaatgattctgacatagacccagaatccagagagacagacttgctcagtgggatggatggcaaagggtcctaccaggtgaaaggctggaaacttacacagcaacagtttgtggcccttttgtggaagagactgctaattgccagacggagtcggaaaggattttttgctcagattgtcttgccagctgtgtttgtctgcattgcccttgtgttcagcctgatcgtgccaccctttggcaagtaccccagcctggaacttcagccctggatgtacaacgaacagtacacatttgtcagcaatgatgctcctgaggacacgggaaccctggaactcttaaacgccctcaccaaagaccctggcttcgggacccgctgtatggaaggaaacccaatcccagacacgccctgccaggcaggggaggaagagtggaccactgccccagttccccagaccatcatggacctcttccagaatgggaactggacaatgcagaacccttcacctgcatgccagtgtagcagcgacaaaatcaagaagatgctgcctgtgtgtcccccaggggcaggggggctgcctcctccacaaagaaaacaaaacactgcagatatccttcaggacctgacaggaagaaacatttcggattatctggtgaagacgtatgtgcagatcatagccaaaagcttaaagaacaagatctgggtgaatgagtttaggtatggcggcttttccctgggtgtcagtaatactcaagcacttcctccgagtcaagaagttaatgatgccatcaaacaaatgaagaaacacctaaagctggccaaggacagttctgcagatcgatttctcaacagcttgggaagatttatgacaggactggacaccagaaataatgtcaaggtgtggttcaataacaagggctggcatgcaatcagctctttcctgaatgtcatcaacaatgccattctccgggccaacctgcaaaagggagagaaccctagccattatggaattactgctttcaatcatcccctgaatctcaccaagcagcagctctcagaggtggctctgatgaccacatcagtggatgtccttgtgtccatctgtgtcatctttgcaatgtccttcgtcccagccagctttgtcgtattcctgatccaggagcgggtcagcaaagcaaaacacctgcagttcatcagtggagtgaagcctgtcatctactggctctctaattttgtctgggatatgtgcaattacgttgtccctgccacactggtcattatcatcttcatctgcttccagcagaagtcctatgtgtcctccaccaatctgcctgtgctagcccttctacttttgctgtatgggtggtcaatcacacctctcatgtacccagcctcctttgtgttcaagatccccagcacagcctatgtggtgctcaccagcgtgaacctcttcattggcattaatggcagcgtggccacctttgtgctggagctgttcaccgacaataagctgaataatatcaatgatatcctgaagtccgtgttcttgatcttcccacatttttgcctgggacgagggctcatcgacatggtgaaaaaccaggcaatggctgatgccctggaaaggtttggggagaatcgctttgtgtcaccattatcttgggacttggtgggacgaaacctcttcgccatggccgtggaaggggtggtgttcttcctcattactgttctgatccagtacagattcttcatcaggcccagacctgtaaatgcaaagctatctcctctgaatgatgaagatgaagatgtgaggcgggaaagacagagaattcttgatggtggaggccagaatgacatcttagaaatcaaggagttgacgaagatatatagaaggaagcggaagcctgctgttgacaggatttgcgtgggcattcctcctggtgagtgctttgggctcctgggagttaatggggctggaaaatcatcaactttcaagatgttaacaggagataccactgttaccagaggagatgctttccttaacaaaaatagtatcttatcaaacatccatgaagtacatcagaacatgggctactgccctcagtttgatgccatcacagagctgttgactgggagagaacacgtggagttctttgcccttttgagaggagtcccagagaaagaagttggcaaggttggtgagtgggcgattcggaaactgggcctcgtgaagtatggagaaaaatatgctggtaactatagtggaggcaacaaacgcaagctctctacagccatggctttgatcggcgggcctcctgtggtgtttctggatgaacccaccacaggcatggatcccaaagcccggcggttcttgtggaattgtgccctaagtgttgtcaaggaggggagatcagtagtgcttacatctcatagtatggaagaatgtgaagctctttgcactaggatggcaatcatggtcaatggaaggttcaggtgccttggcagtgtccagcatctaaaaaataggtttggagatggttatacaatagttgtacgaatagcagggtccaacccggacctgaagcctgtccaggatttctttggacttgcatttcctggaagtgttctaaaagagaaacaccggaacatgctacaataccagcttccatcttcattatcttctctggccaggatattcagcatcctctcccagagcaaaaagcgactccacatagaagactactctgtttctcagacaacacttgaccaagtatttgtgaactttgccaaggaccaaagtgatgatgaccacttaaaagacctctcattacacaaaaaccagacagtagtggacgttgcagttctcacatcttttctacaggatgagaaagtgaaagaaagctatgtatgaagaatcctgttcatacggggtggctgaaagtaaagaggaactagactttcctttgcaccatgtgaagtgttgtggagaaaagagccagaagttgatgtgggaagaagtaaactggatactgtactgatactattcaatgcaatgcaattcaatgcaatgaaaacaaaattccattacaggggcagtgcctttgtagcctatgtcttgtatggctctcaagtgaaagacttgaatttagttttttacctatacctatgtgaaactctattatggaacccaatggacatatgggtttgaactcacactttttttttttttttgttcctgtgtattctcattggggttgcaacaataattcatcaagtaatcatggccagcgattattgatcaaaatcaaaaggtaatgcacatcctcattcactaagccatgccatgcccaggagactggtttcccggtgacacatccattgctggcaatgagtgtgccagagttattagtgccaagtttttcagaaagtttgaagcaccatggtgtgtcatgctcacttttgtgaaagctgctctgctcagagtctatcaacattgaatatcagttgacagaatggtgccatgcgtggctaacatcctgctttgattccctctgataagctgttctggtggcagtaacatgcaacaaaaatgtgggtgtctctaggcacgggaaacttggttccattgttatattgtcctatgcttcgagccatgggtctacagggtcatccttatgagactcttaaatatacttagatcctggtaagaggcaaagaatcaacagccaaactgctggggctgcaagctgctgaagccagggcatgggattaaagagattgtgcgttcaaacctagggaagcctgtgcccatttgtcctgactgtctgctaacatggtacactgcatctcaagatgtttatctgacacaagtgtattatttctggctttttgaattaatctagaaaatgaaaagatggagttgtattttgacaaaaatgtttgtactttttaatgttatttggaattttaagttctatcagtgacttctgaatccttagaatggcctctttgtagaaccctgtggtatagaggagtatggccactgccccactatttttattttcttatgtaagtttgcatatcagtcatgactagtgcctagaaagcaatgtgatggtcaggatctcatgacattatatttgagtttctttcagatcatttaggatactcttaatctcacttcatcaatcaaatattttttgagtgtatgctgtagctgaaagagtatgtacgtacgtataagactagagagatattaagtctcagtacacttcctgtgccatgttattcagctcactggtttacaaatataggttgtcttgtggttgtaggagcccactgtaacaatactgggcagcctttttttttttttttaaattgcaacaatgcaaaagccaagaaagtataagggtcacaagtctaaacaatgaattcttcaacagggaaaacagctagcttgaaaacttgctgaaaaacacaacttgtgtttatggcatttagtaccttcaaataattggctttgcagatattggataccccattaaatctgacagtctcaaatttttcatctcttcaatcactagtcaagaaaaatataaaaacaacaaatacttccatatggagcatttttcagagttttctaacccagtcttatttttctagtcagtaaacatttgtaaaaatactgtttcactaatacttactgttaactgtcttgagagaaaagaaaaatatgagagaactattgtttggggaagttcaagtgatctttcaatatcattactaacttcttccactttttccaaaatttgaatattaacgctaaaggtgtaagacttcagatttcaaattaatctttctatattttttaaatttacagaatattatataacccactgctgaaaaagaaaaaaatgattgttttagaagttaaagtcaatattgattttaaatataagtaatgaaggcatatttccaataactagtgatatggcatcgttgcattttacagtatcttcaaaaatacagaatttatagaataatttctcctcatttaatatttttcaaaatcaaagttatggtttcctcattttactaaaatcgtattctaattcttcattatagtaaatctatgagcaactccttacttcggttcctctgatttcaaggccatattttaaaaaatcaaaaggcactgtgaactattttgaagaaaacacaacattttaatacagattgaaaggacctcttctgaagctagaaacaatctatagttatacatcttcattaatactgtgttaccttttaaaatagtaattttttacattttcctgtgtaaacctaattgtggtagaaatttttaccaactctatactcaatcaagcaaaatttctgtatattccctgtggaatgtacctatgtgagtttcagaaattctcaaaatacgtgttcaaaaatttctgcttttgcatctttgggacacctcagaaaacttattaacaactgtgaatatgagaaatacagaagaaaataataagccctctatacataaatgcccagcacaattcattgttaaaaaacaaccaaacctcacactactgtatttcattatctgtactgaaagcaaatgctttgtgactattaaatgttgcacatcattcattc

SEQ ID NO: 294946 - DNA, 8640 bp, Homo sapiens
  misc_feature (69)..(69): n is a, c, g, or t
  misc_feature (1160)..(1160): n is a, c, g, or t
agagcacaggctttgaccgatagtaacctctgcgctcggtgcagccgaatctataaaaggaactagtcncggcaaaaaccccgtaattgcgagcgagagtgagtggggccgggacccgcagagccgagccgacccttctctcccgggctgcggcagggcagggcggggagctccgcgcaccaacagagccggttctcagggcgctttgctccttgttttttccccggttctgttttctccccttctccggaaggcttgtcaaggggtaggagaaagagacgcaaacacaaaagtggaaaacagttaatgaccagccacggcgtccctgctgtgagctctggccgctgccttccagggctcccgagccacacgctgggggtgctggctgagggaacatggcttgttggcctcagctgaggttgctgctgtggaagaacctcactttcagaagaagacaaacatgtcagctgctgctggaagtggcctggcctctatttatcttcctgatcctgatctctgttcggctgagctacccaccctatgaacaacatgaatgccattttccaaataaagccatgccctctgcaggaacacttccttgggttcaggggattatctgtaatgccaacaacccctgtttccgttacccgactcctggggaggctcccggagttgttggaaactttaacaaatccattgtggctcgcctgttctcagatgctcggaggcttcttttatacagccagaaagacaccagcatgaaggacatgcgcaaagttctgagaacattacagcagatcaagaaatccagctcaaacttgaagcttcaagatttcctggtggacaatgaaaccttctctgggttcctgtatcacaacctctctctcccaaagtctactgtggacaagatgctgagggctgatgtcattctccacaaggtatttttgcaaggctaccagttacatttgacaagtctgtgcaatggatcaaaatcagaagagatgattcaacttggtgaccaagaagtttctgagctttgtggcctaccaagggagaaactggctgcagcagagcgagtacttcgttccaacatggacatcctgaagccaatcctgagaacactaaactctacatctcccttcccgagcaaggagctggcngaagccacaaaaacattgctgcatagtcttgggactctggcccaggagctgttcagcatgagaagctggagtgacatgcgacaggaggtgatgtttctgaccaatgtgaacagctccagctcctccacccaaatctaccaggctgtgtctcgtattgtctgcgggcatcccgagggaggggggctgaagatcaagtctctcaactggtatgaggacaacaactacaaagccctctttggaggcaatggcactgaggaagatgctgaaaccttctatgacaactctacaactccttactgcaatgatttgatgaagaatttggagtctagtcctctttcccgcattatctggaaagctctgaagccgctgctcgttgggaagatcctgtatacacctgacactccagccacaaggcaggtcatggctgaggtgaacaagaccttccaggaactggctgtgttccatgatctggaaggcatgtgggaggaactcagccccaagatctggaccttcatggagaacagccaagaaatggaccttgtccggatgctgttggacagcagggacaatgaccacttttgggaacagcagttggatggcttagattggacagcccaagacatcgtggcgtttttggccaagcacccagaggatgtccagtccagtaatggttctgtgtacacctggagagaagctttcaacgagactaaccaggcaatccggaccatatctcgcttcatggagtgtgtcaacctgaacaagctagaacccatagcaacagaagtctggctcatcaacaagtccatggagctgctggatgagaggaagttctgggctggtattgtgttcactggaattactccaggcagcattgagctgccccatcatgtcaagtacaagatccgaatggacattgacaatgtggagaggacaaataaaatcaaggatgggtactgggaccctggtcctcgagctgacccctttgaggacatgcggtacgtctgggggggcttcgcctacttgcaggatgtggtggagcaggcaatcatcagggtgctgacgggcaccgagaagaaaactggtgtctatatgcaacagatgccctatccctgttacgttgatgacatctttctgcgggtgatgagccggtcaatgcccctcttcatgacgctggcctggatttactcagtggctgtgatcatcaagggcatcgtgtatgagaaggaggcacggctgaaagagaccatgcggatcatgggcctggacaacagcatcctctggtttagctggttcattagtagcctcattcctcttcttgtgagcgctggcctgctagtggtcatcctgaagttaggaaacctgctgccctacagtgatcccagcgtggtgtttgtcttcctgtccgtgtttgctgtggtgacaatcctgcagtgcttcctgattagcacactcttctccagagccaacctggcagcagcctgtgggggcatcatctacttcacgctgtacctgccctacgtcctgtgtgtggcatggcaggactacgtgggcttcacactcaagatcttcgctagcctgctgtctcctgtggcttttgggtttggctgtgagtactttgccctttttgaggagcagggcattggagtgcagtgggacaacctgtttgagagtcctgtggaggaagatggcttcaatctcaccacttcggtctccatgatgctgtttgacaccttcctctatggggtgatgacctggtacattgaggctgtctttccaggccagtacggaattcccaggccctggtattttccttgcaccaagtcctactggtttggcgaggaaagtgatgagaagagccaccctggttccaaccagaagagaatatcagaaatctgcatggaggaggaacccacccacttgaagctgggcgtgtccattcagaacctggtaaaagtctaccgagatgggatgaaggtggctgtcgatggcctggcactgaatttttatgagggccagatcacctccttcctgggccacaatggagcggggaagacgaccaccatgtcaatcctgaccgggttgttccccccgacctcgggcaccgcctacatcctgggaaaagacattcgctctgagatgagcaccatccggcagaacctgggggtctgtccccagcataacgtgctgtttgacatgctgactgtcgaagaacacatctggttctatgcccgcttgaaagggctctctgagaagcacgtgaaggcggagatggagcagatggccctggatgttggtttgccatcaagcaagctgaaaagcaaaacaagccagctgtcaggtggaatgcagagaaagctatctgtggccttggcctttgtcgggggatctaaggttgtcattctggatgaacccacagctggtgtggacccttactcccgcaggggaatatgggagctgctgctgaaataccgacaaggccgcaccattattctctctacacaccacatggatgaagcggacgtcctgggggacaggattgccatcatctcccatgggaagctgtgctgtgtgggctcctccctgtttctgaagaaccagctgggaacaggctactacctgaccttggtcaagaaagatgtggaatcctccctcagttcctgcagaaacagtagtagcactgtgtcatacctgaaaaaggaggacagtgtttctcagagcagttctgatgctggcctgggcagcgaccatgagagtgacacgctgaccatcgatgtctctgctatctccaacctcatcaggaagcatgtgtctgaagcccggctggtggaagacatagggcatgagctgacctatgtgctgccatatgaagctgctaaggagggagcctttgtggaactctttcatgagattgatgaccggctctcagacctgggcatttctagttatggcatctcagagacgaccctggaagaaatattcctcaaggtggccgaagagagtggggtggatgctgagacctcagatggtaccttgccagcaagacgaaacaggcgggccttcggggacaagcagagctgtcttcgcccgttcactgaagatgatgctgctgatccaaatgattctgacatagacccagaatccagagagacagacttgctcagtgggatggatggcaaagggtcctaccaggtgaaaggctggaaacttacacagcaacagtttgtggcccttttgtggaagagactgctaattgccagacggagtcggaaaggattttttgctcagattgtcttgccagctgtgtttgtctgcattgcccttgtgttcagcctgatcgtgccaccctttggcaagtaccccagcctggaacttcagccctggatgtacaacgaacagtacacatttgtcagcaatgatgctcctgaggacacgggaaccctggaactcttaaacgccctcaccaaagaccctggcttcgggacccgctgtatggaaggaaacccaatcccagacacgccctgccaggcaggggaggaagagtggaccactgccccagttccccagaccatcatggacctcttccagaatgggaactggacaatgcagaacccttcacctgcatgccagtgtagcagcgacaaaatcaagaagatgctgcctgtgtgtcccccaggggcaggggggctgcctcctccacaaagaaaacaaaacactgcagatatccttcaggacctgacaggaagaaacatttcggattatctggtgaagacgtatgtgcagatcatagccaaaagcttaaagaacaagatctgggtgaatgagtttaggtatggcggcttttccctgggtgtcagtaatactcaagcacttcctccgagtcaagaagttaatgatgccatcaaacaaatgaagaaacacctaaagctggccaaggacagttctgcagatcgatttctcaacagcttgggaagatttatgacaggactggacaccagaaataatgtcaaggtgtggttcaataacaagggctggcatgcaatcagctctttcctgaatgtcatcaacaatgccattctccgggccaacctgcaaaagggagagaaccctagccattatggaattactgctttcaatcatcccctgaatctcaccaagcagcagctctcagaggtggctctgatgaccacatcagtggatgtccttgtgtccatctgtgtcatctttgcaatgtccttcgtcccagccagctttgtcgtattcctgatccaggagcgggtcagcaaagcaaaacacctgcagttcatcagtggagtgaagcctgtcatctactggctctctaattttgtctgggatatgtgcaattacgttgtccctgccacactggtcattatcatcttcatctgcttccagcagaagtcctatgtgtcctccaccaatctgcctgtgctagcccttctacttttgctgtatgggtggtcaatcacacctctcatgtacccagcctcctttgtgttcaagatccccagcacagcctatgtggtgctcaccagcgtgaacctcttcattggcattaatggcagcgtggccacctttgtgctggagctgttcaccgacaataagctgaataatatcaatgatatcctgaagtccgtgttcttgatcttcccacatttttgcctgggacgagggctcatcgacatggtgaaaaaccaggcaatggctgatgccctggaaaggtttggggagaatcgctttgtgtcaccattatcttgggacttggtgggacgaaacctcttcgccatggccgtggaaggggtggtgttcttcctcattactgttctgatccagtacagattcttcatcaggcccagacctgtaaatgcaaagctatctcctctgaatgatgaagatgaagatgtgaggcgggaaagacagagaattcttgatggtggaggccagaatgacatcttagaaatcaaggagttgacgaagatatatagaaggaagcggaagcctgctgttgacaggatttgcgtgggcattcctcctggtgagtgctttgggctcctgggagttaatggggctggaaaatcatcaactttcaagatgttaacaggagataccactgttaccagaggagatgctttccttaacaaaaatagtatcttatcaaacatccatgaagtacatcagaacatgggctactgccctcagtttgatgccatcacagagctgttgactgggagagaacacgtggagttctttgcccttttgagaggagtcccagagaaagaagttggcaaggttggtgagtgggcgattcggaaactgggcctcgtgaagtatggagaaaaatatgctggtaactatagtggaggcaacaaacgcaagctctctacagccatggctttgatcggcgggcctcctgtggtgtttctggatgaacccaccacaggcatggatcccaaagcccggcggttcttgtggaattgtgccctaagtgttgtcaaggaggggagatcagtagtgcttacatctcatagtatggaagaatgtgaagctctttgcactaggatggcaatcatggtcaatggaaggttcaggtgccttggcagtgtccagcatctaaaaaataggtttggagatggttatacaatagttgtacgaatagcagggtccaacccggacctgaagcctgtccaggatttctttggacttgcatttcctggaagtgttctaaaagagaaacaccggaacatgctacaataccagcttccatcttcattatcttctctggccaggatattcagcatcctctcccagagcaaaaagcgactccacatagaagactactctgtttctcagacaacacttgaccaagtatttgtgaactttgccaaggaccaaagtgatgatgaccacttaaaagacctctcattacacaaaaaccagacagtagtggacgttgcagttctcacatcttttctacaggatgagaaagtgaaagaaagctatgtatgaagaatcctgttcatacggggtggctgaaagtaaagaggaactagactttcctttgcaccatgtgaagtgttgtggagaaaagagccagaagttgatgtgggaagaagtaaactggatactgtactgatactattcaatgcaatgcaattcaatgcaatgaaaacaaaattccattacaggggcagtgcctttgtagcctatgtcttgtatggctctcaagtgaaagacttgaatttagttttttacctatacctatgtgaaactctattatggaacccaatggacatatgggtttgaactcacactttttttttttttttgttcctgtgtattctcattggggttgcaacaataattcatcaagtaatcatggccagcgattattgatcaaaatcaaaaggtaatgcacatcctcattcactaagccatgccatgcccaggagactggtttcccggtgacacatccattgctggcaatgagtgtgccagagttattagtgccaagtttttcagaaagtttgaagcaccatggtgtgtcatgctcacttttgtgaaagctgctctgctcagagtctatcaacattgaatatcagttgacagaatggtgccatgcgtggctaacatcctgctttgattccctctgataagctgttctggtggcagtaacatgcaacaaaaatgtgggtgtctctaggcacgggaaacttggttccattgttatattgtcctatgcttcgagccatgggtctacagggtcatccttatgagactcttaaatatacttagatcctggtaagaggcaaagaatcaacagccaaactgctggggctgcaagctgctgaagccagggcatgggattaaagagattgtgcgttcaaacctagggaagcctgtgcccatttgtcctgactgtctgctaacatggtacactgcatctcaagatgtttatctgacacaagtgtattatttctggctttttgaattaatctagaaaatgaaaagatggagttgtattttgacaaaaatgtttgtactttttaatgttatttggaattttaagttctatcagtgacttctgaatccttagaatggcctctttgtagaaccctgtggtatagaggagtatggccactgccccactatttttattttcttatgtaagtttgcatatcagtcatgactagtgcctagaaagcaatgtgatggtcaggatctcatgacattatatttgagtttctttcagatcatttaggatactcttaatctcacttcatcaatcaaatattttttgagtgtatgctgtagctgaaagagtatgtacgtacgtataagactagagagatattaagtctcagtacacttcctgtgccatgttattcagctcactggtttacaaatataggttgtcttgtgacccttatactttcttggcttttgcattgttgcaattaaaaaaaaa

SEQ ID NO: 294947 - DNA, 9966 bp, Homo sapiens
ctcccaaagtactgggattacaggtgtgagccactgcacccggcccagactcgagtttttcatcttaatgctttttcattgcctgacactttactgagaccaagatagggaacttcacatacagtaccttttctcccaaggcggaagagggctgttcaatttctacactagagttcggggagttttagaaatgagtcagttatcgaggatgagagcagttcctgataggctcaaccacaatgagatgtagctgttcagagaaagcattcttttatctataaactggaagataatcccggtgaaacgaagcccagccccaggggcttcactaactccaggctgtgcttctcaaactttagtgagcataggaatcacctgggcatcttgtgaagctgtagatttgaattctgcaggtcggcagaggggtctcagaatccgcatttccaacaatgtctccagtaatgctgatgctgctcgtccctggaccacagattgggtagccaggttctggcaagctcatcccaaggctttgagatgacatcagacaaaatatgttctgggacatggcttttgagaggtcaagaaaataagatgtttctttctcttctcatccccaacccttgcactgcccttttctcccttcccctaccctcctttctgtccccatccctgacgccagctgttcagcatgagaagctggagtgacatgcgacaggaggtgatgtttctgaccaatgtgaacagctccagctcctccacccaaatctaccaggctgtgtctcgtattgtctgcgggcatcccgagggaggggggctgaagatcaagtctctcaactggtatgaggacaacaactacaaagccctctttggaggcaatggcactgaggaagatgctgaaaccttctatgacaactctacaactccttactgcaatgatttgatgaagaatttggagtctagtcctctttcccgcattatctggaaagctctgaagccgctgctcgttgggaagatcctgtatacacctgacactccagccacaaggcaggtcatggctgaggtgaacaagaccttccaggaactggctgtgttccatgatctggaaggcatgtgggaggaactcagccccaagatctggaccttcatggagaacagccaagaaatggaccttgtccggatgctgttggacagcagggacaatgaccacttttgggaacagcagttggatggcttagattggacagcccaagacatcgtggcgtttttggccaagcacccagaggatgtccagtccagtaatggttctgtgtacacctggagagaagctttcaacgagactaaccaggcaatccggaccatatctcgcttcatggagtgtgtcaacctgaacaagctagaacccatagcaacagaagtctggctcatcaacaagtccatggagctgctggatgagaggaagttctgggctggtattgtgttcactggaattactccaggcagcattgagctgccccatcatgtcaagtacaagatccgaatggacattgacaatgtggagaggacaaataaaatcaaggatgggtactgggaccctggtcctcgagctgacccctttgaggacatgcggtacgtctgggggggcttcgcctacttgcaggatgtggtggagcaggcaatcatcagggtgctgacgggcaccgagaagaaaactggtgtctatatgcaacagatgccctatccctgttacgttgatgacatctttctgcgggtgatgagccggtcaatgcccctcttcatgacgctggcctggatttactcagtggctgtgatcatcaagggcatcgtgtatgagaaggaggcacggctgaaagagaccatgcggatcatgggcctggacaacagcatcctctggtttagctggttcattagtagcctcattcctcttcttgtgagcgctggcctgctagtggtcatcctgaagttaggaaacctgctgccctacagtgatcccagcgtggtgtttgtcttcctgtccgtgtttgctgtggtgacaatcctgcagtgcttcctgattagcacactcttctccagagccaacctggcagcagcctgtgggggcatcatctacttcacgctgtacctgccctacgtcctgtgtgtggcatggcaggactacgtgggcttcacactcaagatcttcgctagcctgctgtctcctgtggcttttgggtttggctgtgagtactttgccctttttgaggagcagggcattggagtgcagtgggacaacctgtttgagagtcctgtggaggaagatggcttcaatctcaccacttcggtctccatgatgctgtttgacaccttcctctatggggtgatgacctggtacattgaggctgtctttccaggccagtacggaattcccaggccctggtattttccttgcaccaagtcctactggtttggcgaggaaagtgatgagaagagccaccctggttccaaccagaagagaatatcagaaatctgcatggaggaggaacccacccacttgaagctgggcgtgtccattcagaacctggtaaaagtctaccgagatgggatgaaggtggctgtcgatggcctggcactgaatttttatgagggccagatcacctccttcctgggccacaatggagcggggaagacgaccaccatgtcaatcctgaccgggttgttccccccgacctcgggcaccgcctacatcctgggaaaagacattcgctctgagatgagcaccatccggcagaacctgggggtctgtccccagcataacgtgctgtttgacatgctgactgtcgaagaacacatctggttctatgcccgcttgaaagggctctctgagaagcacgtgaaggcggagatggagcagatggccctggatgttggtttgccatcaagcaagctgaaaagcaaaacaagccagctgtcaggtggaatgcagagaaagctatctgtggccttggcctttgtcgggggatctaaggttgtcattctggatgaacccacagctggtgtggacccttactcccgcaggggaatatgggagctgctgctgaaataccgacaaggccgcaccattattctctctacacaccacatggatgaagcggacgtcctgggggacaggattgccatcatctcccatgggaagctgtgctgtgtgggctcctccctgtttctgaagaaccagctgggaacaggctactacctgaccttggtcaagaaagatgtggaatcctccctcagttcctgcagaaacagtagtagcactgtgtcatacctgaaaaaggaggacagtgtttctcagagcagttctgatgctggcctgggcagcgaccatgagagtgacacgctgaccatcgatgtctctgctatctccaacctcatcaggaagcatgtgtctgaagcccggctggtggaagacatagggcatgagctgacctatgtgctgccatatgaagctgctaaggagggagcctttgtggaactctttcatgagattgatgaccggctctcagacctgggcatttctagttatggcatctcagagacgaccctggaagaaatattcctcaaggtggccgaagagagtggggtggatgctgagacctcagatggtaccttgccagcaagacgaaacaggcgggccttcggggacaagcagagctgtcttcgcccgttcactgaagatgatgctgctgatccaaatgattctgacatagacccagaatccagagagacagacttgctcagtgggatggatggcaaagggtcctaccaggtgaaaggctggaaacttacacagcaacagtttgtggcccttttgtggaagagactgctaattgccagacggagtcggaaaggattttttgctcagattgtcttgccagctgtgtttgtctgcattgcccttgtgttcagcctgatcgtgccaccctttggcaagtaccccagcctggaacttcagccctggatgtacaacgaacagtacacatttgtcagcaatgatgctcctgaggacacgggaaccctggaactcttaaacgccctcaccaaagaccctggcttcgggacccgctgtatggaaggaaacccaatcccagacacgccctgccaggcaggggaggaagagtggaccactgccccagttccccagaccatcatggacctcttccagaatgggaactggacaatgcagaacccttcacctgcatgccagtgtagcagcgacaaaatcaagaagatgctgcctgtgtgtcccccaggggcaggggggctgcctcctccacaaagaaaacaaaacactgcagatatccttcaggacctgacaggaagaaacatttcggattatctggtgaagacgtatgtgcagatcatagccaaaagcttaaagaacaagatctgggtgaatgagtttaggtatggcggcttttccctgggtgtcagtaatactcaagcacttcctccgagtcaagaagttaatgatgccatcaaacaaatgaagaaacacctaaagctggccaaggacagttctgcagatcgatttctcaacagcttgggaagatttatgacaggactggacaccagaaataatgtcaaggtgtggttcaataacaagggctggcatgcaatcagctctttcctgaatgtcatcaacaatgccattctccgggccaacctgcaaaagggagagaaccctagccattatggaattactgctttcaatcatcccctgaatctcaccaagcagcagctctcagaggtggctctgatgaccacatcagtggatgtccttgtgtccatctgtgtcatctttgcaatgtccttcgtcccagccagctttgtcgtattcctgatccaggagcgggtcagcaaagcaaaacacctgcagttcatcagtggagtgaagcctgtcatctactggctctctaattttgtctgggatatgtgcaattacgttgtccctgccacactggtcattatcatcttcatctgcttccagcagaagtcctatgtgtcctccaccaatctgcctgtgctagcccttctacttttgctgtatgggtggtcaatcacacctctcatgtacccagcctcctttgtgttcaagatccccagcacagcctatgtggtgctcaccagcgtgaacctcttcattggcattaatggcagcgtggccacctttgtgctggagctgttcaccgacaataagctgaataatatcaatgatatcctgaagtccgtgttcttgatcttcccacatttttgcctgggacgagggctcatcgacatggtgaaaaaccaggcaatggctgatgccctggaaaggtttggggagaatcgctttgtgtcaccattatcttgggacttggtgggacgaaacctcttcgccatggccgtggaaggggtggtgttcttcctcattactgttctgatccagtacagattcttcatcaggcccagacctgtaaatgcaaagctatctcctctgaatgatgaagatgaagatgtgaggcgggaaagacagagaattcttgatggtggaggccagaatgacatcttagaaatcaaggagttgacgaagatatatagaaggaagcggaagcctgctgttgacaggatttgcgtgggcattcctcctggtgagtgctttgggctcctgggagttaatggggctggaaaatcatcaactttcaagatgttaacaggagataccactgttaccagaggagatgctttccttaacaaaaatagtatcttatcaaacatccatgaagtacatcagaacatgggctactgccctcagtttgatgccatcacagagctgttgactgggagagaacacgtggagttctttgcccttttgagaggagtcccagagaaagaagttggcaaggttggtgagtgggcgattcggaaactgggcctcgtgaagtatggagaaaaatatgctggtaactatagtggaggcaacaaacgcaagctctctacagccatggctttgatcggcgggcctcctgtggtgtttctggatgaacccaccacaggcatggatcccaaagcccggcggttcttgtggaattgtgccctaagtgttgtcaaggaggggagatcagtagtgcttacatctcatagtatggaagaatgtgaagctctttgcactaggatggcaatcatggtcaatggaaggttcaggtgccttggcagtgtccagcatctaaaaaataggtttggagatggttatacaatagttgtacgaatagcagggtccaacccggacctgaagcctgtccaggatttctttggacttgcatttcctggaagtgttctaaaagagaaacaccggaacatgctacaataccagcttccatcttcattatcttctctggccaggatattcagcatcctctcccagagcaaaaagcgactccacatagaagactactctgtttctcagacaacacttgaccaagtatttgtgaactttgccaaggaccaaagtgatgatgaccacttaaaagacctctcattacacaaaaaccagacagtagtggacgttgcagttctcacatcttttctacaggatgagaaagtgaaagaaagctatgtatgaagaatcctgttcatacggggtggctgaaagtaaagaggaactagactttcctttgcaccatgtgaagtgttgtggagaaaagagccagaagttgatgtgggaagaagtaaactggatactgtactgatactattcaatgcaatgcaattcaatgcaatgaaaacaaaattccattacaggggcagtgcctttgtagcctatgtcttgtatggctctcaagtgaaagacttgaatttagttttttacctatacctatgtgaaactctattatggaacccaatggacatatgggtttgaactcacactttttttttttttttgttcctgtgtattctcattggggttgcaacaataattcatcaagtaatcatggccagcgattattgatcaaaatcaaaaggtaatgcacatcctcattcactaagccatgccatgcccaggagactggtttcccggtgacacatccattgctggcaatgagtgtgccagagttattagtgccaagtttttcagaaagtttgaagcaccatggtgtgtcatgctcacttttgtgaaagctgctctgctcagagtctatcaacattgaatatcagttgacagaatggtgccatgcgtggctaacatcctgctttgattccctctgataagctgttctggtggcagtaacatgcaacaaaaatgtgggtgtctctaggcacgggaaacttggttccattgttatattgtcctatgcttcgagccatgggtctacagggtcatccttatgagactcttaaatatacttagatcctggtaagaggcaaagaatcaacagccaaactgctggggctgcaagctgctgaagccagggcatgggattaaagagattgtgcgttcaaacctagggaagcctgtgcccatttgtcctgactgtctgctaacatggtacactgcatctcaagatgtttatctgacacaagtgtattatttctggctttttgaattaatctagaaaatgaaaagatggagttgtattttgacaaaaatgtttgtactttttaatgttatttggaattttaagttctatcagtgacttctgaatccttagaatggcctctttgtagaaccctgtggtatagaggagtatggccactgccccactatttttattttcttatgtaagtttgcatatcagtcatgactagtgcctagaaagcaatgtgatggtcaggatctcatgacattatatttgagtttctttcagatcatttaggatactcttaatctcacttcatcaatcaaatattttttgagtgtatgctgtagctgaaagagtatgtacgtacgtataagactagagagatattaagtctcagtacacttcctgtgccatgttattcagctcactggtttacaaatataggttgtcttgtggttgtaggagcccactgtaacaatactgggcagcctttttttttttttttaaattgcaacaatgcaaaagccaagaaagtataagggtcacaagtctaaacaatgaattcttcaacagggaaaacagctagcttgaaaacttgctgaaaaacacaacttgtgtttatggcatttagtaccttcaaataattggctttgcagatattggataccccattaaatctgacagtctcaaatttttcatctcttcaatcactagtcaagaaaaatataaaaacaacaaatacttccatatggagcatttttcagagttttctaacccagtcttatttttctagtcagtaaacatttgtaaaaatactgtttcactaatacttactgttaactgtcttgagagaaaagaaaaatatgagagaactattgtttggggaagttcaagtgatctttcaatatcattactaacttcttccactttttccaaaatttgaatattaacgctaaaggtgtaagacttcagatttcaaattaatctttctatattttttaaatttacagaatattatataacccactgctgaaaaagaaaaaaatgattgttttagaagttaaagtcaatattgattttaaatataagtaatgaaggcatatttccaataactagtgatatggcatcgttgcattttacagtatcttcaaaaatacagaatttatagaataatttctcctcatttaatatttttcaaaatcaaagttatggtttcctcattttactaaaatcgtattctaattcttcattatagtaaatctatgagcaactccttacttcggttcctctgatttcaaggccatattttaaaaaatcaaaaggcactgtgaactattttgaagaaaacacaacattttaatacagattgaaaggacctcttctgaagctagaaacaatctatagttatacatcttcattaatactgtgttaccttttaaaatagtaattttttacattttcctgtgtaaacctaattgtggtagaaatttttaccaactctatactcaatcaagcaaaatttctgtatattccctgtggaatgtacctatgtgagtttcagaaattctcaaaatacgtgttcaaaaatttctgcttttgcatctttgggacacctcagaaaacttattaacaactgtgaatatgagaaatacagaagaaaataataagccctctatacataaatgcccagcacaattcattgttaaaaaacaaccaaacctcacactactgtatttcattatctgtactgaaagcaaatgctttgtgactattaaatgttgcacatcattcattcactgtatagtaatcattgactaaagccatttgtctgtgttttcttcttgtggttgtatatatcaggtaaaatattttccaaagagccatgtgtcatgtaatactgaaccactttgatattgagacattaatttgtacccttgttattatctactagtaataatgtaatactgtagaaatattgctctaattcttttcaaaattgttgcatcccccttagaatgtttctatttccataaggatttaggtatgctattatcccttcttataccctaagatgaagctgtttttgtgctctttgttcatcattggccctcattccaagcactttacgctgtctgtaatgggatctatttttgcactggaatatctgagaattgcaaaactagacaaaagtttcacaacagatttctaagttaaatcattttcattaaaaggaaaaaagaaaaaaaattttgtatgtcaataactttatatgaagtattaaaatgcatatttctatgttgtaatataatgagtcacaaaataaagctgtgacagttctgttggtctacaaaaaaaa

SEQ ID NO: 294948 - DNA, 7331 bp, Homo sapiens
gggaagtgaggcttgtagggaattggtagctgattcaaggtcacccagcaggtaaataacagtggtgggaccagacccaattaccaggtatgttttcctctgtaccgcagtacatgcctgagatttatttgtgtgttgaagccagtggtacctaatgtatttacatcccaacctgaaactcctatccacttatttaccttttaatgagcctcttaactcaagtgcagtctgaggaccagcagcatcaggatcacttgggaacttgttagaaattcagcaacctgggcacagctcagacctaccgaatcagaatctgtgcattttaacaagattcttgagtggttgaacacacattaaagcatgagaagcattgaactagacatgtagccaggtaaaggccttgcctgagatggttggcaaaggcctcattgcagcattcattggcaggccacagttcttttggcagctctgcttcctgacctctcaccctcaggaagcgaggctgttcacacggcacacacatgccagacagggtcctctgaagccacggctgccagtgcatgtgtcccagggaaagctttttcctttagttctcacacaacagagcttcttggaagccctccccggcgaaggtgctggtggctctgccttgctccgtccctgacccgttctcacctccttctttgccaccaggaggacagtgtttctcagagcagttctgatgctggcctgggcagcgaccatgagagtgacacgctgaccatcgatgtctctgctatctccaacctcatcaggaagcatgtgtctgaagcccggctggtggaagacatagggcatgagctgacctatgtgctgccatatgaagctgctaaggagggagcctttgtggaactctttcatgagattgatgaccggctctcagacctgggcatttctagttatggcatctcagagacgaccctggaagaaatattcctcaaggtggccgaagagagtggggtggatgctgagacctcagatggtaccttgccagcaagacgaaacaggcgggccttcggggacaagcagagctgtcttcgcccgttcactgaagatgatgctgctgatccaaatgattctgacatagacccagaatccagagagacagacttgctcagtgggatggatggcaaagggtcctaccaggtgaaaggctggaaacttacacagcaacagtttgtggcccttttgtggaagagactgctaattgccagacggagtcggaaaggattttttgctcagattgtcttgccagctgtgtttgtctgcattgcccttgtgttcagcctgatcgtgccaccctttggcaagtaccccagcctggaacttcagccctggatgtacaacgaacagtacacatttgtcagcaatgatgctcctgaggacacgggaaccctggaactcttaaacgccctcaccaaagaccctggcttcgggacccgctgtatggaaggaaacccaatcccagacacgccctgccaggcaggggaggaagagtggaccactgccccagttccccagaccatcatggacctcttccagaatgggaactggacaatgcagaacccttcacctgcatgccagtgtagcagcgacaaaatcaagaagatgctgcctgtgtgtcccccaggggcaggggggctgcctcctccacaaagaaaacaaaacactgcagatatccttcaggacctgacaggaagaaacatttcggattatctggtgaagacgtatgtgcagatcatagccaaaagcttaaagaacaagatctgggtgaatgagtttaggtatggcggcttttccctgggtgtcagtaatactcaagcacttcctccgagtcaagaagttaatgatgccatcaaacaaatgaagaaacacctaaagctggccaaggacagttctgcagatcgatttctcaacagcttgggaagatttatgacaggactggacaccagaaataatgtcaaggtgtggttcaataacaagggctggcatgcaatcagctctttcctgaatgtcatcaacaatgccattctccgggccaacctgcaaaagggagagaaccctagccattatggaattactgctttcaatcatcccctgaatctcaccaagcagcagctctcagaggtggctctgatgaccacatcagtggatgtccttgtgtccatctgtgtcatctttgcaatgtccttcgtcccagccagctttgtcgtattcctgatccaggagcgggtcagcaaagcaaaacacctgcagttcatcagtggagtgaagcctgtcatctactggctctctaattttgtctgggatatgtgcaattacgttgtccctgccacactggtcattatcatcttcatctgcttccagcagaagtcctatgtgtcctccaccaatctgcctgtgctagcccttctacttttgctgtatgggtggtcaatcacacctctcatgtacccagcctcctttgtgttcaagatccccagcacagcctatgtggtgctcaccagcgtgaacctcttcattggcattaatggcagcgtggccacctttgtgctggagctgttcaccgacaataagctgaataatatcaatgatatcctgaagtccgtgttcttgatcttcccacatttttgcctgggacgagggctcatcgacatggtgaaaaaccaggcaatggctgatgccctggaaaggtttggggagaatcgctttgtgtcaccattatcttgggacttggtgggacgaaacctcttcgccatggccgtggaaggggtggtgttcttcctcattactgttctgatccagtacagattcttcatcaggcccagacctgtaaatgcaaagctatctcctctgaatgatgaagatgaagatgtgaggcgggaaagacagagaattcttgatggtggaggccagaatgacatcttagaaatcaaggagttgacgaagatatatagaaggaagcggaagcctgctgttgacaggatttgcgtgggcattcctcctggtgagtgctttgggctcctgggagttaatggggctggaaaatcatcaactttcaagatgttaacaggagataccactgttaccagaggagatgctttccttaacaaaaatagtatcttatcaaacatccatgaagtacatcagaacatgggctactgccctcagtttgatgccatcacagagctgttgactgggagagaacacgtggagttctttgcccttttgagaggagtcccagagaaagaagttggcaaggttggtgagtgggcgattcggaaactgggcctcgtgaagtatggagaaaaatatgctggtaactatagtggaggcaacaaacgcaagctctctacagccatggctttgatcggcgggcctcctgtggtgtttctggatgaacccaccacaggcatggatcccaaagcccggcggttcttgtggaattgtgccctaagtgttgtcaaggaggggagatcagtagtgcttacatctcatagtatggaagaatgtgaagctctttgcactaggatggcaatcatggtcaatggaaggttcaggtgccttggcagtgtccagcatctaaaaaataggtttggagatggttatacaatagttgtacgaatagcagggtccaacccggacctgaagcctgtccaggatttctttggacttgcatttcctggaagtgttctaaaagagaaacaccggaacatgctacaataccagcttccatcttcattatcttctctggccaggatattcagcatcctctcccagagcaaaaagcgactccacatagaagactactctgtttctcagacaacacttgaccaagtatttgtgaactttgccaaggaccaaagtgatgatgaccacttaaaagacctctcattacacaaaaaccagacagtagtggacgttgcagttctcacatcttttctacaggatgagaaagtgaaagaaagctatgtatgaagaatcctgttcatacggggtggctgaaagtaaagaggaactagactttcctttgcaccatgtgaagtgttgtggagaaaagagccagaagttgatgtgggaagaagtaaactggatactgtactgatactattcaatgcaatgcaattcaatgcaatgaaaacaaaattccattacaggggcagtgcctttgtagcctatgtcttgtatggctctcaagtgaaagacttgaatttagttttttacctatacctatgtgaaactctattatggaacccaatggacatatgggtttgaactcacactttttttttttttttgttcctgtgtattctcattggggttgcaacaataattcatcaagtaatcatggccagcgattattgatcaaaatcaaaaggtaatgcacatcctcattcactaagccatgccatgcccaggagactggtttcccggtgacacatccattgctggcaatgagtgtgccagagttattagtgccaagtttttcagaaagtttgaagcaccatggtgtgtcatgctcacttttgtgaaagctgctctgctcagagtctatcaacattgaatatcagttgacagaatggtgccatgcgtggctaacatcctgctttgattccctctgataagctgttctggtggcagtaacatgcaacaaaaatgtgggtgtctctaggcacgggaaacttggttccattgttatattgtcctatgcttcgagccatgggtctacagggtcatccttatgagactcttaaatatacttagatcctggtaagaggcaaagaatcaacagccaaactgctggggctgcaagctgctgaagccagggcatgggattaaagagattgtgcgttcaaacctagggaagcctgtgcccatttgtcctgactgtctgctaacatggtacactgcatctcaagatgtttatctgacacaagtgtattatttctggctttttgaattaatctagaaaatgaaaagatggagttgtattttgacaaaaatgtttgtactttttaatgttatttggaattttaagttctatcagtgacttctgaatccttagaatggcctctttgtagaaccctgtggtatagaggagtatggccactgccccactatttttattttcttatgtaagtttgcatatcagtcatgactagtgcctagaaagcaatgtgatggtcaggatctcatgacattatatttgagtttctttcagatcatttaggatactcttaatctcacttcatcaatcaaatattttttgagtgtatgctgtagctgaaagagtatgtacgtacgtataagactagagagatattaagtctcagtacacttcctgtgccatgttattcagctcactggtttacaaatataggttgtcttgtggttgtaggagcccactgtaacaatactgggcagcctttttttttttttttaaattgcaacaatgcaaaagccaagaaagtataagggtcacaagtctaaacaatgaattcttcaacagggaaaacagctagcttgaaaacttgctgaaaaacacaacttgtgtttatggcatttagtaccttcaaataattggctttgcagatattggataccccattaaatctgacagtctcaaatttttcatctcttcaatcactagtcaagaaaaatataaaaacaacaaatacttccatatggagcatttttcagagttttctaacccagtcttatttttctagtcagtaaacatttgtaaaaatactgtttcactaatacttactgttaactgtcttgagagaaaagaaaaatatgagagaactattgtttggggaagttcaagtgatctttcaatatcattactaacttcttccactttttccaaaatttgaatattaacgctaaaggtgtaagacttcagatttcaaattaatctttctatattttttaaatttacagaatattatataacccactgctgaaaaagaaaaaaatgattgttttagaagttaaagtcaatattgattttaaatataagtaatgaaggcatatttccaataactagtgatatggcatcgttgcattttacagtatcttcaaaaatacagaatttatagaataatttctcctcatttaatatttttcaaaatcaaagttatggtttcctcattttactaaaatcgtattctaattcttcattatagtaaatctatgagcaactccttacttcggttcctctgatttcaaggccatattttaaaaaatcaaaaggcactgtgaactattttgaagaaaacacaacattttaatacagattgaaaggacctcttctgaagctagaaacaatctatagttatacatcttcattaatactgtgttaccttttaaaatagtaattttttacattttcctgtgtaaacctaattgtggtagaaatttttaccaactctatactcaatcaagcaaaatttctgtatattccctgtggaatgtacctatgtgagtttcagaaattctcaaaatacgtgttcaaaaatttctgcttttgcatctttgggacacctcagaaaacttattaacaactgtgaatatgagaaatacagaagaaaataataagccctctatacataaatgcccagcacaattcattgttaaaaaacaaccaaacctcacactactgtatttcattatctgtactgaaagcaaatgctttgtgactattaaatgttgcacatcattcattcactgtatagtaatcattgactaaagccatttgtctgtgttttcttcttgtggttgtatatatcaggtaaaatattttccaaagagccatgtgtcatgtaatactgaaccactttgatattgagacattaatttgtacccttgttattatctactagtaataatgtaatactgtagaaatattgctctaattcttttcaaaattgttgcatcccccttagaatgtttctatttccataaggatttaggtatgctattatcccttcttataccctaagatgaagctgtttttgtgctctttgttcatcattggccctcattccaagcactttacgctgtctgtaatgggatctatttttgcactggaatatctgagaattgcaaaactagacaaaagtttcacaacagatttctaagttaaatcattttcattaaaaggaaaaaagaaaaaaaattttgtatgtcaataactttatatgaagtattaaaatgcatatttctatgttgtaatataatgagtcacaaaataaagctgtgacagttctgttggtctacaaaaaaaa
